United States Patent Application Publication US 2006/0150283 A1 - sequence listing, part 4

SEQ ID NO: 11312 - DNA, 1828 bp, Zea mays subsp. mays
  misc_feature (1)..(1828): Ceres Seq. ID no. 12374352
  misc_feature (1)..(1828): Ortholog of  Ceres SEQ ID NO 13597162 as cited in SEQ ID NO 63955
  misc_feature (1)..(1828): Ortholog of  Ceres SEQ ID NO 14313567 as cited in SEQ ID NO 68074
acgcgaatccgcatctccagactccaaccagcgctcgtccctccccgttctttcctcctcccttcagccatcgcagtcgcagcgcaggttcttggctggttgctggtgtcgacagcaaagtccgcaactccaatcctgcctgcgctcctcccgtcctcactcagcacccgcgcacgccgcctgcctgtcgattgagatctctttcacgcccctttctgccatcgcacaactgaggtacggttctttgcttattgcagagtatagtatggatgcccgcagtgagtcgtcgtgtcgtgccttcagtaggagccgcagctagtaacatccattttgctggtcaataagtcgtgggaggaagaagatggattatttgaaggtgcaggtggtagagtcatcatttgtagtgccgagcgagccgacggccaacgaaggcgctctggctctcttgcttggacatggttcagtccaacaaagcccacaccccaacgatccacttgtacagctccaacgatgctgcggcggctgattttttcgacctgggcagactcaagaaggctacggccaaagccttggtggccttctaccccctcgccggacgcctcgtcgacagcgacgatggtaggaaggagatcagctgcaacggcgaaggtgcactctttgttgtcgctcgcgcggatggtgatctcactatcgatgaagtcaagaaattcaagccatcaccagagttgaggaggctgtttattccactcatcgagccatcgtccatcataatggccatacaggtgactttcttgaagtgtggaggtgtggtgttaggaacagctatccaccacgccgccacagacgtttcaagcgcgttccacttttttcagacatggtcggcgttctgcaagcatggtgacagtgctgccgtggagctcccgtgccacgaccgcaccctactccgcgcacggtccccgcccacagtccaccccgacgcgctctccacattgcagcctcggctcgtcctcactgaacccgaggggcctcttgccatcgaaatcttcaccatttccagggatcatgtcgcctccctgaagcagctctgcggtggcacgagcaccttttgcgccgtcagcgctctcatctggcagtgcgcgtgcgttgcacgacggatcccaccggactctcaggtgcgcgtgatgttcccggccgacgtccgccgccggatgaggccgcccctcccgacccactacttcggcaacgcagtgatcaggctatacgccgctggcccggcaggggacattggcacggcggcgttggcatccgtcgctgcccgcatcaagggcgccgtcgagcggatggatgacgagctggtgcggtccgcgattgactactacgagatggccgagacgaacaagagacggactgggacaggcatcttaccaccgacggacctgaatattaccagctggttgggtaggccacagcacgacgcagattttggctggggaaagccgcaatccatgtcgcgggcggagtctgtccgcggcggctctatgcacttgatgaacgacgacggtggtaccggcaacgtccgcgtgctcgtgtgcttggaggctgaaaatataaaggagctaggacggctgctttatgcaaagctctagcaagctgctagtgctatgcactaaaaataatattaataataataaggtttgttactttgcttaaggggaaccatactttttccctcgcgatttattattattaattatggcagtttgaataatgaaaaccatttgtaattcctgtgacaattagtttatgcgtccacactagaaataaaaac

SEQ ID NO: 11313 - protein, 396 aa, Zea mays subsp. mays
  peptide (1)..(396): Ceres Seq. ID no. 12374353
MVQSNKAHTPTIHLYSSNDAAAADFFDLGRLKKATAKALVAFYPLAGRLVDSDDGRKEISCNGEGALFVVARADGDLTIDEVKKFKPSPELRRLFIPLIEPSSIIMAIQVTFLKCGGVVLGTAIHHAATDVSSAFHFFQTWSAFCKHGDSAAVELPCHDRTLLRARSPPTVHPDALSTLQPRLVLTEPEGPLAIEIFTISRDHVASLKQLCGGTSTFCAVSALIWQCACVARRIPPDSQVRVMFPADVRRRMRPPLPTHYFGNAVIRLYAAGPAGDIGTAALASVAARIKGAVERMDDELVRSAIDYYEMAETNKRRTGTGILPPTDLNITSWLGRPQHDADFGWGKPQSMSRAESVRGGSMHLMNDDGGTGNVRVLVCLEAENIKELGRLLYAKL

SEQ ID NO: 11314 - protein, 291 aa, Zea mays subsp. mays
  peptide (1)..(291): Ceres Seq. ID no. 12374354
MAIQVTFLKCGGVVLGTAIHHAATDVSSAFHFFQTWSAFCKHGDSAAVELPCHDRTLLRARSPPTVHPDALSTLQPRLVLTEPEGPLAIEIFTISRDHVASLKQLCGGTSTFCAVSALIWQCACVARRIPPDSQVRVMFPADVRRRMRPPLPTHYFGNAVIRLYAAGPAGDIGTAALASVAARIKGAVERMDDELVRSAIDYYEMAETNKRRTGTGILPPTDLNITSWLGRPQHDADFGWGKPQSMSRAESVRGGSMHLMNDDGGTGNVRVLVCLEAENIKELGRLLYAKL

SEQ ID NO: 11315 - DNA, 1355 bp, Zea mays subsp. mays
  misc_feature (1)..(1355): Ceres Seq. ID no. 12364918
  misc_feature (1)..(1355): Ortholog of  Ceres SEQ ID NO 15176611 as cited in SEQ ID NO 52869
  misc_feature (1)..(1355): Ortholog of  Ceres SEQ ID NO 14307408 as cited in SEQ ID NO 59419
  misc_feature (1)..(1355): Ortholog of  Ceres SEQ ID NO 12617729 as cited in SEQ ID NO 65352
aaaacagacacttccgtttttattgtccaccctccgccgccggcgtctctccaaaacccaaccaaaccctagatccgccgcactcagttccggtgagaccctcctttccagcgaaaatgccgaacctcgagtgccggatgtatgagcagcggttcccggaggtggacgccgcggtgatgatccaggtgaagcacatcgctgacatgggcgcgtacgtctcgttgctcgagtacaacaacatcgagggcatgatcctcttctccgagctctcccgccgtcgtatccgctccatctcctccctcatcaaggttggccgccaggagcccgccatcgtgctccgtgtcgaccgcgacaagggctacatcgacctttcgaagcgtcgcgtctccgaggaggaggcgcacgcatgcgaggacaggtacaacaagtccaagctcgtgcactccatcatgcgccacgtcgccgagacgctcgagatcgacctcgagccgctctaccagcggattggctggccgctctaccgcaagtacggccacgccttcgaggccttcaagctcatagttgccgaccctgacgccatcctcgacgcactcacctatgaggagaaggaggtcggcccggatggccaggaggtgactaaggtggtgcctgctgtcacccccgaggttaaggattctctggttaagaacataaggaggaggatgacaccacagcctctcaagatccgtgctgatatagagatgaaatgcttccagtttgatggagtgctccatattaagcaagctatgaagaaagctgaagctgcgggcaatgataactgtcctgtgaagattaagctagttgctcctccactttatgttttgaccacacagacccttgacaaggatcaaggcatttcagttctcactactgcagtcaaggcttgtacagcagagattgaaaagtacaaaggaaagttagtagtgaaggaaccaccaagagctgttagtgagcgggaagacaagctattcctcgaccagattgattccctaatggagcaaaacgcagaggtcgatggtgatgctgacagtgaagaggaggaagatacaggaatgggggacgtcgacattacaaattctggcgtcgctgcttactaaggctacactggttgatttggatgagctttgctgtacagcaccagctaagttctaagccgttctgtttggaagcagtttctttctgttaggttttggtgaattcgctgaaactcgttacctgcgttgttaatgttttgggctcagccggtgttggggtagcgtttacttctgtcgagaatcaccaattttttcttgggagtgaaaacaaagcccgttgcc

SEQ ID NO: 11316 - protein, 377 aa, Zea mays subsp. mays
  peptide (1)..(377): Ceres Seq. ID no. 12364919
NRHFRFYCPPSAAGVSPKPNQTLDPPHSVPVRPSFPAKMPNLECRMYEQRFPEVDAAVMIQVKHIADMGAYVSLLEYNNIEGMILFSELSRRRIRSISSLIKVGRQEPAIVLRVDRDKGYIDLSKRRVSEEEAHACEDRYNKSKLVHSIMRHVAETLEIDLEPLYQRIGWPLYRKYGHAFEAFKLIVADPDAILDALTYEEKEVGPDGQEVTKVVPAVTPEVKDSLVKNIRRRMTPQPLKIRADIEMKCFQFDGVLHIKQAMKKAEAAGNDNCPVKIKLVAPPLYVLTTQTLDKDQGISVLTTAVKACTAEIEKYKGKLVVKEPPRAVSEREDKLFLDQIDSLMEQNAEVDGDADSEEEEDTGMGDVDITNSGVAAY

SEQ ID NO: 11317 - protein, 339 aa, Zea mays subsp. mays
  peptide (1)..(339): Ceres Seq. ID no. 12364920
MPNLECRMYEQRFPEVDAAVMIQVKHIADMGAYVSLLEYNNIEGMILFSELSRRRIRSISSLIKVGRQEPAIVLRVDRDKGYIDLSKRRVSEEEAHACEDRYNKSKLVHSIMRHVAETLEIDLEPLYQRIGWPLYRKYGHAFEAFKLIVADPDAILDALTYEEKEVGPDGQEVTKVVPAVTPEVKDSLVKNIRRRMTPQPLKIRADIEMKCFQFDGVLHIKQAMKKAEAAGNDNCPVKIKLVAPPLYVLTTQTLDKDQGISVLTTAVKACTAEIEKYKGKLVVKEPPRAVSEREDKLFLDQIDSLMEQNAEVDGDADSEEEEDTGMGDVDITNSGVAAY

SEQ ID NO: 11318 - protein, 332 aa, Zea mays subsp. mays
  peptide (1)..(332): Ceres Seq. ID no. 12364921
MYEQRFPEVDAAVMIQVKHIADMGAYVSLLEYNNIEGMILFSELSRRRIRSISSLIKVGRQEPAIVLRVDRDKGYIDLSKRRVSEEEAHACEDRYNKSKLVHSIMRHVAETLEIDLEPLYQRIGWPLYRKYGHAFEAFKLIVADPDAILDALTYEEKEVGPDGQEVTKVVPAVTPEVKDSLVKNIRRRMTPQPLKIRADIEMKCFQFDGVLHIKQAMKKAEAAGNDNCPVKIKLVAPPLYVLTTQTLDKDQGISVLTTAVKACTAEIEKYKGKLVVKEPPRAVSEREDKLFLDQIDSLMEQNAEVDGDADSEEEEDTGMGDVDITNSGVAAY

SEQ ID NO: 11319 - DNA, 1699 bp, Zea mays subsp. mays
  misc_feature (1)..(1699): Ceres Seq. ID no. 12376457
  misc_feature (1)..(1699): Ortholog of  Ceres SEQ ID NO 13598741 as cited in SEQ ID NO 62749
  misc_feature (1)..(1699): Ortholog of  Ceres SEQ ID NO 12587535 as cited in SEQ ID NO 64020
  misc_feature (1)..(1699): Ortholog of  Ceres SEQ ID NO 15176854 as cited in SEQ ID NO 64525
  misc_feature (1)..(1699): Ortholog of  Ceres SEQ ID NO 12586366 as cited in SEQ ID NO 68983
  misc_feature (1)..(1699): Ortholog of  Ceres SEQ ID NO 15178891 as cited in SEQ ID NO 0
agagcagagctgcctccagacgagacgaggaggacgcggcgccgctcgggcttggcagcaaccagcgtcgagcgcagtgcccttctgtctcctatctccccgctgcccagccgggtctcactttccagtctccgagactctgagtctcgctcgcaccccgtcccccgcagcctgtgctctgggttggagggaggtgagctgcgagggagcgcggagggggcgaggagatggaggcagattcggcgaggaagagacttgcattgctggccctgcttctcctggcggcgcccgtccgcccggcctcggcggctccggtggaggatggcctgctcagcaatggtgactttgagacagcaccaagtggtggttttgtaaaatctgcgtctgttgctgagggtgcatcgtcaatccctggttggacgatcaacggcacggttgaactcatttcagcaggccaacactagggtggcatgatcctgattgttccacagggggaccatgcagtaaggctagggaatgatgctagcgttgggcaggtggtggacgttgagaagggttcggagtatgctatcacattcagtgctgcccggacatgtgcacaactggaggcactgaatgtttccgtgctaggtggcgtatctcagacagtagacttgcagacgttgtacaacatagaaggctgggatgcgtacgcgttggcttttcaggcgacggaagagcaggcacatcttcaattcatgaaccctggcatggaggatgatccaacttgtggtcctatcctagacaacgttgcagtcaagaagctcttcaccccagacaaaccaaaggataacgtggtgctgaatggagactttgaggagggtccatggatgttcccgaacacgagcttcggcgtgctgctcccaactaaccttgacgagcagacgtctgccatacctgggtggatgatcgagtcaaaccgcgccgtccgctacatagactctgatgagtacaaggttccccagggaaagcgtgccattgagcttctgtcaggcaaggagggtatcatctcccagatggttgagaccacccctcagaaggtttacagcctgacgttcacactgggcacggcgggggactcgtgccaaccaccaatggccgtcatggcgttcgcgggggatcaggcccagaacttccactactccccaatgagcaatgccaccagccaggctgcgaatgtgacgttcactgcacgcgctgagagaacacgtgtggcgttctatagcgtgtactacaacacgaggagtgacgaccacagctcgctgtgtggcccagtgattgacgatgtccgggtatgggcattgaacgccgcggctgggttgaaggcaagtattggactggttcttggcgttgttggtgtcgttggcatggtgctgttctgaaatctgaatctctcggtggcagtggtcttgggaagtatggatgtataacttcttctgttagttggaggcttactagttttggtagtaagcttgaagtttgttgagtgatatgagcttaggttaaaaagctacgagaacctacatggtattgcttgtgttacttcattggtgacatgcagttgtatggtattgtgtggcttgtttgccctagcttgtaatatgagatgtcagaattattcgagatcatctcttcaatatattagaaaagagtaaagtgc

SEQ ID NO: 11320 - protein, 316 aa, Zea mays subsp. mays
  peptide (1)..(316): Ceres Seq. ID no. 12376458
MILIVPQGDHAVRLGNDASVGQVVDVEKGSEYAITFSAARTCAQLEALNVSVLGGVSQTVDLQTLYNIEGWDAYALAFQATEEQAHLQFMNPGMEDDPTCGPILDNVAVKKLFTPDKPKDNVVLNGDFEEGPWMFPNTSFGVLLPTNLDEQTSAIPGWMIESNRAVRYIDSDEYKVPQGKRAIELLSGKEGIISQMVETTPQKVYSLTFTLGTAGDSCQPPMAVMAFAGDQAQNFHYSPMSNATSQAANVTFTARAERTRVAFYSVYYNTRSDDHSSLCGPVIDDVRVWALNAAAGLKASIGLVLGVVGVVGMVLF

SEQ ID NO: 11321 - protein, 227 aa, Zea mays subsp. mays
  peptide (1)..(227): Ceres Seq. ID no. 12376459
MNPGMEDDPTCGPILDNVAVKKLFTPDKPKDNVVLNGDFEEGPWMFPNTSFGVLLPTNLDEQTSAIPGWMIESNRAVRYIDSDEYKVPQGKRAIELLSGKEGIISQMVETTPQKVYSLTFTLGTAGDSCQPPMAVMAFAGDQAQNFHYSPMSNATSQAANVTFTARAERTRVAFYSVYYNTRSDDHSSLCGPVIDDVRVWALNAAAGLKASIGLVLGVVGVVGMVLF

SEQ ID NO: 11322 - protein, 223 aa, Zea mays subsp. mays
  peptide (1)..(223): Ceres Seq. ID no. 12376460
MEDDPTCGPILDNVAVKKLFTPDKPKDNVVLNGDFEEGPWMFPNTSFGVLLPTNLDEQTSAIPGWMIESNRAVRYIDSDEYKVPQGKRAIELLSGKEGIISQMVETTPQKVYSLTFTLGTAGDSCQPPMAVMAFAGDQAQNFHYSPMSNATSQAANVTFTARAERTRVAFYSVYYNTRSDDHSSLCGPVIDDVRVWALNAAAGLKASIGLVLGVVGVVGMVLF

SEQ ID NO: 11323 - DNA, 1778 bp, Zea mays subsp. mays
  misc_feature (1)..(1778): Ceres Seq. ID no. 12413850
  misc_feature (1)..(1778): Ortholog of  Ceres SEQ ID NO 12609146 as cited in SEQ ID NO 52118
  misc_feature (1)..(1778): Ortholog of  Ceres SEQ ID NO 13638136 as cited in SEQ ID NO 58644
  misc_feature (1)..(1778): Ortholog of  Ceres SEQ ID NO 15225826 as cited in SEQ ID NO 64774
  misc_feature (1)..(1778): Ortholog of  Ceres SEQ ID NO 13599119 as cited in SEQ ID NO 0
aacttctttcttgttcggatcgggtcaggtcagtgctccgtgttgcgttttcttaagaacacgaaaaaaaaagaggggagagtttctttcgggtcctctttttctttgattgtcgaaaggccgctcctttaggagatttgcgcgcttctcgtcgagattagccgccggtgctcggatcgatctgtttgcggtggaggaattttgaggccaagaagagagttggaatcggatcgggagttcttgtggtcacagggtgcgaaaaaagcgagtgatttttgggaggatttcttgttgggaaaaaatcggttgttcagcggattagaggcggagatgggagccggggctgaggtcatgcatcaggtcgtgccgctgctggagccgccgctccaccggtgcgtcgttaagagcgtcgatgtcatggaggaggtggttgccgtggcgcctgggcaggtgcagccagcgacgtcgccgaaggcgctgttggaggttgccgtagaggtgcccgatctggagttgaagagatcttctaatgctgggagtagtgtatctgcagaacaactgcagtttgtccctatcattcgatctggtagctttgctgatattggacctaggcggttcatggaagatgagcatattagaattgatgatctttctggtcatcttggctcactgttgatggtctctgcgcctagcgcgttctacggggtgtttgacggtcatgggggttcagatgcagcagcctacatgaaaacacatgcaatgaggttgttctttgaagatgctgacttccctcaagcatcacaagaggataaaatatttgctgaatctgttgaggattcggtccgcagagctttcttgcgggctgaccttgcacttgctgatgattcagtcatcaaccgttcttctggcaccacagcgctgacagcattggtccttgggaggcaactgttggtagcaaacgctggggactgccgcgccgtcctgtgtaggaaagggacagcggtggaggtgtcaaaggatcacaggccgacatacgacgcagagcgtcaaagggttatcgagtgcggtggatacatcgaagatgggtacctcaacggcgtactctctgtgacccgggctttaggggactgggacatgaagctgccccaaggctctccgtcgccccttatcgcagagccagagatccactggaccaccctgacggaagacgacgagttcctcatcatcggctgcgatgggatatgggatgtgatgagcagccagcacgcggtgagcacggtccgcaagggcctccggaggcacgatgaccccgggcggagtgcccaggagctcgccatggaggcgaagaggctcgagaccttcgacaacctcaccgtgatcgttgtctgctttgtccccgacctcgccgggggcgtcggctacgccctcggagcaggtgccggctggaaggatcaggtgccgcaagagcttgtcgccagaggcactctgcaagctgaggagatggctcgagtctgaccagtagacgcttctatctgtagaggccagcgccagcctgtgtttctgtgctgtggctgtgtaaatattggcgctgatggtgttccgtctagtacggctgtgcttacacggccagcaattttgtagctgagagagagttccccccaccgccgctgccgcttttgttttcacaccgttttgtacttttgtgggatgtacataccattaccattgttgctcggttcggctcagtttggcagagagaataactactctagttcgct

SEQ ID NO: 11324 - protein, 394 aa, Zea mays subsp. mays
  peptide (1)..(394): Ceres Seq. ID no. 12413851
MGAGAEVMHQVVPLLEPPLHRCVVKSVDVMEEVVAVAPGQVQPATSPKALLEVAVEVPDLELKRSSNAGSSVSAEQLQFVPIIRSGSFADIGPRRFMEDEHIRIDDLSGHLGSLLMVSAPSAFYGVFDGHGGSDAAAYMKTHAMRLFFEDADFPQASQEDKIFAESVEDSVRRAFLRADLALADDSVINRSSGTTALTALVLGRQLLVANAGDCRAVLCRKGTAVEVSKDHRPTYDAERQRVIECGGYIEDGYLNGVLSVTRALGDWDMKLPQGSPSPLIAEPEIHWTTLTEDDEFLIIGCDGIWDVMSSQHAVSTVRKGLRRHDDPGRSAQELAMEAKRLETFDNLTVIVVCFVPDLAGGVGYALGAGAGWKDQVPQELVARGTLQAEEMARV

SEQ ID NO: 11325 - protein, 387 aa, Zea mays subsp. mays
  peptide (1)..(387): Ceres Seq. ID no. 12413852
MHQVVPLLEPPLHRCVVKSVDVMEEVVAVAPGQVQPATSPKALLEVAVEVPDLELKRSSNAGSSVSAEQLQFVPIIRSGSFADIGPRRFMEDEHIRIDDLSGHLGSLLMVSAPSAFYGVFDGHGGSDAAAYMKTHAMRLFFEDADFPQASQEDKIFAESVEDSVRRAFLRADLALADDSVINRSSGTTALTALVLGRQLLVANAGDCRAVLCRKGTAVEVSKDHRPTYDAERQRVIECGGYIEDGYLNGVLSVTRALGDWDMKLPQGSPSPLIAEPEIHWTTLTEDDEFLIIGCDGIWDVMSSQHAVSTVRKGLRRHDDPGRSAQELAMEAKRLETFDNLTVIVVCFVPDLAGGVGYALGAGAGWKDQVPQELVARGTLQAEEMARV

SEQ ID NO: 11326 - protein, 365 aa, Zea mays subsp. mays
  peptide (1)..(365): Ceres Seq. ID no. 12413853
MEEVVAVAPGQVQPATSPKALLEVAVEVPDLELKRSSNAGSSVSAEQLQFVPIIRSGSFADIGPRRFMEDEHIRIDDLSGHLGSLLMVSAPSAFYGVFDGHGGSDAAAYMKTHAMRLFFEDADFPQASQEDKIFAESVEDSVRRAFLRADLALADDSVINRSSGTTALTALVLGRQLLVANAGDCRAVLCRKGTAVEVSKDHRPTYDAERQRVIECGGYIEDGYLNGVLSVTRALGDWDMKLPQGSPSPLIAEPEIHWTTLTEDDEFLIIGCDGIWDVMSSQHAVSTVRKGLRRHDDPGRSAQELAMEAKRLETFDNLTVIVVCFVPDLAGGVGYALGAGAGWKDQVPQELVARGTLQAEEMARV

SEQ ID NO: 11327 - DNA, 882 bp, Zea mays subsp. mays
  misc_feature (1)..(882): Ceres Seq. ID no. 12402320
  misc_feature (1)..(882): Ortholog of  Ceres SEQ ID NO 12586195 as cited in SEQ ID NO 63768
  misc_feature (1)..(882): Ortholog of  Ceres SEQ ID NO 13599518 as cited in SEQ ID NO 0
attcactcctcgcgcctcgtgatcccatccaaatcccgatcagtccccgcccaagcctagcagatccgccggcgagcgcgcgggggcaatgggtgtcgtctcggcagcggcggacgcgattgtcgcggttttctccctcaccatcgtcgtcgcggcgccgctactcgacgcgcagtccgtcctcccgcataccctctacccggcgccgctcctggaactcaagcgctggtacgccgccgagtttggcgactacctcatggcccagccccccggcttcttccgtggccttgtttgcctcgagctcgccttccaatggccgctcgccgtcgccacactctacggcatcctcacccgccgccgctggggctgccaccacctccctcatggccggcgttggcaccctcacctccatgtctgcaattcttggtgagatgttaggttcaggcaaatcaacaccaaagttgcttcagatgtatgttccttatgctgtttttgctgtcattgctattctacgtggactttgctcatgctctggacgcactactgctggttcatcacttgggccttctgcccggaagaagagggtctagatcagcagtgacacttggagaattttcggtttgagacagtggcgccagagcactaatgctggtcagaagacgattatctggatcaggtttctatccctggtatttagcacggatgttgaaaaatccagatagtgttagtggctgtttctctaggatttggtgttcgttttcccttaaatgtgatattcatcttgcctttatttccattttaccctttgattatatgtcttgctaactaagacattgatttgtttactggatgagctgattctactctggcattgttctggcc

SEQ ID NO: 11328 - protein, 195 aa, Zea mays subsp. mays
  peptide (1)..(195): Ceres Seq. ID no. 12402321
SLLAPRDPIQIPISPRPSLADPPASARGQWVSSRQRRTRLSRFSPSPSSSRRRYSTRSPSSRIPSTRRRSWNSSAGTPPSLATTSWPSPPASSVALFASSSPSNGRSPSPHSTASSPAAAGAATTSLMAGVGTLTSMSAILGEMLGSGKSTPKLLQMYVPYAVFAVIAILRGLCSCSGRTTAGSSLGPSARKKRV

SEQ ID NO: 11329 - protein, 113 aa, Zea mays subsp. mays
  peptide (1)..(113): Ceres Seq. ID no. 12402322
MGVVSAAADAIVAVFSLTIVVAAPLLDAQSVLPHTLYPAPLLELKRWYAAEFGDYLMAQPPGFFRGLVCLELAFQWPLAVATLYGILTRRRWGCHHLPHGRRWHPHLHVCNSW

SEQ ID NO: 11330 - DNA, 1162 bp, Zea mays subsp. mays
  misc_feature (1)..(1162): Ceres Seq. ID no. 12401808
  misc_feature (1)..(1162): Ortholog of  Ceres SEQ ID NO 13594482 as cited in SEQ ID NO 51285
  misc_feature (1)..(1162): Ortholog of  Ceres SEQ ID NO 12617583 as cited in SEQ ID NO 64897
agtccgccacaagcacacgcgcacacaggggccaagcgcctacacctacagaggagagacaaggtctgccgtccgcgcgtgcgcggaagaggggacggaggaagaaggctgccagcaatcagagatggaggtggggttcttgggtctgggcatcatgggcaaggcaatggcgaccaacctcctccgccacggcttccgcgtcaccgtctggaacaggaccctcgccaagtgccaagagctcgccgcgctcggcgccaccgtcggggagacgcctgcctccgtcgtctccaagtgcagatacaccatcgccatgctctccgaccccagcgccgccctatcagtcgtcttcgacaaggatggcgtgctcgagcagatcggtagcgggaagggctatgtggacatgtccactgttgacgctgcaacttcgaccaagattagcgaggcagttaaacaaaaagggggagctttccttgaagctccagtttcagggagcaagaagccagctgaagatggccaattggtcattcttgctgcagggaacaagccattgtatgatggtatgattcctgcatttgatgtactggggaagaagtcattctttctgggagagattggaaatggggcaaagatgaagcttgtggtcaacatggtcatgggaagtatgatgaattctttgtccgagggactctgtttggccgacaaaagtgggctgagcccccaaacacttcttgatgtactggaccttggcgccatcgcaaacccaatgttcaagctgaaggggcctacaatgctgcaaggcagctacagccctgcgtttcccctgaagcatcagcagaaggacatgaggttagcgcttgctctgggagatgagaacgccgtcgccatgcccgtctcagcagctgccaatgaggcgttcaagaaggcgaggagcctggggctgggagaccaggatttttcggcggtctatgaggttgtgaagggcgcgggtggttctggatctggccagccgtgatagaaggaccatttgtgagttgtgactttgttagcccatttccatgccgatttgcaacatagcgacgtacgagtacgtgtgtattcgaaatttggaaccagaccatacgttgcaaaagaaataataaatcaaagagatggtgctagctcg

SEQ ID NO: 11331 - protein, 336 aa, Zea mays subsp. mays
  peptide (1)..(336): Ceres Seq. ID no. 12401809
VRHKHTRTQGPSAYTYRGETRSAVRACAEEGTEEEGCQQSEMEVGFLGLGIMGKAMATNLLRHGFRVTVWNRTLAKCQELAALGATVGETPASVVSKCRYTIAMLSDPSAALSVVFDKDGVLEQIGSGKGYVDMSTVDAATSTKISEAVKQKGGAFLEAPVSGSKKPAEDGQLVILAAGNKPLYDGMIPAFDVLGKKSFFLGEIGNGAKMKLVVNMVMGSMMNSLSEGLCLADKSGLSPQTLLDVLDLGAIANPMFKLKGPTMLQGSYSPAFPLKHQQKDMRLALALGDENAVAMPVSAAANEAFKKARSLGLGDQDFSAVYEVVKGAGGSGSGQP

SEQ ID NO: 11332 - protein, 295 aa, Zea mays subsp. mays
  peptide (1)..(295): Ceres Seq. ID no. 12401810
MEVGFLGLGIMGKAMATNLLRHGFRVTVWNRTLAKCQELAALGATVGETPASVVSKCRYTIAMLSDPSAALSVVFDKDGVLEQIGSGKGYVDMSTVDAATSTKISEAVKQKGGAFLEAPVSGSKKPAEDGQLVILAAGNKPLYDGMIPAFDVLGKKSFFLGEIGNGAKMKLVVNMVMGSMMNSLSEGLCLADKSGLSPQTLLDVLDLGAIANPMFKLKGPTMLQGSYSPAFPLKHQQKDMRLALALGDENAVAMPVSAAANEAFKKARSLGLGDQDFSAVYEVVKGAGGSGSGQP

SEQ ID NO: 11333 - protein, 285 aa, Zea mays subsp. mays
  peptide (1)..(285): Ceres Seq. ID no. 12401811
MGKAMATNLLRHGFRVTVWNRTLAKCQELAALGATVGETPASVVSKCRYTIAMLSDPSAALSVVFDKDGVLEQIGSGKGYVDMSTVDAATSTKISEAVKQKGGAFLEAPVSGSKKPAEDGQLVILAAGNKPLYDGMIPAFDVLGKKSFFLGEIGNGAKMKLVVNMVMGSMMNSLSEGLCLADKSGLSPQTLLDVLDLGAIANPMFKLKGPTMLQGSYSPAFPLKHQQKDMRLALALGDENAVAMPVSAAANEAFKKARSLGLGDQDFSAVYEVVKGAGGSGSGQP

SEQ ID NO: 11334 - DNA, 1220 bp, Zea mays subsp. mays
  misc_feature (1)..(1220): Ceres Seq. ID no. 12404052
  misc_feature (1)..(1220): Ortholog of  Ceres SEQ ID NO 14304148 as cited in SEQ ID NO 57313
  misc_feature (1)..(1220): Ortholog of  Ceres SEQ ID NO 13598513 as cited in SEQ ID NO 64102
  misc_feature (1)..(1220): Ortholog of  Ceres SEQ ID NO 14302224 as cited in SEQ ID NO 64268
acaacagcatcatggcgctcaccacgagcactaacaaccaagccttgcttgacgctcagctagagctctggcacacatcctttgctttcatcaagtccatggctctcaagtctgcagtggaccttggcatagccgacgccatccacagccacggtggcaacgccaccctgccccagatagtttccagggccgcgctccacccgtccaagatcccctgcctgcgtcgcctcatgcgggtgctcacagccgccggcatcttcagcgccgcccaccgctcgccggacgacggcggcggcgagctcgtctatggactcacaccggcgtctcagctcttggttggcggctcttcaagcctggctcccttcatgtccctggtgttacaccaggtctacgtgtcgcctttccttggcctcggcacatggttacagcacgagcgctcagacccgaccctgtttgagatgacgcatgggctcactgcctgggacctgaatgaccacaagccagccttcggcgagctcttcaaccaaggtatggtctgcgacagcagcttcgtcatggacatcgtcgtcaaggagtgcggcgacgtcttccggggtctgagctcccttgtcgacgtcgccggagggcttggcgcggcggccctggctatctcgaccgcgttcccgcatgtccagtgcagtgtgctggatctcccgcatgtcgccgccaatgctcccgctaacaccagtgtcaagtatattgctggcgacatgtttgagagcattccaccggcagacgccgtcttccttaagtgggttttgcatgactggggcgatgctgattgcatcaagatacttaagaactgtaagaaagctataccttctagggatgcaggaggaaaggtgataatcgttgatatggttgttggaggccagtcgtcaaacaataagcacaaagagactcaggtcttgtttgatctcttcatcatgacgatcaatggcgccgagcgagacgaacatgagtggaaaaagataatttctgaagctgggtttagcgactacaaaatcatacctgttctaggtgttcgatccatcattgaggtctacccatgattatttggcgaatacgtgtttcgctttttttctgaataagttgtttgcttaactagcatgggacgagtgtccatgagatcatgtgtgatgaaaactttgtttgtgatgaagtaagcactttgcaatgtc

SEQ ID NO: 11335 - protein, 362 aa, Zea mays subsp. mays
  peptide (1)..(362): Ceres Seq. ID no. 12404053
NSIMALTTSTNNQALLDAQLELWHTSFAFIKSMALKSAVDLGIADAIHSHGGNATLPQIVSRAALHPSKIPCLRRLMRVLTAAGIFSAAHRSPDDGGGELVYGLTPASQLLVGGSSSLAPFMSLVLHQVYVSPFLGLGTWLQHERSDPTLFEMTHGLTAWDLNDHKPAFGELFNQGMVCDSSFVMDIVVKECGDVFRGLSSLVDVAGGLGAAALAISTAFPHVQCSVLDLPHVAANAPANTSVKYIAGDMFESIPPADAVFLKWVLHDWGDADCIKILKNCKKAIPSRDAGGKVIIVDMVVGGQSSNNKHKETQVLFDLFIMTINGAERDEHEWKKIISEAGFSDYKIIPVLGVRSIIEVYP

SEQ ID NO: 11336 - protein, 359 aa, Zea mays subsp. mays
  peptide (1)..(359): Ceres Seq. ID no. 12404054
MALTTSTNNQALLDAQLELWHTSFAFIKSMALKSAVDLGIADAIHSHGGNATLPQIVSRAALHPSKIPCLRRLMRVLTAAGIFSAAHRSPDDGGGELVYGLTPASQLLVGGSSSLAPFMSLVLHQVYVSPFLGLGTWLQHERSDPTLFEMTHGLTAWDLNDHKPAFGELFNQGMVCDSSFVMDIVVKECGDVFRGLSSLVDVAGGLGAAALAISTAFPHVQCSVLDLPHVAANAPANTSVKYIAGDMFESIPPADAVFLKWVLHDWGDADCIKILKNCKKAIPSRDAGGKVIIVDMVVGGQSSNNKHKETQVLFDLFIMTINGAERDEHEWKKIISEAGFSDYKIIPVLGVRSIIEVYP

SEQ ID NO: 11337 - protein, 330 aa, Zea mays subsp. mays
  peptide (1)..(330): Ceres Seq. ID no. 12404055
MALKSAVDLGIADAIHSHGGNATLPQIVSRAALHPSKIPCLRRLMRVLTAAGIFSAAHRSPDDGGGELVYGLTPASQLLVGGSSSLAPFMSLVLHQVYVSPFLGLGTWLQHERSDPTLFEMTHGLTAWDLNDHKPAFGELFNQGMVCDSSFVMDIVVKECGDVFRGLSSLVDVAGGLGAAALAISTAFPHVQCSVLDLPHVAANAPANTSVKYIAGDMFESIPPADAVFLKWVLHDWGDADCIKILKNCKKAIPSRDAGGKVIIVDMVVGGQSSNNKHKETQVLFDLFIMTINGAERDEHEWKKIISEAGFSDYKIIPVLGVRSIIEVYP

SEQ ID NO: 11338 - DNA, 802 bp, Zea mays subsp. mays
  misc_feature (1)..(802): Ceres Seq. ID no. 12345607
  misc_feature (1)..(802): Ortholog of  Ceres SEQ ID NO 12638003 as cited in SEQ ID NO 1026
aagatttaacaattggtccagtccttacagttactacagaagccatgatagagcacatgaacaaccttctcaaaataagaggatcaaaggttctgtttggtggtgaaccgttagcgaatcactcaattcccaaaatttatggtgccatgaagcctactgctgtatttgttcctctagaagaaattctaaaaagtgggaacttcgagcttgtgacaaaggagatatttggtccattccaggtagtcacagaatactctgaggatcagcttgagttggtcttagaagcctgcgaaaggatgaatgcgcatctgacagctgcagttgtctcaaacgacccgctattcctgcaggatgtacttgggagatccgttaacgggacaacctacgccggaattcgagcgaggaccacgggcgctccacagaaccactggtttggcccggccggtgatccgcgaggcgcagggatcgggactccggaagccatcaaacttgtctggtcctgccacagggaagtcatatatgacgtcgggcccgtgcccgagagctgggcgcttccttccgcgacctgattagctagacgaggatagactattccatgtcatcacgagaaataaaaggggaagataagcgaagccagcaggactggagcgaccgaccgagagcgagtggctgcatgcctaggcattcattctctgcacgcaactgcactttcaaccctggagaaaacataataaatgctcgttcccctgtacttgagatacatggtacttggaccggaacgtcggacaactcgtctgttcgc

SEQ ID NO: 11339 - protein, 188 aa, Zea mays subsp. mays
  peptide (1)..(188): Ceres Seq. ID no. 12345608
DLTIGPVLTVTTEAMIEHMNNLLKIRGSKVLFGGEPLANHSIPKIYGAMKPTAVFVPLEEILKSGNFELVTKEIFGPFQVVTEYSEDQLELVLEACERMNAHLTAAVVSNDPLFLQDVLGRSVNGTTYAGIRARTTGAPQNHWFGPAGDPRGAGIGTPEAIKLVWSCHREVIYDVGPVPESWALPSAT

SEQ ID NO: 11340 - protein, 174 aa, Zea mays subsp. mays; identical to SEQ ID NO: 1028
  peptide (1)..(174): Ceres Seq. ID no. 12345609

SEQ ID NO: 11341 - protein, 170 aa, Zea mays subsp. mays; identical to SEQ ID NO: 1029
  peptide (1)..(170): Ceres Seq. ID no. 12345610

SEQ ID NO: 11342 - DNA, 844 bp, Zea mays subsp. mays
  misc_feature (1)..(844): Ceres Seq. ID no. 12341621
  misc_feature (1)..(844): Ortholog of  Ceres SEQ ID NO 13594671 as cited in SEQ ID NO 51800
  misc_feature (1)..(844): Ortholog of  Ceres SEQ ID NO 12784099 as cited in SEQ ID NO 66784
gcatgctaggtaaggttgagcgtgtcacagatgttgtattcactcttgatgatggtactggcaagatagatgtgaatcgctgggaaaatgaggcttccgatgctaaggagatggctgatgctaataacgagaactatgtcatagtcattggcggtttgaaaggttttcaaggaaagcgccatgtagttgcctatgctgtgcggcgtgtgacaaacttcaatgaaataacctgtcactttctgcactgcattcaggtgcatatggagctcacagggttaaagatctattcttcagctgcaacatatggaggagtagcccatgccccatcacagccaaatccggttgatggaaactacatatccaacttggtcttgagtgtttttcatgacccatctgtcatggaccaggagcatggactgcacatcaaagatgtcatagatcgtctcaaactaccagatgatgtagtcagtgcggccatccaaggtcatgttgatgtgggcaacatttacaacacaattgatgacttccactacaaatctgtccggaatggatgaccacgttgcaagtccagcgttcaggctccgtgtaggtatggagccgtttcaaggaagaagaaatgtaaaccctcttcaggatcgcctatattttgcagataggcttcatggtcaacagcttagcatatcggtttaggtgtgtattgctctcatatgtaatgatacataagatgtgagtagactaggtctacctgcaggacatcagtccgttcctacggaaatttgttatgaacgttttacattctaagacctatataaccgtgaagcacgcaaatcaagaatagaaccgc

SEQ ID NO: 11343 - protein, 183 aa, Zea mays subsp. mays
  peptide (1)..(183): Ceres Seq. ID no. 12341622
MLGKVERVTDVVFTLDDGTGKIDVNRWENEASDAKEMADANNENYVIVIGGLKGFQGKRHVVAYAVRRVTNFNEITCHFLHCIQVHMELTGLKIYSSAATYGGVAHAPSQPNPVDGNYISNLVLSVFHDPSVMDQEHGLHIKDVIDRLKLPDDVVSAAIQGHVDVGNIYNTIDDFHYKSVRNG

SEQ ID NO: 11344 - protein, 147 aa, Zea mays subsp. mays
  peptide (1)..(147): Ceres Seq. ID no. 12341623
MADANNENYVIVIGGLKGFQGKRHVVAYAVRRVTNFNEITCHFLHCIQVHMELTGLKIYSSAATYGGVAHAPSQPNPVDGNYISNLVLSVFHDPSVMDQEHGLHIKDVIDRLKLPDDVVSAAIQGHVDVGNIYNTIDDFHYKSVRNG

SEQ ID NO: 11345 - protein, 97 aa, Zea mays subsp. mays
  peptide (1)..(97): Ceres Seq. ID no. 12341624
MELTGLKIYSSAATYGGVAHAPSQPNPVDGNYISNLVLSVFHDPSVMDQEHGLHIKDVIDRLKLPDDVVSAAIQGHVDVGNIYNTIDDFHYKSVRNG

SEQ ID NO: 11346 - DNA, 1161 bp, Zea mays subsp. mays
  misc_feature (1)..(1161): Ceres Seq. ID no. 12404709
  misc_feature (1)..(1161): Ortholog of  Ceres SEQ ID NO 13600601 as cited in SEQ ID NO 497
  misc_feature (1)..(1161): Ortholog of  Ceres SEQ ID NO 13664283 as cited in SEQ ID NO 61283
  misc_feature (1)..(1161): Ortholog of  Ceres SEQ ID NO 12635513 as cited in SEQ ID NO 0
  misc_feature (1)..(1161): Ortholog of  Ceres SEQ ID NO 15179333 as cited in SEQ ID NO 0
acagtcacatactttccgcgcctcttcttctgcgcccctctcctcccaaactgcggatagagcagcgagccatcgacacgatcgcgagcgcaagcacgtacgttgtcggaagctcaagttagaagaagcaccagtgcctgatcgatggcggcccaggctctcctctccggccggcagctgctgggccgccccgtgcagtcggccgtctctaggtcgtcggcgaggaaggcgcccttcgtcgtcagggccagctccagccctccagccaagcaaggtgccgacaggcagctgtggttcgcgtccaagcagtccctctcctacctcgatggcacgctgcccggcgactatggcttcgacccgctgggcctctcggacccggagggcaccgggggcttcatcgagcccaagtggctggcctatggcgaggtgatcaacggccgctacgccatgctgggcgcggtgggcgccatcccccggagatcttcggcaagatgggcatcatccccccggagaccgcgctgccgtggttcaagacgggcgtcatcccgcccgcgggcacctacaactactgggccgactcctacacgctcttcgtcttcaacatggcgctcatgggcttcgccgagcaccgccgcctccaggactggtacaacccgggctccatgggcaagcagtacttcctcggcctcgagaagttcctcgccggctccggcgacccgtcctaccccggcgggcccctcttcaacccgctcggcttcggcaagaccgagaaggagatgaatgagctcaagctcaaggagatcaagaacggcaggctcgccatgctcgccatcctcggttacttcatccaggggctcgtcaccggcgtcggcccgttccagaacctgctcgaccacctcgccgaccccgtcaacaacaacgtgctcaccagcctcaagttccactagaacgtggtgcatcagcatacctgctgctgccgccgccgccgccagttgtttgctgtggaaagctagatgcatgcgtgttgtaaaggaacctgaagcgttgcatcggtcatgattcatgcatggccagcctgctgcctgtaacaacaaactagtattgatcttattgagaccggaaactgtattgcacatggtaaatcaatgtacaattcctccc

SEQ ID NO: 11347 - protein, 211 aa, Zea mays subsp. mays
  peptide (1)..(211): Ceres Seq. ID no. 12404710
MAAQALLSGRQLLGRPVQSAVSRSSARKAPFVVRASSSPPAKQGADRQLWFASKQSLSYLDGTLPGDYGFDPLGLSDPEGTGGFIEPKWLAYGEVINGRYAMLGAVGAIPRRSSARWASSPRRPRCRGSRRASSRPRAPTTTGPTPTRSSSSTWRSWASPSTAASRTGTTRAPWASSTSSASRSSSPAPATRPTPAGPSSTRSASARPRRR

SEQ ID NO: 11348 - protein, 151 aa, Zea mays subsp. mays
  peptide (1)..(151): Ceres Seq. ID no. 12404711
MGIIPPETALPWFKTGVIPPAGTYNYWADSYTLFVFNMALMGFAEHRRLQDWYNPGSMGKQYFLGLEKFLAGSGDPSYPGGPLFNPLGFGKTEKEMNELKLKEIKNGRLAMLAILGYFIQGLVTGVGPFQNLLDHLADPVNNNVLTSLKFH

SEQ ID NO: 11349 - protein, 142 aa, Zea mays subsp. mays
  peptide (1)..(142): Ceres Seq. ID no. 12404712
QSHTFRASSSAPLSSQTADRAASHRHDRERKHVRCRKLKLEEAPVPDRWRPRLSSPAGSCWAAPCSRPSLGRRRGRRPSSSGPAPALQPSKVPTGSCGSRPSSPSPTSMARCPATMASTRWASRTRRAPGASSSPSGWPMAR

SEQ ID NO: 11350 - DNA, 972 bp, Zea mays subsp. mays
  misc_feature (1)..(972): Ceres Seq. ID no. 12341008
  misc_feature (1)..(972): Ortholog of  Ceres SEQ ID NO 15174990 as cited in SEQ ID NO 62558
  misc_feature (1)..(972): Ortholog of  Ceres SEQ ID NO 14305591 as cited in SEQ ID NO 0
accagcagcactcgcgcaatcccgcagtttgacgagtttgcccccgtcgccctccattctctcccgctccgccgcttcgtctttttatacctcctgctgacgggactgctgacttcgcacccaggccgcggccgcatcctctccccatcggcagtcttcccccaagacgtctaaaccccaatccctaaatccccgacgcagaccacacgacgcgcacctccgttcacgaggcggaagcatgagtcgccacccgatcactaagtgggcacagaggtccgacagggtgttcttgacgatagagctgcccgacgcccaggatgtgaagctgaacttgaagcctgaaggccatttcaacttctcagctaagggctcagatgacttgcgctatgagtttgacattgagctgtttgatgctgtgaatgtggaggagagcaaagcagctattgccccaaggaccatatgctacctgataaagaaagctaagagcgggtggtggccaaggctgctgaagcaggagggcaaaccacctgtgttcttgaaggttgattgggacaaatggcaggacgaggatgatgaagacgctggatttaatgactttggtggtatggacttctcgaaactggacataggaggtgctgatgacgacgatattggggatgatgaagatgatgtggttgaaagtgctaacaaagatgaagaaggaggtaagacagaagagagcaaggaggaggaagcagctcctgcggctgcagaggaagtgaagccatgaagaatcatttgactttgctccgcgccatgggtgtccacggtatctagctaggctagacgttcccttggatttttggtgtaaaatctggaggtcgaaccactcactgcctattgaagtaaaggatacaaaaacagttgtgctgtcttagtttttggctgaaccctgtgaactgctgctacaatatttggtcagagtttatatgc

SEQ ID NO: 11351 - protein, 176 aa, Zea mays subsp. mays
  peptide (1)..(176): Ceres Seq. ID no. 12341009
MSRHPITKWAQRSDRVFLTIELPDAQDVKLNLKPEGHFNFSAKGSDDLRYEFDIELFDAVNVEESKAAIAPRTICYLIKKAKSGWWPRLLKQEGKPPVFLKVDWDKWQDEDDEDAGFNDFGGMDFSKLDIGGADDDDIGDDEDDVVESANKDEEGGKTEESKEEEAAPAAAEEVKP

SEQ ID NO: 11352 - DNA, 1087 bp, Zea mays subsp. mays
  misc_feature (1)..(1087): Ceres Seq. ID no. 12565899
  misc_feature (1)..(1087): Ortholog of  Ceres SEQ ID NO 14309137 as cited in SEQ ID NO 0
gcacgagaccattacctagaacatcctaatcgaaaaaccgcctcttctcctcttctcgattcgaaatcgagtacgtccgaatgctctagaaccttccgggcctagggatctcgatggggcccgagcaggaggaggccgtgctggagaccatctgggacctccacgacaaggtcagcgacgcgatccacgccctctcccgcgcccacttcctgcgcgccgttcgccgccgctcctcggcctccgcccccggcctcgtggacgtcaagggcgggggtctgggtctcggcgcgcgcggcggagacgaggtcgtcgccctggcggccctggctgaggaggccaggagcctgcacgccatccgcgccgcgctggaggacctcgaggaccagttcgagtgttttctcgccgtgcagacacagcaacaggccgaacgagatttcgcgatggcgaggctggagcaaagccgcatcatgctcgcgataaggctcaaagagcatcacgggagaaaccacaaggtcatagacgaggcgtctgccttcgtccgcgatgtctaccaggacgtctggccttccctgtcagctaccaaggccgagagacgcgccgacagttcaggtaacccggcgaagggtccgagcttcctcgcgcggatggtgtcctctagccttactgtagctgggagcggtttcagtctcaaaagtctggctttagctctcggcctagtcgcggtgctgcagtcttcaggggtcggtgaccgcaggtacaggaggaccaccagcgagaggagctcgtcgtggctgggatcatcatctccgagaggcggtagaacgggtcgtcttgacgtgtctctagccaggggttgaaaggggggctgcggtttgtggccttgcactgtatgcccctgtggcaagggccaagctcaggcccgctgcggtgttttttttgttgctttctcggtccagcagcaccaggcttcatcgctgaggctgctctctgcccatcatgccgggcgcagccggtgggcatgtttgatttgtgctaaatgtgacacattttatctaaggttagtcttttgaatggaagaattaaactt

SEQ ID NO: 11353 - protein, 247 aa, Zea mays subsp. mays
  peptide (1)..(247): Ceres Seq. ID no. 12565900
MGPEQEEAVLETIWDLHDKVSDAIHALSRAHFLRAVRRRSSASAPGLVDVKGGGLGLGARGGDEVVALAALAEEARSLHAIRAALEDLEDQFECFLAVQTQQQAERDFAMARLEQSRIMLAIRLKEHHGRNHKVIDEASAFVRDVYQDVWPSLSATKAERRADSSGNPAKGPSFLARMVSSSLTVAGSGFSLKSLALALGLVAVLQSSGVGDRRYRRTTSERSSSWLGSSSPRGGRTGRLDVSLARG

SEQ ID NO: 11354 - protein, 138 aa, Zea mays subsp. mays
  peptide (1)..(138): Ceres Seq. ID no. 12565901
MARLEQSRIMLAIRLKEHHGRNHKVIDEASAFVRDVYQDVWPSLSATKAERRADSSGNPAKGPSFLARMVSSSLTVAGSGFSLKSLALALGLVAVLQSSGVGDRRYRRTTSERSSSWLGSSSPRGGRTGRLDVSLARG

SEQ ID NO: 11355 - protein, 129 aa, Zea mays subsp. mays
  peptide (1)..(129): Ceres Seq. ID no. 12565902
MLAIRLKEHHGRNHKVIDEASAFVRDVYQDVWPSLSATKAERRADSSGNPAKGPSFLARMVSSSLTVAGSGFSLKSLALALGLVAVLQSSGVGDRRYRRTTSERSSSWLGSSSPRGGRTGRLDVSLARG

SEQ ID NO: 11356 - DNA, 1771 bp, Zea mays subsp. mays
  misc_feature (1)..(1771): Ceres Seq. ID no. 12359628
  misc_feature (1)..(1771): Ortholog of  Ceres SEQ ID NO 14307863 as cited in SEQ ID NO 20504
gatcttggccgagcgccgcgaggagggctcggagcgggagggtacgggccgtcggatgctcgcagctgccaccgccgcctacggctattttaaccccgcgctcctgccgacgccgcactcgcccccggcctcctcccgcctcccagatctcgctcgctcggcgccagttgcctcgcagtttggatcatctcatacctcggcgaagatgagggagatcctgcacatccagggagggcaatgtggcaaccagattggcgccaagttctgggaggtggtgtgcgatgaacatggcattgaccctaccgggcggtacactggcaattccgaccttcagttggagcgtgttaatgtctactacaatgaagcctcctgcggacgctttgttccccgcgctgttctcatggatcttgagcctgggacaatggacagtgtccggaccggaccctatgggcagatcttccgccctgacaactttgtgtttgggcaatctggtgctggtaacaattgggctaagggccactacaccgagggtgctgagctcattgactctgttctggatgttgtgatgaaggaagctgagaactgtgactgcttgcaaggattccaagtatgccactcccttggtggtggtactggatctggtatgggtacgctgttgatctcaaagatcagggaagagtaccctgaccgcatgatgcttacattctcagttttcccctcaccgaaagtatctgataccgtggttgagccatacaatgccactctttctgtccaccagttggtcgagaatgctgatgagtgcatggttctcgataacgaagccctctatgacatctgcttcaggactcttaagctgaccacccctagctttggtgatctgaaccatttgatctctgcaaccatgagtggagtcacctgctgcctaaggttccctggtcagctgaactccgacctcaggaagctggcagtgaacctgatccccttcccccgtctccacttcttcatggtcggcttcgcgccgctgacgtcccgtggctcccagcagtaccgggccctcacagtccccgagctcacgcagcagatgtgggatgccaagaacatgatgtgtgccgctgaccctcgccatgggcgttacctcaccgcctcggccatgttccgcgggaagatgagcaccaaggaggttgacgagcagatgatcaacgtccagaacaagaactcgtcctacttcgtggagtggatccccaacaacgtcaagtccagcgtgtgcgacatcccgcccaggggcctgtccatggcgtccaccttcatcggcaactcgacctccatccaggagatgttccggagggtgagcgagcagttcactgccatgttcaggaggaaggctttcttgcactggtacacgggcgagggcatggacgagatggagttcaccgaggccgagagcaacatgaacgacctcgtgtcggagtaccagcagtaccaggacgcgactgccgacgaggaggagtacgaggacgaggaggaggtgcaggccgatgacatgtgaggggagggctgttatcgtgtgaagccttgtggtccctagggcaagcggacctcgatgagttcggtgttccctttcgtgttgttgccatctttctactgctagcgtacccaccctcgtggcccattccgtcgctgttgacgtatgtatttttcttgtgctatggaaccttgcttttggtacggtactatcctgctagtatgcttggcgtttgaggttcctggcgtg

SEQ ID NO: 11357 - protein, 514 aa, Zea mays subsp. mays
  peptide (1)..(514): Ceres Seq. ID no. 12359629
ILAERREEGSEREGTGRRMLAAATAAYGYFNPALLPTPHSPPASSRLPDLARSAPVASQFGSSHTSAKMREILHIQGGQCGNQIGAKFWEVVCDEHGIDPTGRYTGNSDLQLERVNVYYNEASCGRFVPRAVLMDLEPGTMDSVRTGPYGQIFRPDNFVFGQSGAGNNWAKGHYTEGAELIDSVLDVVMKEAENCDCLQGFQVCHSLGGGTGSGMGTLLISKIREEYPDRMMLTFSVFPSPKVSDTVVEPYNATLSVHQLVENADECMVLDNEALYDICFRTLKLTTPSFGDLNHLISATMSGVTCCLRFPGQLNSDLRKLAVNLIPFPRLHFFMVGFAPLTSRGSQQYRALTVPELTQQMWDAKNMMCAADPRHGRYLTASAMFRGKMSTKEVDEQMINVQNKNSSYFVEWIPNNVKSSVCDIPPRGLSMASTFIGNSTSIQEMFRRVSEQFTAMFRRKAFLHWYTGEGMDEMEFTEAESNMNDLVSEYQQYQDATADEEEYEDEEEVQADDM

SEQ ID NO: 11358 - protein, 496 aa, Zea mays subsp. mays
  peptide (1)..(496): Ceres Seq. ID no. 12359630
MLAAATAAYGYFNPALLPTPHSPPASSRLPDLARSAPVASQFGSSHTSAKMREILHIQGGQCGNQIGAKFWEVVCDEHGIDPTGRYTGNSDLQLERVNVYYNEASCGRFVPRAVLMDLEPGTMDSVRTGPYGQIFRPDNFVFGQSGAGNNWAKGHYTEGAELIDSVLDVVMKEAENCDCLQGFQVCHSLGGGTGSGMGTLLISKIREEYPDRMMLTFSVFPSPKVSDTVVEPYNATLSVHQLVENADECMVLDNEALYDICFRTLKLTTPSFGDLNHLISATMSGVTCCLRFPGQLNSDLRKLAVNLIPFPRLHFFMVGFAPLTSRGSQQYRALTVPELTQQMWDAKNMMCAADPRHGRYLTASAMFRGKMSTKEVDEQMINVQNKNSSYFVEWIPNNVKSSVCDIPPRGLSMASTFIGNSTSIQEMFRRVSEQFTAMFRRKAFLHWYTGEGMDEMEFTEAESNMNDLVSEYQQYQDATADEEEYEDEEEVQADDM

SEQ ID NO: 11359 - protein, 446 aa, Zea mays subsp. mays
  peptide (1)..(446): Ceres Seq. ID no. 12359631
MREILHIQGGQCGNQIGAKFWEVVCDEHGIDPTGRYTGNSDLQLERVNVYYNEASCGRFVPRAVLMDLEPGTMDSVRTGPYGQIFRPDNFVFGQSGAGNNWAKGHYTEGAELIDSVLDVVMKEAENCDCLQGFQVCHSLGGGTGSGMGTLLISKIREEYPDRMMLTFSVFPSPKVSDTVVEPYNATLSVHQLVENADECMVLDNEALYDICFRTLKLTTPSFGDLNHLISATMSGVTCCLRFPGQLNSDLRKLAVNLIPFPRLHFFMVGFAPLTSRGSQQYRALTVPELTQQMWDAKNMMCAADPRHGRYLTASAMFRGKMSTKEVDEQMINVQNKNSSYFVEWIPNNVKSSVCDIPPRGLSMASTFIGNSTSIQEMFRRVSEQFTAMFRRKAFLHWYTGEGMDEMEFTEAESNMNDLVSEYQQYQDATADEEEYEDEEEVQADDM

SEQ ID NO: 11360 - DNA, 1857 bp, Zea mays subsp. mays
  misc_feature (1)..(1857): Ceres Seq. ID no. 12373415
  misc_feature (1)..(1857): Ortholog of  Ceres SEQ ID NO 12781104 as cited in SEQ ID NO 60925
gcaccaacagccaatccacacctcgcttgcgttgtcctcgccctgatccggttcccccgttcctcgcctcctctgacccaaattgagccaagcgaagccgtgcccgtgatccggtccatgcgcggagcgtggtagccggattctatcgccgtcgcctccccttcgccgccattttccagtcgccgggatcagccgagttggatctcgaggcataaagcgttgcgggcgcccggcgaggatacgatgcctgcggtgctcgccgcattcgctaccctccgagccgccgctgccatcgcctccggggactcctccttcccctgttcccatcgcctcaagcatcgttttagtagtagtaattttagtagtagtaattgtcattgacctttgcgttccctccgtcgcgcacgctcctcggctcggtcctcaccttcgcatctcggttttggtctggttgtgctcgatccgaagcttactttggctttgcagcttctctccttgtcgaagtttggtgtctggattcgacctgcagatcggaaggaaacaagaaacttctctttgtaatttgggatcaagcctgtggatggacgaaccctcggtggacttcagtgctgaaggtgttagcagcaactcaggtctctgccaaagcacctgtttaaatcctggttgcaagcatggctgtgcttgctgggaagatgattatgtcaaggccgtaatatctcatgggcaagatgatttggtggtcgatgaaattgaattggctcttactgaagtgatgcatgcatatgatgatgacaaatggtcaagtctgtatgaagattttgacgacggtgtcggcgaagaatcaattcttcctctggaatctgattcaactggtgattttgtggacattgactctgcatcacctacctttcctagtgacgatgcaatggaatcatcaattaccaattcatttgctcggaattgttcaattaatggcactccaagtttagtttctgccatgaaaggaacacgtgtgaagaagggaatcacgacaaagttgagcgtttcttgggcccctgatgtatacgaccctcctattacttctgactcgcacacggtgaaagggcaccatacgagttcaactaagagtaactacaaatacaagacctccaagagcagcaatatcactagaaggaaaaaggacaagaagcattctaggcacagtagtagcaatgggggtggcagcaaaagagacaagaagcattcttaccgcagtagtgccagcagcagcagcagagctattaccagtggttctctatattgtgacgcgtacagtggtggtggcatcagcagcagaactgttcctgaatctgccaagatatctccattggtggtagctgaaaatgtcacaccgcaagagatggttcctatactgaagacactggaaccaatcaaatgtactaccagctgcggcaaagagaagccatttgccttgctgtcgcgccagttttcccctgcaaggtacaaggggatgttcaccttttggaaccaaaaccaactgacttcttgacaatttgctatgcggaagctcacctgaaagttcccttgccaagggctgttcggatcccctccaaactttagagcttcaaaaaatttagagcattttagctcacttttgagctctaatctaaggttgaccaaagtttagatctaactgagctttacctctaaagtttagagaaggaaatctaaacatgccctaatttgattttatcaaagattgttgctattgttctcttcgttaccatgtttgtttcgcctgtctgaaacttcagagatcatgttttggaaaattgcttggcaaagtgcttgtgttgt

SEQ ID NO: 11361 - protein, 322 aa, Zea mays subsp. mays
  peptide (1)..(322): Ceres Seq. ID no. 12373416
MDEPSVDFSAEGVSSNSGLCQSTCLNPGCKHGCACWEDDYVKAVISHGQDDLVVDEIELALTEVMHAYDDDKWSSLYEDFDDGVGEESILPLESDSTGDFVDIDSASPTFPSDDAMESSITNSFARNCSINGTPSLVSAMKGTRVKKGITTKLSVSWAPDVYDPPITSDSHTVKGHHTSSTKSNYKYKTSKSSNITRRKKDKKHSRHSSSNGGGSKRDKKHSYRSSASSSSRAITSGSLYCDAYSGGGISSRTVPESAKISPLVVAENVTPQEMVPILKTLEPIKCTTSCGKEKPFALLSRQFSPARYKGMFTFWNQNQLTS

SEQ ID NO: 11362 - protein, 258 aa, Zea mays subsp. mays
  peptide (1)..(258): Ceres Seq. ID no. 12373417
MHAYDDDKWSSLYEDFDDGVGEESILPLESDSTGDFVDIDSASPTFPSDDAMESSITNSFARNCSINGTPSLVSAMKGTRVKKGITTKLSVSWAPDVYDPPITSDSHTVKGHHTSSTKSNYKYKTSKSSNITRRKKDKKHSRHSSSNGGGSKRDKKHSYRSSASSSSRAITSGSLYCDAYSGGGISSRTVPESAKISPLVVAENVTPQEMVPILKTLEPIKCTTSCGKEKPFALLSRQFSPARYKGMFTFWNQNQLTS

SEQ ID NO: 11363 - protein, 207 aa, Zea mays subsp. mays
  peptide (1)..(207): Ceres Seq. ID no. 12373418
MESSITNSFARNCSINGTPSLVSAMKGTRVKKGITTKLSVSWAPDVYDPPITSDSHTVKGHHTSSTKSNYKYKTSKSSNITRRKKDKKHSRHSSSNGGGSKRDKKHSYRSSASSSSRAITSGSLYCDAYSGGGISSRTVPESAKISPLVVAENVTPQEMVPILKTLEPIKCTTSCGKEKPFALLSRQFSPARYKGMFTFWNQNQLTS

SEQ ID NO: 11364 - DNA, 936 bp, Zea mays subsp. mays
  misc_feature (1)..(936): Ceres Seq. ID no. 12361858
  misc_feature (1)..(936): Ortholog of  Ceres SEQ ID NO 12617286 as cited in SEQ ID NO 63747
gaagcccaagacgctaactctctccctctcgtcctcctccctcacctccatgtcctcctcctcgctgcccgcccccgtcaccgatgtctgggaggtcgtcacccccactgccccacctgttgaccacgtggacggagggcttgatgactgcgtcatcttcccgccgcggctgcatgaggggctgggcctggacggcgagcccgaggaggtcccgccgatgccagcagtggcgaaggaggagaacgaggaggatggtgaatacgagggggaggacgatgagtggctgtggggatgggagaggtgcagcttggcggcgaggcgcgcttgggcggccggtgtcgggatcgttcaggagcgggtgctcgtgcatggcgcgtgtgggtgcccggcggtgaggcccgccgtgtggtcggttgcggcggcggctgctgtggtggggacacttctgtacgcccgtcggcgggataggagggaacgggacctgctcgtgcttctctccaaagagaaggataagaggatagcacaactcctgcatcaaattgctttaatgagtgacatcagaagcggcaatgaagcagtgaaggttatcaggaagtcctaatcattttcactgttgaagggttcagttgctatgttgtagcaaactgattaggtagttagggaatcagactagtcggtttgcaggttcaatacttgtagctaaattgtagtttagctgcatgatcttcacggttctgatgtttacgtataactagatgctgaaacctgcaaggttgcaacacaatctcaagcaatcaatagtcaccaccacgtcgcggtttcttctaaaaatatgtgtatagctgaatgatttggttaattcgtagatgtgtagaattgttgttcatgtcgacaaccctggacaatgctctgtatatgtatcttccatttattgct

SEQ ID NO: 11365 - protein, 199 aa, Zea mays subsp. mays
  peptide (1)..(199): Ceres Seq. ID no. 12361859
KPKTLTLSLSSSSLTSMSSSSLPAPVTDVWEVVTPTAPPVDHVDGGLDDCVIFPPRLHEGLGLDGEPEEVPPMPAVAKEENEEDGEYEGEDDEWLWGWERCSLAARRAWAAGVGIVQERVLVHGACGCPAVRPAVWSVAAAAAVVGTLLYARRRDRRERDLLVLLSKEKDKRIAQLLHQIALMSDIRSGNEAVKVIRKS

SEQ ID NO: 11366 - protein, 183 aa, Zea mays subsp. mays
  peptide (1)..(183): Ceres Seq. ID no. 12361860
MSSSSLPAPVTDVWEVVTPTAPPVDHVDGGLDDCVIFPPRLHEGLGLDGEPEEVPPMPAVAKEENEEDGEYEGEDDEWLWGWERCSLAARRAWAAGVGIVQERVLVHGACGCPAVRPAVWSVAAAAAVVGTLLYARRRDRRERDLLVLLSKEKDKRIAQLLHQIALMSDIRSGNEAVKVIRKS

SEQ ID NO: 11367 - protein, 127 aa, Zea mays subsp. mays
  peptide (1)..(127): Ceres Seq. ID no. 12361861
MPAVAKEENEEDGEYEGEDDEWLWGWERCSLAARRAWAAGVGIVQERVLVHGACGCPAVRPAVWSVAAAAAVVGTLLYARRRDRRERDLLVLLSKEKDKRIAQLLHQIALMSDIRSGNEAVKVIRKS

SEQ ID NO: 11368 - DNA, 1954 bp, Zea mays subsp. mays
  misc_feature (1)..(1954): Ceres Seq. ID no. 12366827
  misc_feature (1)..(1954): Ortholog of  Ceres SEQ ID NO 14308803 as cited in SEQ ID NO 55038
  misc_feature (1)..(1954): Ortholog of  Ceres SEQ ID NO 13595437 as cited in SEQ ID NO 56562
  misc_feature (1)..(1954): Ortholog of  Ceres SEQ ID NO 14315985 as cited in SEQ ID NO 57720
ctcttccgagtctgatccctccttccttccgtcagcgcacatctctagggttttagcgccccatttccgcatcgccattcccgatcggatcgcccccttcccacccgccgccgaccagatcccggcgcgagtgctacccaaccctccggcgccgccacccttagtctcagagggtcggtctccaccgaaagcttcgcacaaatcccctccgtttgtcggtgccatttgttgcaaagattgtgttttcctcctcatccgtgcctcgcgttctatttctgccgtccccgaaaatgccaccgctttgttgagatctctcgtttctcgatctgatctcgcctcggtatggcgtgagagttcctaggggagggcaaaatcctcggagttgagattcttgcgtccatttgctagtctcaataccgagcatccgatctcgaacagtgagacaaagtagcgacctttgtgccgttccttgtaactgagcttgcccccgcctgcgtatcggtgggtgacggcgagctctacggcgctgcccattcctatgaatggacgggagggagtccacggtggcgtcggggcccaacttctcgtcgttctacacgcagcaccggggcatcggggcgccgggtgtccccggccactcggcggtgctccatgacccgccgcccgctgggtaccggcagcatcttgatgctgtctctgctgggtacgcattccagaccccgcaggttgggggttcccacattggacaggggtaccaccatgtcgaggcctcaccccatgtggcgcaatacagctccggtggcggcaccagctccggcggtgatatggacattggcatgggttcggctgtgtgcaccaatgttaagggggagctggggagcgggcctgcccaagatgagcaggtgaagaagaagcggggtaggccaaggaagtataagcctgatggggcggtgactctcgggttatcaccctcttcatcattaacacctcactcggccagcttggggatgggaaccatggttagtgctccaggttctggatttgggtcggggggatcaggggcttcaggcttgggtgcgccatcagagaagcgtggcagggggcggccacctggctctggaaagatgcaacagttggcttcgcttggaaagtggtttcttggctctgttggaactggttttactcctcatgtgattattattcagccaggagaggacgttgctgccagaataatggccttctcacaacaagggcccaaggggcagtgtgcatcatttcagcaactggagctgtttctgcagcaacccttcaccaggattcagaatctggcagtgtggttacatatgagggtcggtttgagatcctgtgcctttctgggtcatacttggtagtagatgaaggtggcggcgcacggacccgaagtggagggctttgcatagctttgtgtggtcctgacaacagggttattggtgggagtgtaggtggagtcctgatggcagctggagcggttcaggtgatagtggggagcttcatgtacggcggaggttcgaagaagaacaaggtgaaagccgagttggatgcggggcctgaggaggcgaatgccggcgaccaagaggtggcacttgcggagcacagcagcatggcccctcatcctgccatgagtggtggtggcgggtgggcatctggcatgatgaggcagatggagtcgagaactcccaacatcgatatcaactccatccgcgagtagtttgcctgtttggttgggtggatgaggaaggctcctcctccttggatgcacacagcacagcggcatgcatatgtttggttgtaggcgttgctatgttttaggactccagagtatattgtgatgtgatgttgtacttggatgttgttgtataagatcatgggaacgcttggtcgtgttattatgttaataaaaatatataatggatgg

SEQ ID NO: 11369 - protein, 282 aa, Zea mays subsp. mays
  peptide (1)..(282): Ceres Seq. ID no. 12366828
MDGRESTVASGPNFSSFYTQHRGIGAPGVPGHSAVLHDPPPAGYRQHLDAVSAGYAFQTPQVGGSHIGQGYHHVEASPHVAQYSSGGGTSSGGDMDIGMGSAVCTNVKGELGSGPAQDEQVKKKRGRPRKYKPDGAVTLGLSPSSSLTPHSASLGMGTMVSAPGSGFGSGGSGASGLGAPSEKRGRGRPPGSGKMQQLASLGKWFLGSVGTGFTPHVIIIQPGEDVAARIMAFSQQGPKGQCASFQQLELFLQQPFTRIQNLAVWLHMRVGLRSCAFLGHTW

SEQ ID NO: 11370 - protein, 188 aa, Zea mays subsp. mays
  peptide (1)..(188): Ceres Seq. ID no. 12366829
MDIGMGSAVCTNVKGELGSGPAQDEQVKKKRGRPRKYKPDGAVTLGLSPSSSLTPHSASLGMGTMVSAPGSGFGSGGSGASGLGAPSEKRGRGRPPGSGKMQQLASLGKWFLGSVGTGFTPHVIIIQPGEDVAARIMAFSQQGPKGQCASFQQLELFLQQPFTRIQNLAVWLHMRVGLRSCAFLGHTW

SEQ ID NO: 11371 - protein, 184 aa, Zea mays subsp. mays
  peptide (1)..(184): Ceres Seq. ID no. 12366830
MGSAVCTNVKGELGSGPAQDEQVKKKRGRPRKYKPDGAVTLGLSPSSSLTPHSASLGMGTMVSAPGSGFGSGGSGASGLGAPSEKRGRGRPPGSGKMQQLASLGKWFLGSVGTGFTPHVIIIQPGEDVAARIMAFSQQGPKGQCASFQQLELFLQQPFTRIQNLAVWLHMRVGLRSCAFLGHTW

SEQ ID NO: 11372 - DNA, 1097 bp, Zea mays subsp. mays
  misc_feature (1)..(1097): Ceres Seq. ID no. 12353369
  misc_feature (1)..(1097): Ortholog of  Ceres SEQ ID NO 15178873 as cited in SEQ ID NO 1103
  misc_feature (1)..(1097): Ortholog of  Ceres SEQ ID NO 14311683 as cited in SEQ ID NO 51263
  misc_feature (1)..(1097): Ortholog of  Ceres SEQ ID NO 15177862 as cited in SEQ ID NO 56033
  misc_feature (1)..(1097): Ortholog of  Ceres SEQ ID NO 15173557 as cited in SEQ ID NO 60031
  misc_feature (1)..(1097): Ortholog of  Ceres SEQ ID NO 13661430 as cited in SEQ ID NO 61258
  misc_feature (1)..(1097): Ortholog of  Ceres SEQ ID NO 13590940 as cited in SEQ ID NO 68653
  misc_feature (1)..(1097): Ortholog of  Ceres SEQ ID NO 14301982 as cited in SEQ ID NO 0
  misc_feature (1)..(1097): Ortholog of  Ceres SEQ ID NO 15179001 as cited in SEQ ID NO 0
  misc_feature (1)..(1097): Ortholog of  Ceres SEQ ID NO 15180040 as cited in SEQ ID NO 0
ctatcagcccaaaaccgaacccacacctctgcccttcccatggcggccacgctattctccacctccctcttgccccagttcctctccctctccgctaagcccgccgccgccgccgccgccccgtccgccgccgccttcccatcggggatgccgcagctccacgcgctgtccgccgcggcggtgggctttaggccgctcgagcccgtgcgagcagccgcgaccgcggccgtgacggaggagctcgaggcggaggggcgttcgggcggggacgagttttcagatgatctcagggtcttcgtcggtaaccttccgttcagcgtcgacagcgcccagctcgcgggacttttcgagcaggccggctccgtcgagatggtcgaggttatctatgacaaattgacgggaagaagccgtggattcgggtttgtgaccatgtcttcggtcgaagaagttgaggtggctgttgaccaatttaatggctatgtgcttgatggaagaagtttgagggtgaactctgggccgccaccacccagagatcggtcatcaccgtcaccgcaaagacccaggggtgatgccaacagggtctacgtgggtaacctttcctggggagttgacaattcagctctcgcaaacctgttcagtgagcaaggtgaggtactggaagcaaggatcatctatgacagggagagtggaaggtcaagggggtttggttttgtcacgtacggttctgccgaagaggttgagaatgcaatatctaatctcgatggcgctgacttggacggcagacagatccgtgttacggtagcagagtcgaagccacctaggcagcaatactgaaattcctcttgagatttttgtaggtgtaccggtagcccaaactctggattatagtgacgccagtcctggatttggtctcgagattcattgaagttaaaaagccctcatgtatatggctcactatttatatacatgtaatattggattcccgtgttcagtgtccttttgtatcaatttggctgcatagtgtcttgtggcacttcaaaggacatagattgttgacgggcaaccaaacctcaagaaagtatcttgtattgtttctt

SEQ ID NO: 11373 - protein, 277 aa, Zea mays subsp. mays
  peptide (1)..(277): Ceres Seq. ID no. 12353370
LSAQNRTHTSALPMAATLFSTSLLPQFLSLSAKPAAAAAAPSAAAFPSGMPQLHALSAAAVGFRPLEPVRAAATAAVTEELEAEGRSGGDEFSDDLRVFVGNLPFSVDSAQLAGLFEQAGSVEMVEVIYDKLTGRSRGFGFVTMSSVEEVEVAVDQFNGYVLDGRSLRVNSGPPPPRDRSSPSPQRPRGDANRVYVGNLSWGVDNSALANLFSEQGEVLEARIIYDRESGRSRGFGFVTYGSAEEVENAISNLDGADLDGRQIRVTVAESKPPRQQY

SEQ ID NO: 11374 - protein, 264 aa, Zea mays subsp. mays
  peptide (1)..(264): Ceres Seq. ID no. 12353371
MAATLFSTSLLPQFLSLSAKPAAAAAAPSAAAFPSGMPQLHALSAAAVGFRPLEPVRAAATAAVTEELEAEGRSGGDEFSDDLRVFVGNLPFSVDSAQLAGLFEQAGSVEMVEVIYDKLTGRSRGFGFVTMSSVEEVEVAVDQFNGYVLDGRSLRVNSGPPPPRDRSSPSPQRPRGDANRVYVGNLSWGVDNSALANLFSEQGEVLEARIIYDRESGRSRGFGFVTYGSAEEVENAISNLDGADLDGRQIRVTVAESKPPRQQY

SEQ ID NO: 11375 - protein, 228 aa, Zea mays subsp. mays
  peptide (1)..(228): Ceres Seq. ID no. 12353372
MPQLHALSAAAVGFRPLEPVRAAATAAVTEELEAEGRSGGDEFSDDLRVFVGNLPFSVDSAQLAGLFEQAGSVEMVEVIYDKLTGRSRGFGFVTMSSVEEVEVAVDQFNGYVLDGRSLRVNSGPPPPRDRSSPSPQRPRGDANRVYVGNLSWGVDNSALANLFSEQGEVLEARIIYDRESGRSRGFGFVTYGSAEEVENAISNLDGADLDGRQIRVTVAESKPPRQQY

SEQ ID NO: 11376 - DNA, 685 bp, Zea mays subsp. mays
  misc_feature (1)..(685): Ceres Seq. ID no. 12403937
  misc_feature (1)..(685): Ortholog of  Ceres SEQ ID NO 12635564 as cited in SEQ ID NO 0
aaatatccctccattctcctaccaaaaatcgcagcgccgcccgcaccaatctcgaagtgttcgaaagtttccagacccccaaaaggcgaagcggcgatgagttccaccggaggcggcggccgcgggaaggcgaagccagcgaccaagtcggtgtcgcggtcctccaaggctgggcttcagttccccgtcggtcgcatcgcgcggtacctcaaggccgggaagtatgcggagcgcgtcggcgccggggcccccgtgtacctctccgccgttctcggagtatctcgccgccgaggtgctggagctggccgggaacgctgctcgggacaacaagaagaaccgtatcgtgccgcgccacatccagctggcggtgcggaacgacgaggagctgagcaagctgctgggcactgtgacgatcgcggccggcggcgtgatgccgaacatccatcagaccctgctgcccaagaaagctggtcagaagggggacatcggctctgcctcccaggagttctaagcgtttcggcggaatgaggagagggaccgccccctgtttctgtctcgtccgcgtggttgtgtttcagctctgcggtttttgggggagtgctgtcgatgagttgggattgatatgggttgtggggatgtaaacaaacgcagcgcgttgtttcatgaatgaatgatggatagaagg

SEQ ID NO: 11377 - protein, 175 aa, Zea mays subsp. mays
  peptide (1)..(175): Ceres Seq. ID no. 12403938
KYPSILLPKIAAPPAPISKCSKVSRPPKGEAAMSSTGGGGRGKAKPATKSVSRSSKAGLQFPVGRIARYLKAGKYAERVGAGAPVYLSAVLGVSRRRGAGAGRERCSGQQEEPYRAAPHPAGGAERRGAEQAAGHCDDRGRRRDAEHPSDPAAQESWSEGGHRLCLPGVLSVSAE

SEQ ID NO: 11378 - protein, 143 aa, Zea mays subsp. mays
  peptide (1)..(143): Ceres Seq. ID no. 12403939
MSSTGGGGRGKAKPATKSVSRSSKAGLQFPVGRIARYLKAGKYAERVGAGAPVYLSAVLGVSRRRGAGAGRERCSGQQEEPYRAAPHPAGGAERRGAEQAAGHCDDRGRRRDAEHPSDPAAQESWSEGGHRLCLPGVLSVSAE

SEQ ID NO: 11379 - protein, 128 aa, Zea mays subsp. mays
  peptide (1)..(128): Ceres Seq. ID no. 12403940
ISLHSPTKNRSAARTNLEVFESFQTPKRRSGDEFHRRRRPREGEASDQVGVAVLQGWASVPRRSHRAVPQGREVCGARRRRGPRVPLRRSRSISPPRCWSWPGTLLGTTRRTVSCRATSSWRCGTTRS

SEQ ID NO: 11380 - DNA, 827 bp, Zea mays subsp. mays
  misc_feature (1)..(827): Ceres Seq. ID no. 12343201
  misc_feature (1)..(827): Ortholog of  Ceres SEQ ID NO 14301742 as cited in SEQ ID NO 54857
atctccgaaaaaaaaacgcgaacgcagaacgccgccggcccgtcgtgcactcgtgtttcccttcctccacttgccttcgtgttcgtgattcgtgatttcgccgccggaaagccgagggagagggagcgatatggggttcgtcggagacacgatggagtcgatccgctccatgcagatccgccaagtgctcatgcagatcatcagcctcggtatgattgttacctctgcattaatcatatggaagggtttgatagttttcacggggagcgagtcaccagttgtagtggtgctctcgggtagcatggagcctggatttaaaaggggtgatatcctgtttttgcatatgagcaaagatcctattcgcacaggagaaatagttgttttcaatatcgatggtcgtgagattccaattgtccaccgagtgattaaggtccatgaacgtcaggacactgcagaagtggacatcctcaccaaaggtgacaataattttggggatgaccgactattatatgcacatggccagctttggctccagcaacaccacattatggggcgtgcggtgggctaccttccatatgttggctgggttacaattatcatgactgagaaaccatttattaagtacctgctgattggcgcactgggcttgctggtcataacgtcgaaagattagtgatgtcaaacttcagggccatgtagattttgctcttatggcgcaacagcagagatcactggctttgtggcgtttgagagatgccgctatgttgcgccatgtatcaaacgagaagatttctttatctactgcgagggcacctgcccattgatcg

SEQ ID NO: 11381 - protein, 180 aa, Zea mays subsp. mays
  peptide (1)..(180): Ceres Seq. ID no. 12343202
MGFVGDTMESIRSMQIRQVLMQIISLGMIVTSALIIWKGLIVFTGSESPVVVVLSGSMEPGFKRGDILFLHMSKDPIRTGEIVVFNIDGREIPIVHRVIKVHERQDTAEVDILTKGDNNFGDDRLLYAHGQLWLQQHHIMGRAVGYLPYVGWVTIIMTEKPFIKYLLIGALGLLVITSKD

SEQ ID NO: 11382 - protein, 173 aa, Zea mays subsp. mays
  peptide (1)..(173): Ceres Seq. ID no. 12343203
MESIRSMQIRQVLMQIISLGMIVTSALIIWKGLIVFTGSESPVVVVLSGSMEPGFKRGDILFLHMSKDPIRTGEIVVFNIDGREIPIVHRVIKVHERQDTAEVDILTKGDNNFGDDRLLYAHGQLWLQQHHIMGRAVGYLPYVGWVTIIMTEKPFIKYLLIGALGLLVITSKD

SEQ ID NO: 11383 - protein, 167 aa, Zea mays subsp. mays
  peptide (1)..(167): Ceres Seq. ID no. 12343204
MQIRQVLMQIISLGMIVTSALIIWKGLIVFTGSESPVVVVLSGSMEPGFKRGDILFLHMSKDPIRTGEIVVFNIDGREIPIVHRVIKVHERQDTAEVDILTKGDNNFGDDRLLYAHGQLWLQQHHIMGRAVGYLPYVGWVTIIMTEKPFIKYLLIGALGLLVITSKD

SEQ ID NO: 11384 - DNA, 1092 bp, Zea mays subsp. mays
  misc_feature (1)..(1092): Ceres Seq. ID no. 12404178
  misc_feature (1)..(1092): Ortholog of  Ceres SEQ ID NO 12609041 as cited in SEQ ID NO 51310
  misc_feature (1)..(1092): Ortholog of  Ceres SEQ ID NO 13594966 as cited in SEQ ID NO 56152
  misc_feature (1)..(1092): Ortholog of  Ceres SEQ ID NO 14312140 as cited in SEQ ID NO 57002
  misc_feature (1)..(1092): Ortholog of  Ceres SEQ ID NO 14312224 as cited in SEQ ID NO 57255
  misc_feature (1)..(1092): Ortholog of  Ceres SEQ ID NO 12582457 as cited in SEQ ID NO 57530
  misc_feature (1)..(1092): Ortholog of  Ceres SEQ ID NO 13655804 as cited in SEQ ID NO 64881
  misc_feature (1)..(1092): Ortholog of  Ceres SEQ ID NO 13599144 as cited in SEQ ID NO 0
aaaaagaaaagagagggagaggaagcgagcggctgggcgccccaagccccacatggtgcagcgaggtccacgctaacaacttctcgaccttggcctcccacggctctgccgcattgccgcgcgccgccggccggcactcgccgtcctgacgcgagaaggaagatgctctaggaagttgggggcctggctagggacagcctgtgtcccgccgtgggatcggtgggagagggggaggcaggcatgtgtgatctggtggcccgcacgggccggcacctgcagcgctacgagaacggccgtcgccttgtggccgggtgcataccattcagatatagggatattaatgatggagcttctgatgatgaacaaaagaaacttgttgaagttctcatgatcagctcccaaagtggaccgggtcttctatttccaaagggaggctgggagaatgatgaaactgttgaagaggcagctgcaagggaagctatcgaagaagctggagtgcgaggagatttagtgcaactgctggggttctacgatttcaagagcaagcagcccgaagcaacgtgcagagccgcaatcttcgccctgcacgtgaaggaagagctagcctcctggccagaacagagcacccggcagaggagctggctcaccgttcccgaggcggcggagcggagccgctacccgtggatgcaggaggccctcgtgacaggcttctccgcctggctcgagaactggagaaacggtggtggcggcggcggcggctgcgtggaccgaactgagagatgacaccaccttaaagcatcaggggggcccccggcggagaagccatctgctagctatttcttggcgttgtatcttgcttggactagaattttcttccagaggctgactgcctggcatacatgcatgagggctctctgatgctcggtagcttttgtttactttgtcgctttattacaccgtcgtcttcaggatgacagtctcctcagctgatgatggcccgaggtttgttaaattgtaagcttgctgattctcgcggtcgccagctatatttaactgtcttgtattgagccttgagacaaagcaagctttgtg

SEQ ID NO: 11385 - protein, 180 aa, Zea mays subsp. mays
  peptide (1)..(180): Ceres Seq. ID no. 12404179
MCDLVARTGRHLQRYENGRRLVAGCIPFRYRDINDGASDDEQKKLVEVLMISSQSGPGLLFPKGGWENDETVEEAAAREAIEEAGVRGDLVQLLGFYDFKSKQPEATCRAAIFALHVKEELASWPEQSTRQRSWLTVPEAAERSRYPWMQEALVTGFSAWLENWRNGGGGGGGCVDRTER

SEQ ID NO: 11386 - protein, 131 aa, Zea mays subsp. mays
  peptide (1)..(131): Ceres Seq. ID no. 12404180
MISSQSGPGLLFPKGGWENDETVEEAAAREAIEEAGVRGDLVQLLGFYDFKSKQPEATCRAAIFALHVKEELASWPEQSTRQRSWLTVPEAAERSRYPWMQEALVTGFSAWLENWRNGGGGGGGCVDRTER

SEQ ID NO: 11387 - DNA, 1635 bp, Zea mays subsp. mays
  misc_feature (1)..(1635): Ceres Seq. ID no. 12364926
  misc_feature (1)..(1635): Ortholog of  Ceres SEQ ID NO 14313514 as cited in SEQ ID NO 65029
acgcagcggaaaaatcccatcaaaaaacaaggggaaaaaacaacacagcatgaactgcttgaagaactcgcgttctgtcctctcgcgactccttcgccacaggccccacgtagccgcgccaccgccgccgacgccggcgacggcgccgcagccaccggcttcacggtactactactacgcctcccgcgtcaagccagccgtctcccgaccgccgcctcagttgccgagatctaggcactactacacatccccgcggcgtcagcaggtcgtccacttcaaccgccgccgcggcgggtcccggtggtaccacgaccagcggaagctcacggcggcggtcttaatcagcggcggcggggcggtcgcgttctacttcggccatttggagaccgtgccctacaccaaccgctcccacctcgtcgtcctctcgccgaagttcgagcgccagctcggcgagtcccagtttgcccagctcaagaaggagttcgggcccaagatcctgccaccgcttcaccccgacagcatccgtgtccgcctcatcgcctcggagatcgtccgcgccgtccaccgtggcatctccgtccaacagcgccacgacgccttctacggagaggacgcctcgtatgggtatggcggcatcgccgacgacctctccatcaagaaccgcgacgccgacgctgctgcagcgctgcttggtgcttcccccggcaagaacgccagtgctgccgtggccgctcagcgagatgacgagctcctggatgacaggtgggtgaccgagagtcggagccgaggtaaggcacgtggggcgcaaccgcagacgggtcacctggacggggttaactgggaggtgatcgttgtcaaagatgacctcgtcaatgcattttgcctgcctggtggcaagattgtagtcttcactggattgcttaacaaattcagggccgatgctgaggttgccactgttgttgggcatgaggttgggcatgctattgcgaggcactccgctgagcagatcactaagaacctctgggtggcaatcctgcagattgtcatcctgcagtttatttacatgccggacttgataaatacggtgtcaacactactcctcaggctacccttctcacgaagaatggagatagaggctgaccacatcgggctcctgctgctcgctgctgctggttacgatccgcgtgtggccccttcggtctatgagaagctaggaaagatcggaggagattcagcactgaataactacctctcgactcacccgtccagcaagaagagggcgcagcttctgtcgcaggccagtgtcatgaacgaggcgctgaaactgtacagggaggttagtgccggccaaggcaccgaaggtttcctctagattctgggacctgctcctctgcttgtttcaaacgcctcacaaagaggttggtggtcttgttagctgcagtagtgacggcctgtggcgatcggcgttctgagtggttcagaagcctggaagattaaacctcgttatttccagtcgttctgatgtcgaacggggccctcgtcgcttcccctagcagaagcaggatagctgctttgcatttgtcattaggaaaaaagaaattaagcaccgtatattgtcaataattgttggttgac

SEQ ID NO: 11388 - protein, 456 aa, Zea mays subsp. mays
  peptide (1)..(456): Ceres Seq. ID no. 12364927
RSGKIPSKNKGKKQHSMNCLKNSRSVLSRLLRHRPHVAAPPPPTPATAPQPPASRYYYYASRVKPAVSRPPPQLPRSRHYYTSPRRQQVVHFNRRRGGSRWYHDQRKLTAAVLISGGGAVAFYFGHLETVPYTNRSHLVVLSPKFERQLGESQFAQLKKEFGPKILPPLHPDSIRVRLIASEIVRAVHRGISVQQRHDAFYGEDASYGYGGIADDLSIKNRDADAAAALLGASPGKNASAAVAAQRDDELLDDRWVTESRSRGKARGAQPQTGHLDGVNWEVIVVKDDLVNAFCLPGGKIVVFTGLLNKFRADAEVATVVGHEVGHAIARHSAEQITKNLWVAILQIVILQFIYMPDLINTVSTLLLRLPFSRRMEIEADHIGLLLLAAAGYDPRVAPSVYEKLGKIGGDSALNNYLSTHPSSKKRAQLLSQASVMNEALKLYREVSAGQGTEGFL

SEQ ID NO: 11389 - protein, 440 aa, Zea mays subsp. mays
  peptide (1)..(440): Ceres Seq. ID no. 12364928
MNCLKNSRSVLSRLLRHRPHVAAPPPPTPATAPQPPASRYYYYASRVKPAVSRPPPQLPRSRHYYTSPRRQQVVHFNRRRGGSRWYHDQRKLTAAVLISGGGAVAFYFGHLETVPYTNRSHLVVLSPKFERQLGESQFAQLKKEFGPKILPPLHPDSIRVRLIASEIVRAVHRGISVQQRHDAFYGEDASYGYGGIADDLSIKNRDADAAAALLGASPGKNASAAVAAQRDDELLDDRWVTESRSRGKARGAQPQTGHLDGVNWEVIVVKDDLVNAFCLPGGKIVVFTGLLNKFRADAEVATVVGHEVGHAIARHSAEQITKNLWVAILQIVILQFIYMPDLINTVSTLLLRLPFSRRMEIEADHIGLLLLAAAGYDPRVAPSVYEKLGKIGGDSALNNYLSTHPSSKKRAQLLSQASVMNEALKLYREVSAGQGTEGFL

SEQ ID NO: 11390 - DNA, 1332 bp, Zea mays subsp. mays
  misc_feature (1)..(1332): Ceres Seq. ID no. 13498636
  misc_feature (1)..(1332): Ortholog of  Ceres SEQ ID NO 14308120 as cited in SEQ ID NO 58423
  misc_feature (1)..(1332): Ortholog of  Ceres SEQ ID NO 12617197 as cited in SEQ ID NO 63406
  misc_feature (1)..(1332): Ortholog of  Ceres SEQ ID NO 13597804 as cited in SEQ ID NO 64182
  misc_feature (1)..(1332): Ortholog of  Ceres SEQ ID NO 13598565 as cited in SEQ ID NO 65250
  misc_feature (1)..(1332): Ortholog of  Ceres SEQ ID NO 13598597 as cited in SEQ ID NO 65496
  misc_feature (1)..(1332): Ortholog of  Ceres SEQ ID NO 13596284 as cited in SEQ ID NO 68273
  misc_feature (1)..(1332): Ortholog of  Ceres SEQ ID NO 14308995 as cited in SEQ ID NO 0
  misc_feature (1)..(1332): Ortholog of  Ceres SEQ ID NO 15178902 as cited in SEQ ID NO 0
actacgtagctgcctgtgcctctttctggctccctgctgtctgcctggccggtgctcacagacacgcgcaagatggccggacgcacggaggaggctcgcaggagcggggagagggagacggtgtgcgtgacgggcgccggcgggtacatcgcctcatggctcgtcaagctcctcctctcccgcggctacgccgtgcacgccaccgtccgtgacccgcgtgatcccaagaacgcccacctggggcagctggaatgggccgcggagaatctccggctgttcaaggccgacgtgctcgacagcgacgcgctggctgccgcagtctccgggtgccggggggtcttccatgttgcctgtccggtgcccacggatagggttcttgatccggagtcagaagtactggctcctgctgtgcaaggtaccttaaacattcttcaggcttgctcagctaataatattcagaaggttgttgtggtttcgtctaccgccgctgttcatttcgacccaaattggcctccacatagacctaaagacgaggattgctggtcggacataaacttttgcaaaaagaacgaggactggtatatggttgccaaggttattgctgaaaagacagccctagaatacggagagagaaatggattaaatgttgttacagtttgccctactatggctttaggaccgctcttgcggcctatgctcaatgtcagccatgaattcctcatgtacattattaaaggaggtcctactatgatgaagaacattccatggcacatagttgatgtccgagatgtggttgatgctttgcttatggtatacaagaaagaggaatcgacagggagatacatctgtgcaccaaattgcatcagtgcaaaagatctggtgaacatgctgaagagggattatcctaattacaattatgtaaactgcgacaatgatatggtgcttaactctatagttacaccacttatgtcggagaaactgaagaatttgggctggaaaccaatgaagacactagaggaaacattattggatagtgttgaatgctataagaagatggggcttctaaaagatgctgagggatgcccttgtcgtcttcctcacctttttcatatggctatagaaaaatgaagaatactcaccattgcttcttgtgttacctaattactctttgaacattgttgggtatgtgttctaatcacacaccaataatgttgacattcaatgggttgtggttgatttgaaataaatgtttggtttcttatgtaatctatatggaacaaagtgcacctttcactttttttgtatggaagttgtcatgcatcttttttctcg

SEQ ID NO: 11391 - protein, 351 aa, Zea mays subsp. mays
  peptide (1)..(351): Ceres Seq. ID no. 13498637
MAGRTEEARRSGERETVCVTGAGGYIASWLVKLLLSRGYAVHATVRDPRDPKNAHLGQLEWAAENLRLFKADVLDSDALAAAVSGCRGVFHVACPVPTDRVLDPESEVLAPAVQGTLNILQACSANNIQKVVVVSSTAAVHFDPNWPPHRPKDEDCWSDINFCKKNEDWYMVAKVIAEKTALEYGERNGLNVVTVCPTMALGPLLRPMLNVSHEFLMYIIKGGPTMMKNIPWHIVDVRDVVDALLMVYKKEESTGRYICAPNCISAKDLVNMLKRDYPNYNYVNCDNDMVLNSIVTPLMSEKLKNLGWKPMKTLEETLLDSVECYKKMGLLKDAEGCPCRLPHLFHMAIEK

SEQ ID NO: 11392 - protein, 181 aa, Zea mays subsp. mays
  peptide (1)..(181): Ceres Seq. ID no. 13498638
MVAKVIAEKTALEYGERNGLNVVTVCPTMALGPLLRPMLNVSHEFLMYIIKGGPTMMKNIPWHIVDVRDVVDALLMVYKKEESTGRYICAPNCISAKDLVNMLKRDYPNYNYVNCDNDMVLNSIVTPLMSEKLKNLGWKPMKTLEETLLDSVECYKKMGLLKDAEGCPCRLPHLFHMAIEK

SEQ ID NO: 11393 - DNA, 1368 bp, Zea mays subsp. mays
  misc_feature (1)..(1368): Ceres Seq. ID no. 12373411
  misc_feature (1)..(1368): Ortholog of  Ceres SEQ ID NO 14307526 as cited in SEQ ID NO 58875
atgtttgcaggatttgcaacccatttctctcctcgactcccacaacagggtccgtacgggaaagagagagaaggtgggagtggaatcgacaggggaaaaccaagcctgtgtttcagagacaactcaggcgacgcgatggcgatggcggcgctgcgacgcgaggggaggcgcctcctcctcgcccccaccgtccccaacccgtcttcggcggccgcttccgctgcggtgacgcgatcctccgccatgtcgcaaccggagatggctccacttggtgcacgttctatttcaactcaagttgtgaggaaccggatgaagagtatcaaaaacatccagaagatcacaaaggctatgaagatggttgcagcatcaaagcttcgggctgttcagacgaggactgaaaattcacgcggcttgtggcagtcgttcaccgcccttcttggggacgctcctagtgttgacgtcaagaagaatgtgattgtggccattacctctgataagggactctgtggtggtatcaattcaacctcggtgaaagttagcagggcccttcacaaactgacatctggtccagaaaaagaaagcaagtatgttatattaggagaaaaaggcaaagttcagctgttgcgtgactcgaagaacagcattgaaatgaccgcaagtgaactacagaagaaccctatcaactatacacagattgctgtgctcgcggatgacatattgaaaaatgtggaatatgatgctctaagggttattttcaacaagttccattctgtcatatcgtttaagcccacaatggtaacgatactgtcccctgaggttgcagaaaaagaagcagaagctggtgggaagatgggtgacctagattcttatgagattgaaggcggtgagacaaaagcagagatattgcaaaacctagctgagttccagttttcttgtgtcatgtacaatggtgccctagagaatgcatgcagtgagcttggagcccgtatgtctgccatggacagctctagcagaaatgctggcgatatgcttgatcgtctcacgcttacttacaacaggacacgccaagcatccatcaccacagagcttactgagattatatctggtgcatcagcccttgaaggataggtgaagagactatgtggacttttccctttttccccatttgcgttcctctcacatgaaggcttcttttcttccggaggctcagtttcaacccttctcgtttcacttttccttgataaacgtattcttatgctttattgcaataattaggccaacgacagtgatgatgccgtgcgcctttgcatattccaaaaagaatgttctacatctatggtgaatggctggttttcataaatggtgatg

SEQ ID NO: 11394 - protein, 375 aa, Zea mays subsp. mays
  peptide (1)..(375): Ceres Seq. ID no. 12373412
MFAGFATHFSPRLPQQGPYGKEREGGSGIDRGKPSLCFRDNSGDAMAMAALRREGRRLLLAPTVPNPSSAAASAAVTRSSAMSQPEMAPLGARSISTQVVRNRMKSIKNIQKITKAMKMVAASKLRAVQTRTENSRGLWQSFTALLGDAPSVDVKKNVIVAITSDKGLCGGINSTSVKVSRALHKLTSGPEKESKYVILGEKGKVQLLRDSKNSIEMTASELQKNPINYTQIAVLADDILKNVEYDALRVIFNKFHSVISFKPTMVTILSPEVAEKEAEAGGKMGDLDSYEIEGGETKAEILQNLAEFQFSCVMYNGALENACSELGARMSAMDSSSRNAGDMLDRLTLTYNRTRQASITTELTEIISGASALEG

SEQ ID NO: 11395 - protein, 330 aa, Zea mays subsp. mays
  peptide (1)..(330): Ceres Seq. ID no. 12373413
MAMAALRREGRRLLLAPTVPNPSSAAASAAVTRSSAMSQPEMAPLGARSISTQVVRNRMKSIKNIQKITKAMKMVAASKLRAVQTRTENSRGLWQSFTALLGDAPSVDVKKNVIVAITSDKGLCGGINSTSVKVSRALHKLTSGPEKESKYVILGEKGKVQLLRDSKNSIEMTASELQKNPINYTQIAVLADDILKNVEYDALRVIFNKFHSVISFKPTMVTILSPEVAEKEAEAGGKMGDLDSYEIEGGETKAEILQNLAEFQFSCVMYNGALENACSELGARMSAMDSSSRNAGDMLDRLTLTYNRTRQASITTELTEIISGASALEG

SEQ ID NO: 11396 - protein, 328 aa, Zea mays subsp. mays
  peptide (1)..(328): Ceres Seq. ID no. 12373414
MAALRREGRRLLLAPTVPNPSSAAASAAVTRSSAMSQPEMAPLGARSISTQVVRNRMKSIKNIQKITKAMKMVAASKLRAVQTRTENSRGLWQSFTALLGDAPSVDVKKNVIVAITSDKGLCGGINSTSVKVSRALHKLTSGPEKESKYVILGEKGKVQLLRDSKNSIEMTASELQKNPINYTQIAVLADDILKNVEYDALRVIFNKFHSVISFKPTMVTILSPEVAEKEAEAGGKMGDLDSYEIEGGETKAEILQNLAEFQFSCVMYNGALENACSELGARMSAMDSSSRNAGDMLDRLTLTYNRTRQASITTELTEIISGASALEG

SEQ ID NO: 11397 - DNA, 1638 bp, Zea mays subsp. mays
  misc_feature (1)..(1638): Ceres Seq. ID no. 12341014
  misc_feature (1)..(1638): Ortholog of  Ceres SEQ ID NO 15171755 as cited in SEQ ID NO 57047
  misc_feature (1)..(1638): Ortholog of  Ceres SEQ ID NO 13597613 as cited in SEQ ID NO 65334
  misc_feature (1)..(1638): Ortholog of  Ceres SEQ ID NO 14303664 as cited in SEQ ID NO 65892
  misc_feature (1)..(1638): Ortholog of  Ceres SEQ ID NO 15178832 as cited in SEQ ID NO 0
aacccagtgtgcgcacttcaccccccctctcggtctcaccctcctggcgacgactgggcggccgaccggccgtcgccgccgccccacgccaggtttcaaagtcttcgtcaggcccttctccggcgacttgagcaccacagggtgacaaggatagctttctcgggtcactgaaggaagacatcttctcgacgcgttagaccttctgacggttggctggttgtgctttaagtgttcaaggggtggattaggaccgggaaactctgtactgaagggaaggtcaaaagtgtcaagagagcttgttccaagatggatgaaggtcagggagttaggtattggtgccacatgtgtcaggaggtgatagatcccatgcccgagatgaagtgcccaggctgcgagggcgggtttgtggaggagatggactctgaagactttgagccagctgcgaacgcgaggtctgatcgctccgtctctctcttggctccactgctgcttggtatgatggggggttcgtcgcgcagatcaagactcaggagggaggccatggttgaagctgatgccgaccaggatgacgaagaggatgattcagatcatgagcttgaactttccaggaggaggcggaggaggaggcgctcatcagcgcttttcagtgtgcttgaggctatgcgtgaccgtgatgaagtaaggggctcggatgacaccgacagtgatacagagagagacctggagagagggagaagggagaggatggagaggcagagggagaggttaaggcagatcgagagggtgagtgctcgtggcagagagaggacggaaagcttaatactgatcaactccaacaacgaggctattattctgcagggaacattcggatctgatgacaaccaagaggactcaagcaacacaagttctggtgtatcacttggggattactttcttggtcctgccttagatactctcttgcagcgtttggcggagagtgacctcagtcgttctggcacaccgcctgccaagaaggaagcagtcgccgcgctaccaactgtgaacatcgaggaagcgttgggctgttcagtctgtcttgaggatttcgagatgggaggagaagcgaagcagatgccctgtcagcataagttccactcgcactgcatactcccgtggctggagctccacagctcttgcccaatctgccggtttcagttgcctactgaggagacgaagaacaacccatgcgaatcagccagcaccgcaggggccgtgaacggcgatggagacaacgctgctgcaagcggcagcgatacagaaagtactaaccacaatgaagatgaccattccgatagccctatcttctctgctctgagcacactcttctctgatccgttctcatccgacgatgatgaaagtgttccacactcttacgagaactgaagatagcgtcggacgcaggcttgcgatatggtgaagccgttctgaggctggcatctttatattgtagcttctgtacatatctctctgaacggtcgctcccccccataagacaaactattacctctccgttttactgaaaactatgtggcttgtaatctgctagtgcttgctatgttcacttgcctcgaataaatgttatcctttagcgtgcttatt

SEQ ID NO: 11398 - protein, 371 aa, Zea mays subsp. mays
  peptide (1)..(371): Ceres Seq. ID no. 12341015
MDEGQGVRYWCHMCQEVIDPMPEMKCPGCEGGFVEEMDSEDFEPAANARSDRSVSLLAPLLLGMMGGSSRRSRLRREAMVEADADQDDEEDDSDHELELSRRRRRRRRSSALFSVLEAMRDRDEVRGSDDTDSDTERDLERGRRERMERQRERLRQIERVSARGRERTESLILINSNNEAIILQGTFGSDDNQEDSSNTSSGVSLGDYFLGPALDTLLQRLAESDLSRSGTPPAKKEAVAALPTVNIEEALGCSVCLEDFEMGGEAKQMPCQHKFHSHCILPWLELHSSCPICRFQLPTEETKNNPCESASTAGAVNGDGDNAAASGSDTESTNHNEDDHSDSPIFSALSTLFSDPFSSDDDESVPHSYEN

SEQ ID NO: 11399 - protein, 359 aa, Zea mays subsp. mays
  peptide (1)..(359): Ceres Seq. ID no. 12341016
MCQEVIDPMPEMKCPGCEGGFVEEMDSEDFEPAANARSDRSVSLLAPLLLGMMGGSSRRSRLRREAMVEADADQDDEEDDSDHELELSRRRRRRRRSSALFSVLEAMRDRDEVRGSDDTDSDTERDLERGRRERMERQRERLRQIERVSARGRERTESLILINSNNEAIILQGTFGSDDNQEDSSNTSSGVSLGDYFLGPALDTLLQRLAESDLSRSGTPPAKKEAVAALPTVNIEEALGCSVCLEDFEMGGEAKQMPCQHKFHSHCILPWLELHSSCPICRFQLPTEETKNNPCESASTAGAVNGDGDNAAASGSDTESTNHNEDDHSDSPIFSALSTLFSDPFSSDDDESVPHSYEN

SEQ ID NO: 11400 - protein, 351 aa, Zea mays subsp. mays
  peptide (1)..(351): Ceres Seq. ID no. 12341017
MPEMKCPGCEGGFVEEMDSEDFEPAANARSDRSVSLLAPLLLGMMGGSSRRSRLRREAMVEADADQDDEEDDSDHELELSRRRRRRRRSSALFSVLEAMRDRDEVRGSDDTDSDTERDLERGRRERMERQRERLRQIERVSARGRERTESLILINSNNEAIILQGTFGSDDNQEDSSNTSSGVSLGDYFLGPALDTLLQRLAESDLSRSGTPPAKKEAVAALPTVNIEEALGCSVCLEDFEMGGEAKQMPCQHKFHSHCILPWLELHSSCPICRFQLPTEETKNNPCESASTAGAVNGDGDNAAASGSDTESTNHNEDDHSDSPIFSALSTLFSDPFSSDDDESVPHSYEN

SEQ ID NO: 11401 - DNA, 1567 bp, Zea mays subsp. mays
  misc_feature (1)..(1567): Ceres Seq. ID no. 12341078
  misc_feature (1)..(1567): Ortholog of  Ceres SEQ ID NO 12364737 as cited in SEQ ID NO 51089
  misc_feature (1)..(1567): Ortholog of  Ceres SEQ ID NO 14306553 as cited in SEQ ID NO 53121
  misc_feature (1)..(1567): Ortholog of  Ceres SEQ ID NO 13582301 as cited in SEQ ID NO 56509
  misc_feature (1)..(1567): Ortholog of  Ceres SEQ ID NO 13655302 as cited in SEQ ID NO 63307
  misc_feature (1)..(1567): Ortholog of  Ceres SEQ ID NO 13597380 as cited in SEQ ID NO 64054
  misc_feature (1)..(1567): Ortholog of  Ceres SEQ ID NO 12625474 as cited in SEQ ID NO 64169
  misc_feature (1)..(1567): Ortholog of  Ceres SEQ ID NO 13597502 as cited in SEQ ID NO 64681
gaccctttctttcccaaagccgagcagcgaccagcgagggtgccactgccaccgcccgccccccagtcccccactcactcactagctagcttgctagctgcgcactacgggctacgccgagctagagtccggcgatcacagcccggcaggccggccatggccaccgcgcccgtcgtcgtcctagtcctgcacgttctgctaggcgctgcagcggccgcctgcgccgcggcggcagggagtagcagcaaggtgccggcgatgtacgtgttcggcgactccacggcggacgtgggcaccaacaactacttgccgggcggcgccgaagtgccgcgtgccaacttcccccacaacggcgtcgacttccccacggcgcgccccaccggcaggttcagcaacgggttcaacggcgtcgacttcttggccgtgaacatgggcttcaagcgcagccccccgccgttcctcgccgtggccaacaagaccaacaggcaggtcttccgaggtctcctgggagtgaacttcgcctctgcaggatcaggcatcctcgacacgacggggagctccatcatcccgctgagcaagcaggtggagcagttcgccgccgtgcggcgcaacatctcgtcgcgcgtcggcaacgggtctgctgctgccgacgccctgctgtcgcggtccctgttcctcgtcagcaccggcggcaacgacctgttcgccttcttcgcgcggaacagcacgccgtcggacgccgacaagcggcggttcgtcgccaacctcgtcacgctgtaccagaaccatgtgaaggctctgtacgtgctcggggctcggaagttcgccgtgatcgacgtcccgccggtcgggtgctgcccctacccgaggagcctgcacccgctgggcgcctgcatcgacgtgctcaacgagctggcgcgcgggttcaacgagggcgtcagggcggccatgcacggcctcggcgtgagcttccaggggctcaggtactccgtcgggagctcccacgccgtcgtgcagagcatcatgaagcaccctcaaaggctggggttcaaggacgtgacgaacgcgtgctgcgggtcgggccggttcaacggcaagtccgggtgcacgcccaacgcgacgctgtgcgacaaccgacaccagtacctgttctgggacctgctgcaccccacgcacgccgcctccaagatcgccgccgccgccatctacaacggctcgctccacttcgccgcgccgatgaacttcaggcagctggccgaagacgaccggtgctagctagctagcacagctagagctagcacgaggacgtagggacgtgtctctgttctctgctgcggactgtggtgaatatggtcgttggtgtgtagaggacgacggatgcgtgcatggctgctgtgttcgctgtatgtttctcgaccgtggtttggtttagatgatgatgaccgacgccgccggcgtagtttggactgtgaacgaatttacatcatgctgctgcagaggtacgggtgtaccgtgtacgtgacatcgtctacacctctcctggacaactttaactgaatcttttttt

SEQ ID NO: 11402 - protein, 424 aa, Zea mays subsp. mays
  peptide (1)..(424): Ceres Seq. ID no. 12341079
DPFFPKAEQRPARVPLPPPAPQSPTHSLASLLAAHYGLRRARVRRSQPGRPAMATAPVVVLVLHVLLGAAAAACAAAAGSSSKVPAMYVFGDSTADVGTNNYLPGGAEVPRANFPHNGVDFPTARPTGRFSNGFNGVDFLAVNMGFKRSPPPFLAVANKTNRQVFRGLLGVNFASAGSGILDTTGSSIIPLSKQVEQFAAVRRNISSRVGNGSAAADALLSRSLFLVSTGGNDLFAFFARNSTPSDADKRRFVANLVTLYQNHVKALYVLGARKFAVIDVPPVGCCPYPRSLHPLGACIDVLNELARGFNEGVRAAMHGLGVSFQGLRYSVGSSHAVVQSIMKHPQRLGFKDVTNACCGSGRFNGKSGCTPNATLCDNRHQYLFWDLLHPTHAASKIAAAAIYNGSLHFAAPMNFRQLAEDDRC

SEQ ID NO: 11403 - protein, 372 aa, Zea mays subsp. mays
  peptide (1)..(372): Ceres Seq. ID no. 12341080
MATAPVVVLVLHVLLGAAAAACAAAAGSSSKVPAMYVFGDSTADVGTNNYLPGGAEVPRANFPHNGVDFPTARPTGRFSNGFNGVDFLAVNMGFKRSPPPFLAVANKTNRQVFRGLLGVNFASAGSGILDTTGSSIIPLSKQVEQFAAVRRNISSRVGNGSAAADALLSRSLFLVSTGGNDLFAFFARNSTPSDADKRRFVANLVTLYQNHVKALYVLGARKFAVIDVPPVGCCPYPRSLHPLGACIDVLNELARGFNEGVRAAMHGLGVSFQGLRYSVGSSHAVVQSIMKHPQRLGFKDVTNACCGSGRFNGKSGCTPNATLCDNRHQYLFWDLLHPTHAASKIAAAAIYNGSLHFAAPMNFRQLAEDDRC

SEQ ID NO: 11404 - protein, 338 aa, Zea mays subsp. mays
  peptide (1)..(338): Ceres Seq. ID no. 12341081
MYVFGDSTADVGTNNYLPGGAEVPRANFPHNGVDFPTARPTGRFSNGFNGVDFLAVNMGFKRSPPPFLAVANKTNRQVFRGLLGVNFASAGSGILDTTGSSIIPLSKQVEQFAAVRRNISSRVGNGSAAADALLSRSLFLVSTGGNDLFAFFARNSTPSDADKRRFVANLVTLYQNHVKALYVLGARKFAVIDVPPVGCCPYPRSLHPLGACIDVLNELARGFNEGVRAAMHGLGVSFQGLRYSVGSSHAVVQSIMKHPQRLGFKDVTNACCGSGRFNGKSGCTPNATLCDNRHQYLFWDLLHPTHAASKIAAAAIYNGSLHFAAPMNFRQLAEDDRC

SEQ ID NO: 11405 - DNA, 1336 bp, Zea mays subsp. mays
  misc_feature (1)..(1336): Ceres Seq. ID no. 12411856
  misc_feature (1)..(1336): Ortholog of  Ceres SEQ ID NO 12611971 as cited in SEQ ID NO 53205
  misc_feature (1)..(1336): Ortholog of  Ceres SEQ ID NO 12615976 as cited in SEQ ID NO 62440
agttggccacatgccttgccttgcctttgcctacctgttgatcgagccgagcgagcagggagagacacggcaccgagtgaggccgccgcatcctcctcctctccgatccttagtccagtccgcctgctgcctgcctcaacggatcgacgcgacaggagggagggaggaaggagacggtcgatcagagtctgagacggaggccgatccaccaccgcagcgacgagcgggaggagatgaagatcatcattgacacggatcccggcatcgatgacagcgtggccatcctgatggcattccagatgccgggcgtccaggtcctagggctcaccaccatcttcggaaactgcaccacagagcatgccacacgcaacgccttgatcctgtgcgagaaggcaagccatctagaggtcccagtagctgagggcagccatgagcctctcaagggaggaaagccgcacgttgctgacttcgttcatggacctgatggcctcgggaacgtagatcttcctgatcccactatcaagaaagtggaggaaagtgctaccgacttcttggttgataaggtctcgcgatttcctggagaggtctctgtgctcgccttgggtcctctgacaaacatagcattggccatcaagaaggatccctcattcgtgaaaaacgttaagaagatcgttgtgctgggtggagcgttctttgcggctggaaatgccactccttccgctgaagcaaatatccacagtgatccggaggcagccgacatggttttcacttctggggcggacatctacgtcgttggcctcaacatcacaacgcaagtcagcttcacagataaggatctcctggagctaagaaactcgcaagggaagtacgcacagttcctatgtgatgtatgcaagttctacttggactggcacaccgagtcttatggtgctcctgtgattttcctccacgatccggtcagctttgccgcgctagttcgtccggagctgttcacgttcaagaagggcgtggtgagggtggagacgcagggcatctgcgtcgggcatacttccatggacatgttgctgaagaagtggaactcagagaacccgtggactggctactcaccgatttcggtcgcatggacggtcgatgtgcccaaggtggtcgcgtttgtgaaggagctcgtcaccaagccgtgaaccaagttaactaacgtgttgtggtctcgcgcaccagatgtgcagcaaatttgagatgtcgatatatttactcacattcgaagcactgcaaacactattatctcaatagttggttcctgtggaggattgcaaatcaatttgagatgttttaaatt

SEQ ID NO: 11406 - protein, 315 aa, Zea mays subsp. mays
  peptide (1)..(315): Ceres Seq. ID no. 12411857
MKIIIDTDPGIDDSVAILMAFQMPGVQVLGLTTIFGNCTTEHATRNALILCEKASHLEVPVAEGSHEPLKGGKPHVADFVHGPDGLGNVDLPDPTIKKVEESATDFLVDKVSRFPGEVSVLALGPLTNIALAIKKDPSFVKNVKKIVVLGGAFFAAGNATPSAEANIHSDPEAADMVFTSGADIYVVGLNITTQVSFTDKDLLELRNSQGKYAQFLCDVCKFYLDWHTESYGAPVIFLHDPVSFAALVRPELFTFKKGVVRVETQGICVGHTSMDMLLKKWNSENPWTGYSPISVAWTVDVPKVVAFVKELVTKP

SEQ ID NO: 11407 - protein, 297 aa, Zea mays subsp. mays
  peptide (1)..(297): Ceres Seq. ID no. 12411858
MAFQMPGVQVLGLTTIFGNCTTEHATRNALILCEKASHLEVPVAEGSHEPLKGGKPHVADFVHGPDGLGNVDLPDPTIKKVEESATDFLVDKVSRFPGEVSVLALGPLTNIALAIKKDPSFVKNVKKIVVLGGAFFAAGNATPSAEANIHSDPEAADMVFTSGADIYVVGLNITTQVSFTDKDLLELRNSQGKYAQFLCDVCKFYLDWHTESYGAPVIFLHDPVSFAALVRPELFTFKKGVVRVETQGICVGHTSMDMLLKKWNSENPWTGYSPISVAWTVDVPKVVAFVKELVTKP

SEQ ID NO: 11408 - protein, 293 aa, Zea mays subsp. mays
  peptide (1)..(293): Ceres Seq. ID no. 12411859
MPGVQVLGLTTIFGNCTTEHATRNALILCEKASHLEVPVAEGSHEPLKGGKPHVADFVHGPDGLGNVDLPDPTIKKVEESATDFLVDKVSRFPGEVSVLALGPLTNIALAIKKDPSFVKNVKKIVVLGGAFFAAGNATPSAEANIHSDPEAADMVFTSGADIYVVGLNITTQVSFTDKDLLELRNSQGKYAQFLCDVCKFYLDWHTESYGAPVIFLHDPVSFAALVRPELFTFKKGVVRVETQGICVGHTSMDMLLKKWNSENPWTGYSPISVAWTVDVPKVVAFVKELVTKP

SEQ ID NO: 11409 - DNA, 1549 bp, Zea mays subsp. mays; identical to SEQ ID NO: 4380
  misc_feature (1)..(1549): Ceres Seq. ID no. 12345645
  misc_feature (1)..(1549): Ortholog of  Ceres SEQ ID NO 15169655 as cited in SEQ ID NO 64922
  misc_feature (1)..(1549): Ortholog of  Ceres SEQ ID NO 13596004 as cited in SEQ ID NO 68212

SEQ ID NO: 11410 - protein, 443 aa, Zea mays subsp. mays; identical to SEQ ID NO: 4381
  peptide (1)..(443): Ceres Seq. ID no. 12345646

SEQ ID NO: 11411 - protein, 383 aa, Zea mays subsp. mays; identical to SEQ ID NO: 4382
  peptide (1)..(383): Ceres Seq. ID no. 12345647

SEQ ID NO: 11412 - protein, 310 aa, Zea mays subsp. mays; identical to SEQ ID NO: 4383
  peptide (1)..(310): Ceres Seq. ID no. 12345648

SEQ ID NO: 11413 - DNA, 2072 bp, Zea mays subsp. mays
  misc_feature (1)..(2072): Ceres Seq. ID no. 12411849
  misc_feature (1)..(2072): Ortholog of  Ceres SEQ ID NO 15177285 as cited in SEQ ID NO 52481
  misc_feature (1)..(2072): Ortholog of  Ceres SEQ ID NO 13594068 as cited in SEQ ID NO 58624
gtcgctctcctcctcctcctcctcctcctccgtaggcaaggcaaggggggcaaggctctaacggagatcggatcgaactgcctgtgcagtctccctccctccctccctccctcatgtccatatataccaaaaaatctccgccgcgccgccattagctagctctcgtcgtcttcgttcctccgcaaataatttgttactcaagccgaaggaggacgagggcgacgggattggctaatcaaatcgaccgatctagtggctggtgcccaggagaagggacgcgggcagtgcggctcgtcgtggtcagcagcttgtggcgaccggtcgccagggaatcaatcaattcaatcagaaagttgcaattttgattgagctcgattcgtcatccacaagacattagggaatcgaaccaccacaaagcaagaaggcagtccagtgcagagagagagagagagaccaagaagagaaagagaaagggaaagagaagcaaagcaatggatccaccgcatcaccgtgctgtgctgcggcggcctcgtcctcctcctccctcctgccctttttataggccgcctccgcttcgtcgtcttggcaagacctgcccccgcgcctgcaatcctacgacaacagggcgccgctcctcctgcccgtcaagatcatggacaccgccgccgacgacaagccggaaatctccgacgatacggcccaccagattagcgttgatccttggtatcaagttggcttcgtcctcacaaccggggtcaacagcgcatacgttctaggatactctggatcaatcatggtccctctaggctggatcggcggcacatgcggcctcctcctagctgccgccatatccatgtacgctaatgctcttcttgcacggcttcatgaagtcggtggcaaacgccatatcagatacagagaccttgctggacacatatatggaccgaaaatttacgggcttacatgggctctgcagtacattaaccttttcatgatcaacactggctttatcatcttagctggacaagctctcaaggccacgtatggactgttcagtgatgatggagttctgaaactcccttactgcattgcgatatcaggattcgtctgtgctcttttcgccattggaatcccttatttatctgccctcaggatttggttggggttctccacgcttttcagcctcatgtatattgtgatagcagttgtgctgtcgtcgagagatgggataaccgcacctgcaagggattacagcatccccaaatcatcgcagtcaactcgagtcttcactacgataggttccatagcagaccttgtgtttgcttacaacaccggcatgctgccagaaattcaggcaaccatcaggcctcctgtggtgaagaacatggagaaagctctatggttccagttcaccattggctccttgcctctctatgctgtagtttttgtgggttactgggcttatgggtcctcaacatcaggctacctcctcaacagtgtcacaggcccagtctgggtgaaagcggttgcaaatctgtcggcattttttcagacagtcatagcgctgcacatctttgctagccccatgtatgaattcctggacacaaaatatggaagtgggcgtggccccttttgagatccacaacgtggcgttcagagtagcagtcagaggaggctacctgacggtgaacacgctggtggccgcggtgctcccattcctcggcgacttcatgagcctgacgggcgccctcagcaccttcccgctgacgtttgtgctcgcaaatcacatgtacctgatggtgaaggggcctaagctgggtgccatccagaaatcatggcactggctcaatgttcttgggttcactgcgctggctgttgcagcggcggtctccgcaataaggctcatcatgcgtgattccagcacctaccacttcttcgctgatctttgagatcgatcgttttcttttctttttgttggaatgctgagccagagctagtattttttcattttcagagaattattatccatgtatgtaaggatgacgcatatatatatattgaatagatgattt

SEQ ID NO: 11414 - protein, 327 aa, Zea mays subsp. mays
  peptide (1)..(327): Ceres Seq. ID no. 12411850
MDTAADDKPEISDDTAHQISVDPWYQVGFVLTTGVNSAYVLGYSGSIMVPLGWIGGTCGLLLAAAISMYANALLARLHEVGGKRHIRYRDLAGHIYGPKIYGLTWALQYINLFMINTGFIILAGQALKATYGLFSDDGVLKLPYCIAISGFVCALFAIGIPYLSALRIWLGFSTLFSLMYIVIAVVLSSRDGITAPARDYSIPKSSQSTRVFTTIGSIADLVFAYNTGMLPEIQATIRPPVVKNMEKALWFQFTIGSLPLYAVVFVGYWAYGSSTSGYLLNSVTGPVWVKAVANLSAFFQTVIALHIFASPMYEFLDTKYGSGRGPF

SEQ ID NO: 11415 - protein, 280 aa, Zea mays subsp. mays
  peptide (1)..(280): Ceres Seq. ID no. 12411851
MVPLGWIGGTCGLLLAAAISMYANALLARLHEVGGKRHIRYRDLAGHIYGPKIYGLTWALQYINLFMINTGFIILAGQALKATYGLFSDDGVLKLPYCIAISGFVCALFAIGIPYLSALRIWLGFSTLFSLMYIVIAVVLSSRDGITAPARDYSIPKSSQSTRVFTTIGSIADLVFAYNTGMLPEIQATIRPPVVKNMEKALWFQFTIGSLPLYAVVFVGYWAYGSSTSGYLLNSVTGPVWVKAVANLSAFFQTVIALHIFASPMYEFLDTKYGSGRGPF

SEQ ID NO: 11416 - protein, 260 aa, Zea mays subsp. mays
  peptide (1)..(260): Ceres Seq. ID no. 12411852
MYANALLARLHEVGGKRHIRYRDLAGHIYGPKIYGLTWALQYINLFMINTGFIILAGQALKATYGLFSDDGVLKLPYCIAISGFVCALFAIGIPYLSALRIWLGFSTLFSLMYIVIAVVLSSRDGITAPARDYSIPKSSQSTRVFTTIGSIADLVFAYNTGMLPEIQATIRPPVVKNMEKALWFQFTIGSLPLYAVVFVGYWAYGSSTSGYLLNSVTGPVWVKAVANLSAFFQTVIALHIFASPMYEFLDTKYGSGRGPF

SEQ ID NO: 11417 - DNA, 1913 bp, Zea mays subsp. mays
  misc_feature (1)..(1913): Ceres Seq. ID no. 12374119
  misc_feature (1)..(1913): Ortholog of  Ceres SEQ ID NO 14315146 as cited in SEQ ID NO 52929
  misc_feature (1)..(1913): Ortholog of  Ceres SEQ ID NO 14302263 as cited in SEQ ID NO 64701
  misc_feature (1)..(1913): Ortholog of  Ceres SEQ ID NO 13584538 as cited in SEQ ID NO 64739
  misc_feature (1)..(1913): Ortholog of  Ceres SEQ ID NO 15169643 as cited in SEQ ID NO 64826
  misc_feature (1)..(1913): Ortholog of  Ceres SEQ ID NO 15169647 as cited in SEQ ID NO 64930
aattccgtccacagaagaagaatccttctcgacgccgcccccattcattcttggagggcaagaagaacgcgcagtccaaaagcgaaacaaggggaaggggcgaggcagccaaacgaatcccagcacctgcctctcctttgcttgcgcagatctagcgatggcggcgggcggtgagttggcgtggggggaggagcccgtggcgcggcgccggcctaagaccaagatcgtctgcacgctcggcccggcgtcgcgatccgtcgagatgatctcgcgcctgctgcgcgccgggatgtgcgtcgcgcgcttcaacttctcccatggctcccacgagtaccaccaggagacgctcgacaacctgcacgccgccatggagctcaccgggatcctctgcgccgttatgctcgacaccaagggtccagagattagaactggatttttgaaagatgggaatcctattcaattgataaaaggccaagaaatcacaatttctacagactatagcattcagggtgatgagaaaatgatatcaatgagctacaagaagcttgctgttgatctgaagccaggcagtgtcatattgtgtgctgatggtaccatcactcttactgttcttcactgtgataaagaacaaggcttggttcgctgccgctgtgagaacactttcaagcttggcgagaggaagaatgttaatcttccaggagttattgttgatctccccacactcacagacaaggacaaggaggacatccttaaatggggtgttccaaacaagattgacatgattgccttgtcatttgttcggaagggttcggatcttgtggaggttaggaaggtacttggtgagcatgccaagtccataatgctgatgtcaaaggttgagaatcaagagggagtagctaactttgatgatatcctggcaaactctgatgcttttatggtggcaagaggtgatttaggaatggaaattcctatagagaagattttctttgcacagaaggtgatgattttcaagtgcaatattcaaggcaagcctgttgtgactgcaacccagatgttggaatctatgatcaagtctcctcgccctactcgggcagaagcaacggatgttgcaaacgcagttcttgatggcacagactgtgttatgctcagtggtgagactgctgctggggcttatccagagttggcggtgcagactatggctaagatctgcctgcaagcagagtcttgcgtagaccatgctgctattttcaaatcaatcatggcttcagctccaattccaatgagtccattggagagccttgcatcatcagctgttcgcacagcaaactctgccagggcagcacttatcttggtcctgaccaggggaggaactactgctaggcttgtagccaagtataggccatccatgccgattctgtccgttgtggttcctgagctgaagacagactcgttcgactgggcctgcagtgacgagggtccggcaaggcacagcctcattgtgaggggtgtcatcccaatgctgagtgccgccactgccaaggcctttgacaacgaagccactgacgaagctattggttttgccattgaaaatgcgaagacgatggggctatgcaacaccggtcaatccgttgtggccctgcaccgcatcgggatttcatccgtcatcaagcttcttactgtgaagtaggggtccaagggtgagggacaccattttgcttggtgaatttttgtgaggctgcttacgcacatcagcgtatccacagcttttctgttgccaaagatacagactttgcgttctggtacaccttggtgttacaagggttgtgggaatttgtcgtttagatattagcgatttaaacagtttatcaactgctatagctaattaatttgcagctgtgctgcaactttatcgt

SEQ ID NO: 11418 - protein, 561 aa, Zea mays subsp. mays
  peptide (1)..(561): Ceres Seq. ID no. 12374120
IPSTEEESFSTPPPFILGGQEERAVQKRNKGKGRGSQTNPSTCLSFACADLAMAAGGELAWGEEPVARRRPKTKIVCTLGPASRSVEMISRLLRAGMCVARFNFSHGSHEYHQETLDNLHAAMELTGILCAVMLDTKGPEIRTGFLKDGNPIQLIKGQEITISTDYSIQGDEKMISMSYKKLAVDLKPGSVILCADGTITLTVLHCDKEQGLVRCRCENTFKLGERKNVNLPGVIVDLPTLTDKDKEDILKWGVPNKIDMIALSFVRKGSDLVEVRKVLGEHAKSIMLMSKVENQEGVANFDDILANSDAFMVARGDLGMEIPIEKIFFAQKVMIFKCNIQGKPVVTATQMLESMIKSPRPTRAEATDVANAVLDGTDCVMLSGETAAGAYPELAVQTMAKICLQAESCVDHAAIFKSIMASAPIPMSPLESLASSAVRTANSARAALILVLTRGGTTARLVAKYRPSMPILSVVVPELKTDSFDWACSDEGPARHSLIVRGVIPMLSAATAKAFDNEATDEAIGFAIENAKTMGLCNTGQSVVALHRIGISSVIKLLTVK

SEQ ID NO: 11419 - protein, 509 aa, Zea mays subsp. mays
  peptide (1)..(509): Ceres Seq. ID no. 12374121
MAAGGELAWGEEPVARRRPKTKIVCTLGPASRSVEMISRLLRAGMCVARFNFSHGSHEYHQETLDNLHAAMELTGILCAVMLDTKGPEIRTGFLKDGNPIQLIKGQEITISTDYSIQGDEKMISMSYKKLAVDLKPGSVILCADGTITLTVLHCDKEQGLVRCRCENTFKLGERKNVNLPGVIVDLPTLTDKDKEDILKWGVPNKIDMIALSFVRKGSDLVEVRKVLGEHAKSIMLMSKVENQEGVANFDDILANSDAFMVARGDLGMEIPIEKIFFAQKVMIFKCNIQGKPVVTATQMLESMIKSPRPTRAEATDVANAVLDGTDCVMLSGETAAGAYPELAVQTMAKICLQAESCVDHAAIFKSIMASAPIPMSPLESLASSAVRTANSARAALILVLTRGGTTARLVAKYRPSMPILSVVVPELKTDSFDWACSDEGPARHSLIVRGVIPMLSAATAKAFDNEATDEAIGFAIENAKTMGLCNTGQSVVALHRIGISSVIKLLTVK

SEQ ID NO: 11420 - protein, 474 aa, Zea mays subsp. mays
  peptide (1)..(474): Ceres Seq. ID no. 12374122
MISRLLRAGMCVARFNFSHGSHEYHQETLDNLHAAMELTGILCAVMLDTKGPEIRTGFLKDGNPIQLIKGQEITISTDYSIQGDEKMISMSYKKLAVDLKPGSVILCADGTITLTVLHCDKEQGLVRCRCENTFKLGERKNVNLPGVIVDLPTLTDKDKEDILKWGVPNKIDMIALSFVRKGSDLVEVRKVLGEHAKSIMLMSKVENQEGVANFDDILANSDAFMVARGDLGMEIPIEKIFFAQKVMIFKCNIQGKPVVTATQMLESMIKSPRPTRAEATDVANAVLDGTDCVMLSGETAAGAYPELAVQTMAKICLQAESCVDHAAIFKSIMASAPIPMSPLESLASSAVRTANSARAALILVLTRGGTTARLVAKYRPSMPILSVVVPELKTDSFDWACSDEGPARHSLIVRGVIPMLSAATAKAFDNEATDEAIGFAIENAKTMGLCNTGQSVVALHRIGISSVIKLLTVK

SEQ ID NO: 11421 - DNA, 1107 bp, Zea mays subsp. mays
  misc_feature (1)..(1107): Ceres Seq. ID no. 12566683
  misc_feature (1)..(1107): Ortholog of  Ceres SEQ ID NO 14304202 as cited in SEQ ID NO 56346
  misc_feature (1)..(1107): Ortholog of  Ceres SEQ ID NO 14304159 as cited in SEQ ID NO 56494
  misc_feature (1)..(1107): Ortholog of  Ceres SEQ ID NO 12613472 as cited in SEQ ID NO 60611
  misc_feature (1)..(1107): Ortholog of  Ceres SEQ ID NO 12623915 as cited in SEQ ID NO 61013
  misc_feature (1)..(1107): Ortholog of  Ceres SEQ ID NO 15173393 as cited in SEQ ID NO 63704
gcacgagaccattacctagaacatcctaatcgaaaagtctcatcagtcatcacccaccgcctccgccgccgacaacagcgtagtgtagtgtagttccggagagggttggggagagtagtagtgatccgcaatgtcgacggaggaggctgttgtggctgaggtcccggtgaccgaggtgccagcggaggtcccggcggcccaggtggccgaggcgcccaaggcgaagaaggcgcccaaggagaagaaggcgcctaaggagaagaagctttccgcggcgaagaagccggcggcgcaccctccctacgctgagatgattgtagaggcgatcgctgccctcaaggagaggaaggggtcgagctcggtggccatcagcaagtacgtcgaggggaagcatggcggcaagctccccaccaacttccgcaagcagctcactgtgcagctgaagaagctcgctgccgccggcaagctgacgagggtgaagaactccttcaagctgccggccaccgacgccaagcccaaggccgccaagcccaaggcacccaaggccgcgcccaagcccaagccctcgccgaaggcgaaggccaagaccgcttcgaagcccaaggcggcgtcgcccaaacccaaggccaaggccaaggccaagcctgtcgctcctgccgccgcgtcgcccaagccccgcgggcgccctcccaaggtcgccaagacctccgccaaggcctcccccgccaaggcagccaagaaggcggctgctcctgccaagaagggaaaggcagcggcggctcctaagaaggtggcaaccccgaagaaggctgctgctgctgccgccccggccaggaagggcgtggccaggaaggccaagaagtagtctgcctgccttgtcgctggcgagatccccccctcaattccgcctatagattcccctctttcatggattttgatccaatcgtaatattgtcagtagctctagattcgtcggtagctccagcatgagtgtcggtggtagttctgtgcctgtaaaaacttgggatagttgatcgcgtgtgatcagccgtcatgctcctccagtctctatgaacaagctaagctataatagtattttgctatccc

SEQ ID NO: 11422 - protein, 244 aa, Zea mays subsp. mays
  peptide (1)..(244): Ceres Seq. ID no. 12566684
MSTEEAVVAEVPVTEVPAEVPAAQVAEAPKAKKAPKEKKAPKEKKLSAAKKPAAHPPYAEMIVEAIAALKERKGSSSVAISKYVEGKHGGKLPTNFRKQLTVQLKKLAAAGKLTRVKNSFKLPATDAKPKAAKPKAPKAAPKPKPSPKAKAKTASKPKAASPKPKAKAKAKPVAPAAASPKPRGRPPKVAKTSAKASPAKAAKKAAAPAKKGKAAAAPKKVATPKKAAAAAAPARKGVARKAKK

SEQ ID NO: 11423 - protein, 184 aa, Zea mays subsp. mays
  peptide (1)..(184): Ceres Seq. ID no. 12566685
MIVEAIAALKERKGSSSVAISKYVEGKHGGKLPTNFRKQLTVQLKKLAAAGKLTRVKNSFKLPATDAKPKAAKPKAPKAAPKPKPSPKAKAKTASKPKAASPKPKAKAKAKPVAPAAASPKPRGRPPKVAKTSAKASPAKAAKKAAAPAKKGKAAAAPKKVATPKKAAAAAAPARKGVARKAKK

SEQ ID NO: 11424 - DNA, 1427 bp, Zea mays subsp. mays
  misc_feature (1)..(1427): Ceres Seq. ID no. 12376372
  misc_feature (1)..(1427): Ortholog of  Ceres SEQ ID NO 14308679 as cited in SEQ ID NO 58616
  misc_feature (1)..(1427): Ortholog of  Ceres SEQ ID NO 13596492 as cited in SEQ ID NO 68623
gcacgagaccattacctagaacatcctaatcgaaaaagtttcaaatctcaaatcctcatcgttctcctttccccaaaggccaaaaccgaccccgctccacgcctccactccagccccagcggatcttctcgagcggcggccggcgatggcagcgagcaacatcgggatgatggacggagcctacttcgtcgggcgcaacgagatcctcgcgtggatcaacactacgctgcacctcggcctctccaaggtggaggaggcggcgtcagtcgcggttgcgtgccaactgatggacgcggcgcatcccggcgccgtgccgatgcacaaggtcaacttcgacgccaagacggagtacgacatgatccagaactacaaggtcctgcaggatgtgttcaacaagctcaagatcactaagcatatagaggtgaacaagctaatcaaaggaagaccccttgacaatctggagttcatgcagtggatgaaacgatattgtgattctgtcaatggtggcttcatgagcagctacaatgcttctgagagaagggaaagcagcaaagggggaaaggagacgaacagaagggcatcggtgccctctcacacaccggccaagtctgcatccacaggtcacaaggctcaagcatcacatggcgctaagcgggcaagcgggcagacggcgggtgcaccacagcgcagtgctaagccatcacctgtagccaactctagtggaccagcttatgacgaacaaataactgagctgaagctccttgtggatagcctggagaaggagagagatttctacttttccaagctgcgggacattgagatcttgtgccaaaaccctgaggttgagcacgtgccggtccatgctatccagaacatactctacacatcagaggaggaccctcagcagcaggctccagccctgagccccatcatggaggcgtccgaggagaggccgaagcaagaggcggcgcacaagagaaagagcatctcggacctggacgagtttggtatgtcgtccagctcaaggcagaggctctccgacatctcggacgtgcagctgtgtggatccccgctgacgagtttcagctaaagaaactgtcatctctacaaaatgggtgtctcgtctttctgttggattggttcgtggtttcgtatttcatgtgttgtttggtggtgaactgtcgtgtgctcttagcaaagtgtgacacatttagccacgaaccaaacagcctcttagtctgtgaccagagcgcatgacctcgtctactaatttctctctcagaatcagcttttttttcgtacctattgcgcatcagttgatttttccttctctcttttctttttggccgtatttcatcaggttgcatataaaaaaagtaagatctactggttctggcgttcggctataatgggatctttgatcaggc

SEQ ID NO: 11425 - protein, 314 aa, Zea mays subsp. mays
  peptide (1)..(314): Ceres Seq. ID no. 12376373
MAASNIGMMDGAYFVGRNEILAWINTTLHLGLSKVEEAASVAVACQLMDAAHPGAVPMHKVNFDAKTEYDMIQNYKVLQDVFNKLKITKHIEVNKLIKGRPLDNLEFMQWMKRYCDSVNGGFMSSYNASERRESSKGGKETNRRASVPSHTPAKSASTGHKAQASHGAKRASGQTAGAPQRSAKPSPVANSSGPAYDEQITELKLLVDSLEKERDFYFSKLRDIEILCQNPEVEHVPVHAIQNILYTSEEDPQQQAPALSPIMEASEERPKQEAAHKRKSISDLDEFGMSSSSRQRLSDISDVQLCGSPLTSFS

SEQ ID NO: 11426 - protein, 307 aa, Zea mays subsp. mays
  peptide (1)..(307): Ceres Seq. ID no. 12376374
MMDGAYFVGRNEILAWINTTLHLGLSKVEEAASVAVACQLMDAAHPGAVPMHKVNFDAKTEYDMIQNYKVLQDVFNKLKITKHIEVNKLIKGRPLDNLEFMQWMKRYCDSVNGGFMSSYNASERRESSKGGKETNRRASVPSHTPAKSASTGHKAQASHGAKRASGQTAGAPQRSAKPSPVANSSGPAYDEQITELKLLVDSLEKERDFYFSKLRDIEILCQNPEVEHVPVHAIQNILYTSEEDPQQQAPALSPIMEASEERPKQEAAHKRKSISDLDEFGMSSSSRQRLSDISDVQLCGSPLTSFS

SEQ ID NO: 11427 - protein, 306 aa, Zea mays subsp. mays
  peptide (1)..(306): Ceres Seq. ID no. 12376375
MDGAYFVGRNEILAWINTTLHLGLSKVEEAASVAVACQLMDAAHPGAVPMHKVNFDAKTEYDMIQNYKVLQDVFNKLKITKHIEVNKLIKGRPLDNLEFMQWMKRYCDSVNGGFMSSYNASERRESSKGGKETNRRASVPSHTPAKSASTGHKAQASHGAKRASGQTAGAPQRSAKPSPVANSSGPAYDEQITELKLLVDSLEKERDFYFSKLRDIEILCQNPEVEHVPVHAIQNILYTSEEDPQQQAPALSPIMEASEERPKQEAAHKRKSISDLDEFGMSSSSRQRLSDISDVQLCGSPLTSFS

SEQ ID NO: 11428 - DNA, 1206 bp, Zea mays subsp. mays
  misc_feature (1)..(1206): Ceres Seq. ID no. 12411839
  misc_feature (1)..(1206): Ortholog of  Ceres SEQ ID NO 15171228 as cited in SEQ ID NO 56948
  misc_feature (1)..(1206): Ortholog of  Ceres SEQ ID NO 13597134 as cited in SEQ ID NO 64501
gtgcctcggcccaagtgctaacgcccaactgccaaggcggggaggggggatccggtgcgcgcgcgcgcggaaatgaacaccggctgattagtaggtgggagatcgaggtcgcgcccttgccccacacgccactaaaggccgcgccgacgggctcatcaggcgctctggacgggctcgcttctgccgctccgcgcttgtgcggtgggtgaagtgctgctgctggtgcgggaagcgtcgccaaacgtgcagaccttggtgggggagcgaggagtcgaaacaagggtaagaaccatgagtgaaacagggcacactgtacaagtcactaacctctcgagcagagtatctgaaagtgatctttatgagttcttttcgttctctggccctattgaacatgttgaacttatcagatcaggagaatacggtgctactgcttatgtgacattcaaggagcgctttgccttggaaactgcggtattgctcagtggagctactattgtggatcagccggtatgcataacttattggggacaacctgaggagacttttaatttctgggacaggccaacttgggaggttgaagaggaaattgaatacacgagttatcaatcatgccagtacaacactactccgcaggaagctcttacagtggctcaagatatcgtgaagacgatgctagcaaaggggtacgtgctcagcaaggacgctttggctaaggctagagcctttgatgagtcccgcggattaacagctgcagctgcagccaaggctgcagagctgagcaagagaattggtttaactgacagggtcagtgctggtgtcggtgcaatgcgatcggtcgatgagacatatcgcgtaacggagacgaccaagacggtagctactgccactggaataactgcagctaaggtggtaaatggtatcgtcaccagcagctacttctctgcaggagccatgatgttgtctgatgctcttactagggctgccaaggccgcggctgatctggccgctcatggcagacagagttaagtgaaaaacaaaacatacaatccatcctttttcagttactaaacatgaggacgaacaccttaataggatgcttgaagtgttgttgttcgatgtatatttataacagacaacattgttgatttgttgtataaattaaaaggagacgtacactgcgtttgcactaataagtttgattattgc

SEQ ID NO: 11429 - protein, 244 aa, Zea mays subsp. mays
  peptide (1)..(244): Ceres Seq. ID no. 12411840
MSETGHTVQVTNLSSRVSESDLYEFFSFSGPIEHVELIRSGEYGATAYVTFKERFALETAVLLSGATIVDQPVCITYWGQPEETFNFWDRPTWEVEEEIEYTSYQSCQYNTTPQEALTVAQDIVKTMLAKGYVLSKDALAKARAFDESRGLTAAAAAKAAELSKRIGLTDRVSAGVGAMRSVDETYRVTETTKTVATATGITAAKVVNGIVTSSYFSAGAMMLSDALTRAAKAAADLAAHGRQS

SEQ ID NO: 11430 - DNA, 962 bp, Zea mays subsp. mays
  misc_feature (1)..(962): Ceres Seq. ID no. 13499139
  misc_feature (1)..(962): Ortholog of  Ceres SEQ ID NO 13581579 as cited in SEQ ID NO 58361
  misc_feature (1)..(962): Ortholog of  Ceres SEQ ID NO 13597519 as cited in SEQ ID NO 64759
  misc_feature (1)..(962): Ortholog of  Ceres SEQ ID NO 13595926 as cited in SEQ ID NO 67778
acgtacgtataggccggcgggaacgcgtaccaggtgccggcggggcggcgggacgggtccgtgtcgcgcgcgtcggacaccagcaacctgccgccgccgacggccaacgtcgcgcagctcacgcagatcttcggcaccaagggcctgacgcagaaggagatggtcatcctgtcgggcgcgcacaccatcggctcctcgcactgcagctccttcagcggccggctgtcggggtcggccacgacggcgggcgggcaggacccgaccatggaccccgcgtacgtggcgcagctggcgcggcagtgcccgcagggcggcgacccgctcgtgcccatggactacgtctcccccaacgccttcgacgagggcttctacaagggcgtcatggccaaccggggcctgctgtcctcggaccaggcgctgctcagcgacaagaacaccgccgtgcaggtcgtcacctacgccaacgacccggccaccttccaggccgacttcgccgccgccatggtcaagatgggctccgtcggcgtgctcaccggcaccagcggcaaggtcagggccaactgcagagtcgcctgattcatcgtcatcactcgtgtggagttgtagattcattatattgattgatttggaccggacgacgtcgacgggatgctacatggcctgcttgcgcaattgtatgtatgcctgtacttgcgcgtgtatgggtttcgctgtgcaaattttcgttgtctcccccgattgattgaggcgtgtgtgcgtgtgtgtctcttctgaatctgaatggaaaatctgtaacctgagctaaaactgctcgtgtactacccaatagttgcttcaaactacgatggatttttattcaaactatcacttccaaacacgcacaaatatgtactcaatcaactagggatcggagaaactggtttgtaaagggaattttataaacacaagctattcagacatgt

SEQ ID NO: 11431 - protein, 205 aa, Zea mays subsp. mays
  peptide (1)..(205): Ceres Seq. ID no. 13499140
VRIGRRERVPGAGGAAGRVRVARVGHQQPAAADGQRRAAHADLRHQGPDAEGDGHPVGRAHHRLLALQLLQRPAVGVGHDGGRAGPDHGPRVRGAAGAAVPAGRRPARAHGLRLPQRLRRGLLQGRHGQPGPAVLGPGAAQRQEHRRAGRHLRQRPGHLPGRLRRRHGQDGLRRRAHRHQRQGQGQLQSRLIHRHHSCGVVDSLY

SEQ ID NO: 11432 - protein, 138 aa, Zea mays subsp. mays
  peptide (1)..(138): Ceres Seq. ID no. 13499141
MVILSGAHTIGSSHCSSFSGRLSGSATTAGGQDPTMDPAYVAQLARQCPQGGDPLVPMDYVSPNAFDEGFYKGVMANRGLLSSDQALLSDKNTAVQVVTYANDPATFQADFAAAMVKMGSVGVLTGTSGKVRANCRVA

SEQ ID NO: 11433 - protein, 103 aa, Zea mays subsp. mays
  peptide (1)..(103): Ceres Seq. ID no. 13499142
MDPAYVAQLARQCPQGGDPLVPMDYVSPNAFDEGFYKGVMANRGLLSSDQALLSDKNTAVQVVTYANDPATFQADFAAAMVKMGSVGVLTGTSGKVRANCRVA

SEQ ID NO: 11434 - DNA, 1002 bp, Zea mays subsp. mays
  misc_feature (1)..(1002): Ceres Seq. ID no. 12414761
  misc_feature (1)..(1002): Ortholog of  Ceres SEQ ID NO 14305858 as cited in SEQ ID NO 52329
cgcacgggtgacagactgacaggtccgtccgcaaatctgcaacgttgcctcgtcacctctatcctccggtctctcaccgcctaacacggccgccatggccgccgcctccacctcccttccccttggcttctcctctcaccaccgcccaactcccagaatccggccgcagccccagtcccagtcgcaaccactgaaggcaaaaccccttaacccccttcgcttcagcctagccctcaccccggcgaccgcgaagccccgcctcgctgcgatgcccgacgatgtcgctgtcgccaacttcgtggagaaggactggtcgttcctcgagtccgcgggcgcaaacctccagcgcgctctcgcgtcgggggcgctctcgccggcgtcgcgggtgttggcattgacgcccacggcgtccttcgtgaggtcgctcctcgcgtcctcgccctgcgagctactggtggccgcgcatgagtcgatgtacgtgctggcaggggtcaaggaggcgcacgacgaggtgaggtgcttccacctcgagggtgggggcggcggcagaggcggcggcgtggtggaggccgtgccagagaggttcgacgacttcgatgttgtgttcgtgtgctacttccctggaatgggagtctccgcgggggcgctcctcaaatcgctggccaagaggtgctcaaaaggtgcaagagttgtcatgttcttagatcaaggcagacagaattttgagcaacaacggagagagcatcctgatgttgtaacttcggatttgcccagtatagccttcctggagaaggctgcatctgggaacaagtatgaaataacagagttcgttgacgagcctagcttttaccttgctgttttgcagtttcaaggatgatttgttccttttttgcaatatttgtgaagcaaattgtgactgtctgtaaatttgcaatatttgtgaagcaaattgtgactgtctgtaaattctgatggacgtagtttgtgggtggcttatgtcgt

SEQ ID NO: 11435 - protein, 260 aa, Zea mays subsp. mays
  peptide (1)..(260): Ceres Seq. ID no. 12414762
MAAASTSLPLGFSSHHRPTPRIRPQPQSQSQPLKAKPLNPLRFSLALTPATAKPRLAAMPDDVAVANFVEKDWSFLESAGANLQRALASGALSPASRVLALTPTASFVRSLLASSPCELLVAAHESMYVLAGVKEAHDEVRCFHLEGGGGGRGGGVVEAVPERFDDFDVVFVCYFPGMGVSAGALLKSLAKRCSKGARVVMFLDQGRQNFEQQRREHPDVVTSDLPSIAFLEKAASGNKYEITEFVDEPSFYLAVLQFQG

SEQ ID NO: 11436 - protein, 202 aa, Zea mays subsp. mays
  peptide (1)..(202): Ceres Seq. ID no. 12414763
MPDDVAVANFVEKDWSFLESAGANLQRALASGALSPASRVLALTPTASFVRSLLASSPCELLVAAHESMYVLAGVKEAHDEVRCFHLEGGGGGRGGGVVEAVPERFDDFDVVFVCYFPGMGVSAGALLKSLAKRCSKGARVVMFLDQGRQNFEQQRREHPDVVTSDLPSIAFLEKAASGNKYEITEFVDEPSFYLAVLQFQG

SEQ ID NO: 11437 - protein, 134 aa, Zea mays subsp. mays
  peptide (1)..(134): Ceres Seq. ID no. 12414764
MYVLAGVKEAHDEVRCFHLEGGGGGRGGGVVEAVPERFDDFDVVFVCYFPGMGVSAGALLKSLAKRCSKGARVVMFLDQGRQNFEQQRREHPDVVTSDLPSIAFLEKAASGNKYEITEFVDEPSFYLAVLQFQG

SEQ ID NO: 11438 - DNA, 2790 bp, Zea mays subsp. mays
  misc_feature (1)..(2790): Ceres Seq. ID no. 12414791
  misc_feature (1)..(2790): Ortholog of  Ceres SEQ ID NO 13598926 as cited in SEQ ID NO 0
gagatgggactcacacgccgtcacaatgctgtgcctcgtgtcgccctcttcctcgccgactccgcttccgccgccgcggcgctctcgctcgcatgctgatcgggcggcaccgccggggatcgcgggtggcggcaatgtgcgcctgagtgtgttgtctgtccagtgcaaggctcgccggtcaggggtgcggaaggtcaagagcaaattcgccactgcagctactgtgcaagaagataaaactatggcaactgccaaaggcgatgtcgaccatctccccatatacgacctggaccccaagctggagatattcaaggaccatttcaggtaccggatgaaaagattcctagagcagaaaggatcaattgaagaaaatgagggaagtcttgaatctttttctaaaggctatttgaaatttgggattaatacaaatgaggatggaactgtatatcgtgaatgggcacctgctgcgcaggaggcagagcttattggtgacttcaatgactggaatggtgcaaaccataagatggagaaggataaatttggtgtttggtcgatcaaaattgaccatgtcaaagggaaacctgccatccctcacaattccaaggttaaatttcgctttctacatggtggagtatgggttgatcgtattccagcattgattcgttatgcgactgttgatgcctctaaatttggagctccctatgatggtgttcattgggatcctcctgcttctgaaaggtacacatttaagcatcctcggccttcaaagcctgctgctccacgtatctatgaagcccatgtaggtatgagtggtgaaaagccagcagtaagcacatatagggaatttgcagacaatgtgttgccacgcatacgagcaaataactacaacacagttcagttgatggcagttatggagcattcgtactatgcttctttcgggtaccatgtgacaaatttctttgcggttagcagcagatcaggcacaccagaggacctcaaatatcttgttgataaggcacacagtttgggtttgcgagttctgatggatgttgtccatagccatgcaagtaataatgtcacagatggtttaaatggctatgatgttggacaaagcacccaagagtcctattttcatgcgggagatagaggttatcataaactttgggatagtcggctgttcaactatgctaactgggaggtattaaggtttcttctttctaacctgagatattggttggatgaattcatgtttgatggcttccgatttgatggagttacatcaatgctgtatcatcaccatggtatcaatgtggggtttactggaaactaccaggaatatttcagtttggacacagctgtggatgcagttgtttacatgatgcttgcaaaccatttaatgcacaaactcttgccagaagcaactgttgttgctgaagatgtttcaggcatgccggtcctttgccggccagttgatgaaggtggggttgggtttgactatcgcctggcaatggctatccctgatagatggattgactacctgaagaataaagatgactctgagtggtcgatgggtgaaatagcgcatactttgactaacaggagatatactgaaaaatgcatcgcatatgctgagagccatgatcagtctattgttggcgacaaaactattgcatttctcctgatggacaaggaaatgtacactggcatgtcagacttgcagcctgcttcacctacaattgatcgagggattgcactccaaaagatgattcacttcatcacaatggcccttggaggtgatggctacttgaattttatgggaaatgagtttggtcacccagaatggattgactttccaagagaagggaacaactggagctatgataaatgcagacgacagtggagccttgtggacactgatcacttgcggtacaagtacatgaatgcgtttgaccaagcgatgaatgcgctcgatgagagattttccttcctttcgtcgtcaaagcagatcgtcagcgacatgaacgatgaggaaaaggttattgtctttgaacgtggagatttagtttttgttttcaatttccatcccaagaaaacttacgagggctacaaagtgggatgcgatttgcctgggaaatacagagtagccctggactctgatgctctggtcttcggtggacatggaagagttggccacgacgtggatcacttcacgtcgcctgaaggggtgccaggggtgcccgaaacgaacttcaacaaccggccgaactcgttcaaagtcctttctccgccccgcacctgtgtggcttattaccgtgtagacgaagcaggggctggacgacgtcttcacgcgaaagcagagacaggaaagacgtctccagcagagagcatcgacgtcaaagcttccagagctagtagcaaagaagacaaggaggcaacggctggtggcaagaagggatggaagtttgcgcggcagccatccgatcaagataccaaatgaagccaggagtccttggtgaggactggactggctgccggcgccctgttagtagtcctgctctactggactagccgccgctggcgcccttggaacggtcctttcctgtagcttgcaggcgactggtgtctcatcaccgagcaggcaggcactgcttgtatagcttttctagaataataatcagggatggatggatggtgtgtattggctatctggctagacgtgcatgtgcccagtttgtatgtacaggagcagttcccgtccagaataaaaaaaaacttgttggggggtttttc

SEQ ID NO: 11439 - protein, 831 aa, Zea mays subsp. mays
  peptide (1)..(831): Ceres Seq. ID no. 12414792
RWDSHAVTMLCLVSPSSSPTPLPPPRRSRSHADRAAPPGIAGGGNVRLSVLSVQCKARRSGVRKVKSKFATAATVQEDKTMATAKGDVDHLPIYDLDPKLEIFKDHFRYRMKRFLEQKGSIEENEGSLESFSKGYLKFGINTNEDGTVYREWAPAAQEAELIGDFNDWNGANHKMEKDKFGVWSIKIDHVKGKPAIPHNSKVKFRFLHGGVWVDRIPALIRYATVDASKFGAPYDGVHWDPPASERYTFKHPRPSKPAAPRIYEAHVGMSGEKPAVSTYREFADNVLPRIRANNYNTVQLMAVMEHSYYASFGYHVTNFFAVSSRSGTPEDLKYLVDKAHSLGLRVLMDVVHSHASNNVTDGLNGYDVGQSTQESYFHAGDRGYHKLWDSRLFNYANWEVLRFLLSNLRYWLDEFMFDGFRFDGVTSMLYHHHGINVGFTGNYQEYFSLDTAVDAVVYMMLANHLMHKLLPEATVVAEDVSGMPVLCRPVDEGGVGFDYRLAMAIPDRWIDYLKNKDDSEWSMGEIAHTLTNRRYTEKCIAYAESHDQSIVGDKTIAFLLMDKEMYTGMSDLQPASPTIDRGIALQKMIHFITMALGGDGYLNFMGNEFGHPEWIDFPREGNNWSYDKCRRQWSLVDTDHLRYKYMNAFDQAMNALDERFSFLSSSKQIVSDMNDEEKVIVFERGDLVFVFNFHPKKTYEGYKVGCDLPGKYRVALDSDALVFGGHGRVGHDVDHFTSPEGVPGVPETNFNNRPNSFKVLSPPRTCVAYYRVDEAGAGRRLHAKAETGKTSPAESIDVKASRASSKEDKEATAGGKKGWKFARQPSDQDTK

SEQ ID NO: 11440 - protein, 823 aa, Zea mays subsp. mays
  peptide (1)..(823): Ceres Seq. ID no. 12414793
MLCLVSPSSSPTPLPPPRRSRSHADRAAPPGIAGGGNVRLSVLSVQCKARRSGVRKVKSKFATAATVQEDKTMATAKGDVDHLPIYDLDPKLEIFKDHFRYRMKRFLEQKGSIEENEGSLESFSKGYLKFGINTNEDGTVYREWAPAAQEAELIGDFNDWNGANHKMEKDKFGVWSIKIDHVKGKPAIPHNSKVKFRFLHGGVWVDRIPALIRYATVDASKFGAPYDGVHWDPPASERYTFKHPRPSKPAAPRIYEAHVGMSGEKPAVSTYREFADNVLPRIRANNYNTVQLMAVMEHSYYASFGYHVTNFFAVSSRSGTPEDLKYLVDKAHSLGLRVLMDVVHSHASNNVTDGLNGYDVGQSTQESYFHAGDRGYHKLWDSRLFNYANWEVLRFLLSNLRYWLDEFMFDGFRFDGVTSMLYHHHGINVGFTGNYQEYFSLDTAVDAVVYMMLANHLMHKLLPEATVVAEDVSGMPVLCRPVDEGGVGFDYRLAMAIPDRWIDYLKNKDDSEWSMGEIAHTLTNRRYTEKCIAYAESHDQSIVGDKTIAFLLMDKEMYTGMSDLQPASPTIDRGIALQKMIHFITMALGGDGYLNFMGNEFGHPEWIDFPREGNNWSYDKCRRQWSLVDTDHLRYKYMNAFDQAMNALDERFSFLSSSKQIVSDMNDEEKVIVFERGDLVFVFNFHPKKTYEGYKVGCDLPGKYRVALDSDALVFGGHGRVGHDVDHFTSPEGVPGVPETNFNNRPNSFKVLSPPRTCVAYYRVDEAGAGRRLHAKAETGKTSPAESIDVKASRASSKEDKEATAGGKKGWKFARQPSDQDTK

SEQ ID NO: 11441 - protein, 751 aa, Zea mays subsp. mays
  peptide (1)..(751): Ceres Seq. ID no. 12414794
MATAKGDVDHLPIYDLDPKLEIFKDHFRYRMKRFLEQKGSIEENEGSLESFSKGYLKFGINTNEDGTVYREWAPAAQEAELIGDFNDWNGANHKMEKDKFGVWSIKIDHVKGKPAIPHNSKVKFRFLHGGVWVDRIPALIRYATVDASKFGAPYDGVHWDPPASERYTFKHPRPSKPAAPRIYEAHVGMSGEKPAVSTYREFADNVLPRIRANNYNTVQLMAVMEHSYYASFGYHVTNFFAVSSRSGTPEDLKYLVDKAHSLGLRVLMDVVHSHASNNVTDGLNGYDVGQSTQESYFHAGDRGYHKLWDSRLFNYANWEVLRFLLSNLRYWLDEFMFDGFRFDGVTSMLYHHHGINVGFTGNYQEYFSLDTAVDAVVYMMLANHLMHKLLPEATVVAEDVSGMPVLCRPVDEGGVGFDYRLAMAIPDRWIDYLKNKDDSEWSMGEIAHTLTNRRYTEKCIAYAESHDQSIVGDKTIAFLLMDKEMYTGMSDLQPASPTIDRGIALQKMIHFITMALGGDGYLNFMGNEFGHPEWIDFPREGNNWSYDKCRRQWSLVDTDHLRYKYMNAFDQAMNALDERFSFLSSSKQIVSDMNDEEKVIVFERGDLVFVFNFHPKKTYEGYKVGCDLPGKYRVALDSDALVFGGHGRVGHDVDHFTSPEGVPGVPETNFNNRPNSFKVLSPPRTCVAYYRVDEAGAGRRLHAKAETGKTSPAESIDVKASRASSKEDKEATAGGKKGWKFARQPSDQDTK

SEQ ID NO: 11442 - DNA, 631 bp, Zea mays subsp. mays; identical to SEQ ID NO: 8139
  misc_feature (1)..(631): Ceres Seq. ID no. 12342153
  misc_feature (1)..(631): Ortholog of  Ceres SEQ ID NO 15226449 as cited in SEQ ID NO 58879
  misc_feature (1)..(631): Ortholog of  Ceres SEQ ID NO 13597146 as cited in SEQ ID NO 63311

SEQ ID NO: 11443 - protein, 113 aa, Zea mays subsp. mays; identical to SEQ ID NO: 8140
  peptide (1)..(113): Ceres Seq. ID no. 12342154

SEQ ID NO: 11444 - protein, 71 aa, Zea mays subsp. mays; identical to SEQ ID NO: 8141
  peptide (1)..(71): Ceres Seq. ID no. 12342155

SEQ ID NO: 11445 - DNA, 1374 bp, Zea mays subsp. mays; identical to SEQ ID NO: 4329
  misc_feature (1)..(1374): Ceres Seq. ID no. 12435065
  misc_feature (1)..(1374): Ortholog of  Ceres SEQ ID NO 15171426 as cited in SEQ ID NO 51543
  misc_feature (1)..(1374): Ortholog of  Ceres SEQ ID NO 14311780 as cited in SEQ ID NO 59241
  misc_feature (1)..(1374): Ortholog of  Ceres SEQ ID NO 13584630 as cited in SEQ ID NO 65282

SEQ ID NO: 11446 - protein, 259 aa, Zea mays subsp. mays; identical to SEQ ID NO: 4330
  peptide (1)..(259): Ceres Seq. ID no. 12435066
  misc_feature (10)..(10): Xaa is any aa, unknown or other
  misc_feature (11)..(11): Xaa is any aa, unknown or other
  misc_feature (16)..(16): Xaa is any aa, unknown or other
  misc_feature (17)..(17): Xaa is any aa, unknown or other
  misc_feature (18)..(18): Xaa is any aa, unknown or other
  misc_feature (19)..(19): Xaa is any aa, unknown or other

SEQ ID NO: 11447 - protein, 240 aa, Zea mays subsp. mays; identical to SEQ ID NO: 4331
  peptide (1)..(240): Ceres Seq. ID no. 12435067

SEQ ID NO: 11448 - protein, 231 aa, Zea mays subsp. mays; identical to SEQ ID NO: 4332
  peptide (1)..(231): Ceres Seq. ID no. 12435068

SEQ ID NO: 11449 - DNA, 886 bp, Zea mays subsp. mays
  misc_feature (1)..(886): Ceres Seq. ID no. 12386681
  misc_feature (1)..(886): Ortholog of  Ceres SEQ ID NO 13659393 as cited in SEQ ID NO 67047
  misc_feature (1)..(886): Ortholog of  Ceres SEQ ID NO 13654553 as cited in SEQ ID NO 68417
gaatctctctgcctcattctctctccaccggcgacggcgagtccgaccgcactgctcctctccgtgcggagatctctcgcgtgctggcaggcgcgtcctggtgactgggacacgggagaagagaccttggtgggtggcagcggcaggccatggaggcgctgctggtgacggtgcttcttctcctcctctcctctaccctcgccgcagcacaatggtgcgtgtgcaggcaggacgcgtcgcaggccgcgctgcagaagaccatcgactacgcgtgcggctccggggcggactgcaactccatccatgagaccggggcgtgctacaaccccaacaccgtcccggcgcactgctcctgggccgccaacagctactaccagaacaacaaggccaagggcgccacctgcgacttcgccggcaccgccaccctcaccaccagcgacccgagctccttcgggctgctcttaccccaccaccagtgcaagcgccgcgggaaccgtgaccccgaccaccggcggcacaatgggaggagcgggaggcccagggaccttgacgcccgccgggacaggcgcaggcacagccggcactaccggcatggggactgcaggcactacgggtaccgggttcggcggcctaggaccagcaggcatggacacagcggcggcggcggcggggggcttgctcctcctcccagaggctgggctgtgcgctgccctcgtcgcgctcctcctctccgccatcgtgctcgcgtgacgccttcacatgacctcggaaacaacaacctactgcctgcatgctagtagtagtagaaagcgctgcccttttgggaggtgtatgtagttcaggagtactctgattatctatggagaaagggtgggaattattgggc

SEQ ID NO: 11450 - protein, 215 aa, Zea mays subsp. mays
  peptide (1)..(215): Ceres Seq. ID no. 12386682
MEALLVTVLLLLLSSTLAAAQWCVCRQDASQAALQKTIDYACGSGADCNSIHETGACYNPNTVPAHCSWAANSYYQNNKAKGATCDFAGTATLTTSDPSSFGLLLPHHQCKRRGNRDPDHRRHNGRSGRPRDLDARRDRRRHSRHYRHGDCRHYGYRVRRPRTSRHGHSGGGGGGLAPPPRGWAVRCPRRAPPLRHRARVTPSHDLGNNNLLPAC

SEQ ID NO: 11451 - protein, 148 aa, Zea mays subsp. mays
  peptide (1)..(148): Ceres Seq. ID no. 12386683
MRPGRATTPTPSRRTAPGPPTATTRTTRPRAPPATSPAPPPSPPATRAPSGCSYPTTSASAAGTVTPTTGGTMGGAGGPGTLTPAGTGAGTAGTTGMGTAGTTGTGFGGLGPAGMDTAAAAAGGLLLLPEAGLCAALVALLLSAIVLA

SEQ ID NO: 11452 - DNA, 1247 bp, Zea mays subsp. mays
  misc_feature (1)..(1247): Ceres Seq. ID no. 12411831
  misc_feature (1)..(1247): Ortholog of  Ceres SEQ ID NO 13596519 as cited in SEQ ID NO 62572
  misc_feature (1)..(1247): Ortholog of  Ceres SEQ ID NO 13584209 as cited in SEQ ID NO 63683
  misc_feature (1)..(1247): Ortholog of  Ceres SEQ ID NO 12625108 as cited in SEQ ID NO 68102
aaaaggtacccaagctgaaagcatcacactcgcagttgcagagttccgcttcatcagtcccacactctccccttcctccccccagtcctgagcttcgccgaggcatacggacaataccggcaccggcagcgagcagtcgggagccatggctccgcggctcctgctcttcctcctcctcctcctcccgctcctcgccgccggacaccagcacccgtcctcctacggctcctccgcgctttccgagtggcgccccgccaaggcatcctactacgccgccgaccccgaagacgccatcggtggggcgtgcgggttcggggatctgggaaagcacgggtacgggatggcgacggtggggctgagcacggcgctgttcgagcgcggcgcggcgtgcggcggctgctacgaggtcaagtgcgtcgaggatctcaagtactgcctccccggcacctccatagtcgtcacggccaccaacttctgcgccccgaactacggccttcccgccgacgccggcggccactgcaacccgcccaaccatcatttcctcctccccatccagtcgtttgagaagattgcgctctggaaggccggcatcatgccaatccagtaccgccgtgttaagtgcctccgtgaaggtggtgtcaggttctctgtcaacggtcggcacttcttctttacagtcctaatcagcaacgttggtggcgcgggtgatgttagatctgtgaagatcaaaggaacagagttgggatggctcccgatgggccgcaactggggccaggtgtggcacatcaactgtgacatgaggggacaacctctatcgtttgagctcagctcgagcgatggcaaggcgctgaccagtttcaacgtcgtccctaaggattgggagtatggcaagacatacacggggaagcaatttcttctgtagagaatgagcgccacaagatcagcttacagtttctcattttttgttctgatcctacgagttgggctgtggtgtacattctctgcacttctgcagaacaagtaatatcattattaggagaaaattacttagtgcaaggcctcagatagttgctcttggtcataaatggttttccatgtccccttcatagttgtactaaagaggcttgatgtatcattcaaaatagaagcctccgttgtattacaatattttacctagcaagcaatgataatgtatttctgcatttctgtattagtaacaagggcagcaactagaactttgatttcct

SEQ ID NO: 11453 - protein, 258 aa, Zea mays subsp. mays
  peptide (1)..(258): Ceres Seq. ID no. 12411832
MAPRLLLFLLLLLPLLAAGHQHPSSYGSSALSEWRPAKASYYAADPEDAIGGACGFGDLGKHGYGMATVGLSTALFERGAACGGCYEVKCVEDLKYCLPGTSIVVTATNFCAPNYGLPADAGGHCNPPNHHFLLPIQSFEKIALWKAGIMPIQYRRVKCLREGGVRFSVNGRHFFFTVLISNVGGAGDVRSVKIKGTELGWLPMGRNWGQVWHINCDMRGQPLSFELSSSDGKALTSFNVVPKDWEYGKTYTGKQFLL

SEQ ID NO: 11454 - protein, 193 aa, Zea mays subsp. mays
  peptide (1)..(193): Ceres Seq. ID no. 12411833
MATVGLSTALFERGAACGGCYEVKCVEDLKYCLPGTSIVVTATNFCAPNYGLPADAGGHCNPPNHHFLLPIQSFEKIALWKAGIMPIQYRRVKCLREGGVRFSVNGRHFFFTVLISNVGGAGDVRSVKIKGTELGWLPMGRNWGQVWHINCDMRGQPLSFELSSSDGKALTSFNVVPKDWEYGKTYTGKQFLL

SEQ ID NO: 11455 - DNA, 782 bp, Zea mays subsp. mays; identical to SEQ ID NO: 8002
  misc_feature (1)..(782): Ceres Seq. ID no. 12358043
  misc_feature (1)..(782): Ortholog of  Ceres SEQ ID NO 13663563 as cited in SEQ ID NO 66853

SEQ ID NO: 11456 - protein, 221 aa, Zea mays subsp. mays; identical to SEQ ID NO: 8003
  peptide (1)..(221): Ceres Seq. ID no. 12358044

SEQ ID NO: 11457 - protein, 206 aa, Zea mays subsp. mays; identical to SEQ ID NO: 8004
  peptide (1)..(206): Ceres Seq. ID no. 12358045

SEQ ID NO: 11458 - protein, 190 aa, Zea mays subsp. mays; identical to SEQ ID NO: 8005
  peptide (1)..(190): Ceres Seq. ID no. 12358046

SEQ ID NO: 11459 - protein, 162 aa, Zea mays subsp. mays; identical to SEQ ID NO: 8006
  peptide (1)..(162): Ceres Seq. ID no. 12358047

SEQ ID NO: 11460 - DNA, 1789 bp, Zea mays subsp. mays
  misc_feature (1)..(1789): Ceres Seq. ID no. 12374390
  misc_feature (1)..(1789): Ortholog of  Ceres SEQ ID NO 13597732 as cited in SEQ ID NO 64810
  misc_feature (1)..(1789): Ortholog of  Ceres SEQ ID NO 14301912 as cited in SEQ ID NO 67786
ccttccctccgcctccgcctccgcccccgcccccgcccacgcccactcctcgctgccaccactcctgtcacctcttcccgcgccgacgcagccgccatggaccccgtcgccacatgggggctaaccccgctcgcgggcgccgacccggagatctacgacctcctggagcgcgagaagcggcgccagcgtcgcggcatcgagctcatcgcctccgagaacttcacctccttcgccgtcatggaggcgctcggctccgcgctcactaacaagtactccgagggcatgcccggcgcccgctactacggcggcaacgacgtcatcgacgagatcgagaacctctgccggtcacgcgcgctcgctgccttccaccttgacgccgcgtcctggggcgtcaacgtgcagccctactcgggctcccccgccaacttcgccgcctacaccgcgctgctcaacccgcacgaccggatcatggggctcgaccttccctccggcggacacctcactcacgggtactacacggccggcggtaagaagatctccgccacctcgatctactttgagagcctgccgtacaaggtgagcgccgcaacggggtacatcgactacgagaagctcgaggagaaggcacttgacttccgccccaagctcatcatctgcggtggcagtgcgtacccgagggactgggattacgccaagctcagggccgtcgccgacaaggtcggggccctgctgctctgcgacatggcgcacatcagcgggctcgtcgccgcgcaggaagctgcaaatccttttgaatattgtgatgtggttaccacaaccacgcacaagtccctcagagggccaagggctggcatgatcttctacaggaaaggccctaagccccccaagaagggccagcctgagggtgctgtttatgattacgaagacaagatcaactttgcagtgttcccatctctccaaggtggccctcacaaccaccagattgctgcacttgctgttgctctacagcaaactatgtcgcctggcttcaaggcctatgcaaagcaagtgaaggccaatgctgttgcaattggaaactatctcatgagcaagggctacaagatggtgactgatggaactgagaaccaccttgttctctgggatctccgcccccttggcttgactggaaacaaggtcgaaaagctatgtgatctttgccacatcacattgaacaagaatgctgtcttcggtgacagcagtgcattgtctccgggtggtgtccgcattggcgcgccagcaatgacctcgaggggtctactggagaaggatttcgagcagattggggagttcctccaccaggcagtgaccatctgcctgaacatccagaaggagtacggcaagctcctcaaggacttcaacaagggcctggtgaacaacaaggacatcgagaacctcaaggtccaggtggagaagtttgccgactccttcgacatgcctgggttcacgcttgagagcatgaaatacaaggagtagatatgcctctttcatgcgcggcaaggtcctcctgtaccgatgtctttccttgtggtggcgcagggtgccatggcactgcattgccgccacacttacgatgatgatgatgggttatggattttgtctacaatgtcagcaggataggctcacaattgccccctgccctccggtttggtcgcctctcaggttttcatttggtagttgttcgcagggaaccatatgagaattgcaatgtcaatcaggtgtttgccaataataattgggtggtttctgctct

SEQ ID NO: 11461 - protein, 503 aa, Zea mays subsp. mays
  peptide (1)..(503): Ceres Seq. ID no. 12374391
PSLRLRLRPRPRPRPLLAATTPVTSSRADAAAMDPVATWGLTPLAGADPEIYDLLEREKRRQRRGIELIASENFTSFAVMEALGSALTNKYSEGMPGARYYGGNDVIDEIENLCRSRALAAFHLDAASWGVNVQPYSGSPANFAAYTALLNPHDRIMGLDLPSGGHLTHGYYTAGGKKISATSIYFESLPYKVSAATGYIDYEKLEEKALDFRPKLIICGGSAYPRDWDYAKLRAVADKVGALLLCDMAHISGLVAAQEAANPFEYCDVVTTTTHKSLRGPRAGMIFYRKGPKPPKKGQPEGAVYDYEDKINFAVFPSLQGGPHNHQIAALAVALQQTMSPGFKAYAKQVKANAVAIGNYLMSKGYKMVTDGTENHLVLWDLRPLGLTGNKVEKLCDLCHITLNKNAVFGDSSALSPGGVRIGAPAMTSRGLLEKDFEQIGEFLHQAVTICLNIQKEYGKLLKDFNKGLVNNKDIENLKVQVEKFADSFDMPGFTLESMKYKE

SEQ ID NO: 11462 - protein, 471 aa, Zea mays subsp. mays; identical to SEQ ID NO: 1931
  peptide (1)..(471): Ceres Seq. ID no. 12374392

SEQ ID NO: 11463 - protein, 424 aa, Zea mays subsp. mays; identical to SEQ ID NO: 1932
  peptide (1)..(424): Ceres Seq. ID no. 12374393

SEQ ID NO: 11464 - DNA, 1600 bp, Zea mays subsp. mays
  misc_feature (1)..(1600): Ceres Seq. ID no. 12349840
  misc_feature (1)..(1600): Ortholog of  Ceres SEQ ID NO 15177969 as cited in SEQ ID NO 58823
  misc_feature (1)..(1600): Ortholog of  Ceres SEQ ID NO 15177963 as cited in SEQ ID NO 59105
  misc_feature (1)..(1600): Ortholog of  Ceres SEQ ID NO 14302746 as cited in SEQ ID NO 66646
aacacatcactcccagactgctccctcatacgtccattatttccgcaaagtgcaaccgagaatgacatgcagtcgtagtatcgtagataaccaccttatgtcgtacttcaccatcctactgctttcttcttttgctgcaacggtagcatatcctgctcgcagtgaattactgccttaccagatgaaaaaccaccattctgtatcgtcacacaacccacaaccgaaggatttcccaactgagcaactctaccgcgcctaccttgtaatccagcgcttcaagagcaccgtcaccagcgaccccaagaacgtcaccgccacctggattggtcatgatctctgcggagaaacgacctacgtggggttctactgcggatcgccggcaggaggagataagttgacagtcataggggtcattttgaatggctatagactacatgcaccaacgttggaaggtttcgttaatcagctccctgatctatctcttttccatgctgcttccaacaattttggtggcgatataccccaattaaccggcctagggtacatgtaccagctcagtgtcgccgataaagatctgcaattacaggctcaacaaaaaagggatgtccctaatgattctatagtggggggcggcggcaacattcacgcgactggtggtggctgtctatttgcagattttaacttctcgtttaatgttggaattaataagggtcacaaatttcctggttttacgcaatccaaagctctccttctcaaccacaacaatttgtccggtccacttccgtcaaacctcggtttctcaaagctgagctaccttgccctcgccaacaacaaactcaccgggccaatcccgccgtcaatcagtaacctggaagactctctcttcgaggtactccttctcaacaaccagctctccggctgcctcccccacgagctcggcatgctcaccaaggcggccgtgattgacgccggcatgaaccagctcaccggcccaatcccgtcatctttctcctgcctaagcagcgtcgagcagctcaacctggccggaaaccgcctctacggccaggtacccgacgcgctctgcaagcttgctgggcccgctggccgcctcgccaacctcacgctgtccggcaactacttcacatccgccgggccggcatgcgcggcgctgatcaaagacggagtgctggacgtgaagaacaactgcatcccggggctcaccaaccagaggcgccccgcggagtgcgcagcgttccagagccaaccaaagacatgcccggcagcgagcactcaggtgacatgccccgccgccgcagcttccaggaacgcggcggcgccaggggagaggaaggtcaaggattactccagctacgtgacgtacgctactctgcatgactgagccacactggcatgcagtaagagacagagtgccttgctggctatgtgtctcttgtattcagcatgagtgtaccctagcgtgtgttggtgtgattgtgattgctgtctatttgcattattgtacgtttgttgctgtcacatctagatcatcccattatttgtacgtccaaatccattttatggaaagtactgttggtgtttc

SEQ ID NO: 11465 - protein, 465 aa, Zea mays subsp. mays
  peptide (1)..(465): Ceres Seq. ID no. 12349841
THHSQTAPSYVHYFRKVQPRMTCSRSIVDNHLMSYFTILLLSSFAATVAYPARSELLPYQMKNHHSVSSHNPQPKDFPTEQLYRAYLVIQRFKSTVTSDPKNVTATWIGHDLCGETTYVGFYCGSPAGGDKLTVIGVILNGYRLHAPTLEGFVNQLPDLSLFHAASNNFGGDIPQLTGLGYMYQLSVADKDLQLQAQQKRDVPNDSIVGGGGNIHATGGGCLFADFNFSFNVGINKGHKFPGFTQSKALLLNHNNLSGPLPSNLGFSKLSYLALANNKLTGPIPPSISNLEDSLFEVLLLNNQLSGCLPHELGMLTKAAVIDAGMNQLTGPIPSSFSCLSSVEQLNLAGNRLYGQVPDALCKLAGPAGRLANLTLSGNYFTSAGPACAALIKDGVLDVKNNCIPGLTNQRRPAECAAFQSQPKTCPAASTQVTCPAAAASRNAAAPGERKVKDYSSYVTYATLHD

SEQ ID NO: 11466 - protein, 445 aa, Zea mays subsp. mays
  peptide (1)..(445): Ceres Seq. ID no. 12349842
MTCSRSIVDNHLMSYFTILLLSSFAATVAYPARSELLPYQMKNHHSVSSHNPQPKDFPTEQLYRAYLVIQRFKSTVTSDPKNVTATWIGHDLCGETTYVGFYCGSPAGGDKLTVIGVILNGYRLHAPTLEGFVNQLPDLSLFHAASNNFGGDIPQLTGLGYMYQLSVADKDLQLQAQQKRDVPNDSIVGGGGNIHATGGGCLFADFNFSFNVGINKGHKFPGFTQSKALLLNHNNLSGPLPSNLGFSKLSYLALANNKLTGPIPPSISNLEDSLFEVLLLNNQLSGCLPHELGMLTKAAVIDAGMNQLTGPIPSSFSCLSSVEQLNLAGNRLYGQVPDALCKLAGPAGRLANLTLSGNYFTSAGPACAALIKDGVLDVKNNCIPGLTNQRRPAECAAFQSQPKTCPAASTQVTCPAAAASRNAAAPGERKVKDYSSYVTYATLHD

SEQ ID NO: 11467 - protein, 433 aa, Zea mays subsp. mays
  peptide (1)..(433): Ceres Seq. ID no. 12349843
MSYFTILLLSSFAATVAYPARSELLPYQMKNHHSVSSHNPQPKDFPTEQLYRAYLVIQRFKSTVTSDPKNVTATWIGHDLCGETTYVGFYCGSPAGGDKLTVIGVILNGYRLHAPTLEGFVNQLPDLSLFHAASNNFGGDIPQLTGLGYMYQLSVADKDLQLQAQQKRDVPNDSIVGGGGNIHATGGGCLFADFNFSFNVGINKGHKFPGFTQSKALLLNHNNLSGPLPSNLGFSKLSYLALANNKLTGPIPPSISNLEDSLFEVLLLNNQLSGCLPHELGMLTKAAVIDAGMNQLTGPIPSSFSCLSSVEQLNLAGNRLYGQVPDALCKLAGPAGRLANLTLSGNYFTSAGPACAALIKDGVLDVKNNCIPGLTNQRRPAECAAFQSQPKTCPAASTQVTCPAAAASRNAAAPGERKVKDYSSYVTYATLHD

SEQ ID NO: 11468 - DNA, 958 bp, Zea mays subsp. mays
  misc_feature (1)..(958): Ceres Seq. ID no. 12345616
  misc_feature (1)..(958): Ortholog of  Ceres SEQ ID NO 15174142 as cited in SEQ ID NO 64367
agggttcgcggatcccccacgacacctataagcaccaaccctagcccaaaaccccgcttccacttcacagcctctccgcctccgctcctcgcgccgccgccgcgtctcctcctgtacaggtaaggagaggaagagggcgaaatggtgaagcacaacaacgtcatccccaacgggcacttcaagaagcactggcagaactatgtcaagacatggttcaaccagcccgcccgcaagcagaggcgccgcatcgctcgtcaaaagaaggctgtgaagatattcccccgcccgactgctggtcctctacgccccattgttcaatgccagactttaaagtacaacatgaagtcaagggctgggagaggctttacccttgaggagctgaaggctgctggcatcccaaagaagcttgctccaaccattggtatttctgttgatcaccgccgcaagaacaaatcccttgagggactgcaggccaatgtccagaggcttaagacatacaaggccaagctggttatcttcccaaggcgtgcacacaaggttaaggctggtgactctactccagaggagcttgccaccgctacccaggtccagggtgactacatgccatttactcgtggtgagaaacgttcagttgaggttgtgaaggtcacagatgagatgaagtcatttgctgcctatggcaagctccgccttgagcggatgaacaagaaacatcttggtgcccgccagaagaaggcagctgaggcagagaaggaagataagaagtgaagcggttgaagatagtaccctgttttgttctattcagtcattagtgaatgctactacttaaagtgcttgttctatgttttttttgcggtaatggaaatagagcccagacaaacattttggtgtcctactgtttgatgccttgtacttgtttgcgaactcagctatctaatgggttattggattcttgccc

SEQ ID NO: 11469 - protein, 208 aa, Zea mays subsp. mays; identical to SEQ ID NO: 3536
  peptide (1)..(208): Ceres Seq. ID no. 12345617

SEQ ID NO: 11470 - protein, 142 aa, Zea mays subsp. mays; identical to SEQ ID NO: 3537
  peptide (1)..(142): Ceres Seq. ID no. 12345618

SEQ ID NO: 11471 - DNA, 668 bp, Zea mays subsp. mays
  misc_feature (1)..(668): Ceres Seq. ID no. 12344404
  misc_feature (1)..(668): Ortholog of  Ceres SEQ ID NO 13596284 as cited in SEQ ID NO 68273
tattgctgaaaagacagccctagaatacggagagagaaatggattaaatgttgttacagtttgccctactatggctttaggaccgctcttgcggcctatgctcaatgtcagccatgaattcctcatgtacattattaaaggaggtcctactatgatgaagaacattccatggcacatagttgatgtccgagatgtggttgatgctttgcttatggtatacaagaaagaggaatcgacagggagatacatctgtgcaccaaattgcatcagtgcaaaagatctggtgaacatgctgaagagggattatcctaattacaattatgtaaactgcgacaatgatatggtgcttaactctatagttacaccacttatgtcggagaaactgaagaatttgggctggaaaccaatgaagacactagaggaaacattattggatagtgttgaatgctataagaagatggggcttctaaaagatgctgagggatgcccttgtcgtcttcctcacctttttcatatggctatagaaaaatgaagaatactcaccattgcttcttgtgttacctaattactctttgaacattgttgggtatgtgttctaatcacacaccaataatgttgacattcaatgggttgtggttgatttgaaataaatgtttggtttcttatgg

SEQ ID NO: 11472 - protein, 176 aa, Zea mays subsp. mays
  peptide (1)..(176): Ceres Seq. ID no. 12344405
IAEKTALEYGERNGLNVVTVCPTMALGPLLRPMLNVSHEFLMYIIKGGPTMMKNIPWHIVDVRDVVDALLMVYKKEESTGRYICAPNCISAKDLVNMLKRDYPNYNYVNCDNDMVLNSIVTPLMSEKLKNLGWKPMKTLEETLLDSVECYKKMGLLKDAEGCPCRLPHLFHMAIEK

SEQ ID NO: 11473 - protein, 153 aa, Zea mays subsp. mays
  peptide (1)..(153): Ceres Seq. ID no. 12344406
MALGPLLRPMLNVSHEFLMYIIKGGPTMMKNIPWHIVDVRDVVDALLMVYKKEESTGRYICAPNCISAKDLVNMLKRDYPNYNYVNCDNDMVLNSIVTPLMSEKLKNLGWKPMKTLEETLLDSVECYKKMGLLKDAEGCPCRLPHLFHMAIEK

SEQ ID NO: 11474 - protein, 144 aa, Zea mays subsp. mays
  peptide (1)..(144): Ceres Seq. ID no. 12344407
MLNVSHEFLMYIIKGGPTMMKNIPWHIVDVRDVVDALLMVYKKEESTGRYICAPNCISAKDLVNMLKRDYPNYNYVNCDNDMVLNSIVTPLMSEKLKNLGWKPMKTLEETLLDSVECYKKMGLLKDAEGCPCRLPHLFHMAIEK

SEQ ID NO: 11475 - DNA, 1401 bp, Zea mays subsp. mays
  misc_feature (1)..(1401): Ceres Seq. ID no. 13636633
  misc_feature (1)..(1401): Ortholog of  Ceres SEQ ID NO 14304148 as cited in SEQ ID NO 57313
  misc_feature (1)..(1401): Ortholog of  Ceres SEQ ID NO 13598513 as cited in SEQ ID NO 64102
  misc_feature (1)..(1401): Ortholog of  Ceres SEQ ID NO 14302224 as cited in SEQ ID NO 64268
gtcatcaatcaaatactcacacaaccatggggcaccaggcgcagcacggcacggacgacaccgaggagctgctcgcagcccaccggcagctgtggtgccatgccctgggctacgtcaagtccatggcgctcaagtgcgccctggacctgcgcatccccgacaccatcgaccgctgcggcgggagcgccaccctgggcgagctgctcgccgcaagcgagatctcggcgtccaaccacgactacctccgacgggtcatgcgcacgctgacagccatgcgcatcttcgcggccagccacgaccccgccaaggccgacgacgcggccgccatctcctaccagctcaccccggcgtcccggctgctcgtcagcagcagcagcagcgtcgacgacgccgccgggcctcgaaggagaacactactaccccgagcatcctccccaacatcgcccacctggtccgccccaacaccatctccctgctgttcagcatgggcgagtggatgaaggacgagagcgcggcgtccgtgtcgctgtacgagacggtgcaccggcaggggatgtgggcgtgcgtggaggacgacgcggccaacagggccagcttctacgagagcatggacgccgacacccggctcgtgatgcaggccgtggtccgccggtgcccgcacgtgttcgacggcatcaagtcgctcgtcgacgtcggcggcggccgcggcaccgccgccgccgccatcgtcgccgccttcccgcacatccagaggtgcaccgtcatggacctcccccacgtcgtcgccgaggctcccgccggcaccgccggcctgtccttccacggcggcgacatgttcgagcacatcccgtcggctgacgcactcatgctcaagtggatcctgcacgactgggatgaggacaagtgcatcaagataatggagcgctgcaaggaagcgatcggtggcaaggaagcaggggggaaggtgataataatagacacggtgctcggatctcgggcagacgacgacgacgacaagacgtgcagggagacgtatgtgttggatctccacatactgagcttcgtgaacggggcggagcgggaggagcacgagtggaggaggatcttcctggcggctgggttccgtgactacaagatcacgcacacccgaggcatcccgtccatcatcgaggtcttcccgtgatgatcatggatcgagagtcgatcatatatgcatgtttgtacgtgtttgtgtcataataaatcgatcgatcatgttgtttactctttttatttcggtatgtagttgcatctgtgggcgggctaaaataaatcacggccggccgggcttcatcaagcccatgtatccagctgtgtgtaataatgcaatggaaaacgaaccaaaaagaatgcttccattcc

SEQ ID NO: 11476 - protein, 393 aa, Zea mays subsp. mays
  peptide (1)..(393): Ceres Seq. ID no. 15220370
SSIKYSHNHGAPGAARHGRHRGAARSPPAAVVPCPGLRQVHGAQVRPGPAHPRHHRPLRRERHPGRAARRKRDLGVQPRLPPTGHAHADSHAHLRGQPRPRQGRRRGRHLLPAHPGVPAARQQQQQRRRRRRASKENTTTPSILPNIAHLVRPNTISLLFSMGEWMKDESAASVSLYETVHRQGMWACVEDDAANRASFYESMDADTRLVMQAVVRRCPHVFDGIKSLVDVGGGRGTAAAAIVAAFPHIQRCTVMDLPHVVAEAPAGTAGLSFHGGDMFEHIPSADALMLKWILHDWDEDKCIKIMERCKEAIGGKEAGGKVIIIDTVLGSRADDDDDKTCRETYVLDLHILSFVNGAEREEHEWRRIFLAAGFRDYKITHTRGIPSIIEVFP

SEQ ID NO: 11477 - protein, 232 aa, Zea mays subsp. mays
  peptide (1)..(232): Ceres Seq. ID no. 15220371
MGEWMKDESAASVSLYETVHRQGMWACVEDDAANRASFYESMDADTRLVMQAVVRRCPHVFDGIKSLVDVGGGRGTAAAAIVAAFPHIQRCTVMDLPHVVAEAPAGTAGLSFHGGDMFEHIPSADALMLKWILHDWDEDKCIKIMERCKEAIGGKEAGGKVIIIDTVLGSRADDDDDKTCRETYVLDLHILSFVNGAEREEHEWRRIFLAAGFRDYKITHTRGIPSIIEVFP

SEQ ID NO: 11478 - protein, 228 aa, Zea mays subsp. mays
  peptide (1)..(228): Ceres Seq. ID no. 15220372
MKDESAASVSLYETVHRQGMWACVEDDAANRASFYESMDADTRLVMQAVVRRCPHVFDGIKSLVDVGGGRGTAAAAIVAAFPHIQRCTVMDLPHVVAEAPAGTAGLSFHGGDMFEHIPSADALMLKWILHDWDEDKCIKIMERCKEAIGGKEAGGKVIIIDTVLGSRADDDDDKTCRETYVLDLHILSFVNGAEREEHEWRRIFLAAGFRDYKITHTRGIPSIIEVFP

SEQ ID NO: 11479 - DNA, 1106 bp, Zea mays subsp. mays
  misc_feature (1)..(1106): Ceres Seq. ID no. 12411811
  misc_feature (1)..(1106): Ortholog of  Ceres SEQ ID NO 12619664 as cited in SEQ ID NO 66048
acaaaacatatctatatatctgcaacgtcaaatcaacacaggctgttgtttgcttcttttggtaaaggctttagctgcggcagatccaccggcggcgccccgagaatcgaagatgccggtgaaggtgttcggatcgccgacgtcggcggaggtcgcccgcgtcctggcctgcctgttcgagaaggacgtcgagttccagctcatccgcgtcgactccttccgcggcaccaagcgcctgccccagtacctcaagctccagccgcacggcgaggcgctcaccttcgaggacggcaacgtcaccctcgtcggtacgtacgtacacacgcaagcgacgcgagagagccaactgaccaactgaaaacgtaatggatcatggatggatggatggatgcatgcagagtcgaggaagatcctgcgccacatcgccgacaagtacaagaaccaggggtacagggacctgttcggcccgggcgcgctggagcgggcctccatcgagcagtggctgcagacggaggcgcagagcttcgacgtccccagcgccgacatggtctacagcctcgcctacctgccgcccgacatgcagctcgacggcaggggcgtcggcggcctcccggcggcgacggggacgatgaacccggcgcaccggcagaaggtggaggagatgctgcagctgttcgagaagagccgcaggcagctgggcaagctgctggacatctacgagcagcgccttggcgaggaggccttcctggccggaggcaagttcacgctcgccgacctgtcccacctgcccaacgccgaccgcctcgccggcgacccgcggtccgcacgcctcatggagtcgcgcaggaacgtcagcaagtggtgggacaccgtatcccgccgcgactcttgggtcagggtcaaggagttgcagcgcccgccgtccgcggaggcgcccttctgatgtcgatcgatcgcaaattaaggcggtggcctttgctcaagcctacgtgttcggtttctgcataattttttaataaataaacgccactggcccctctacgtcattggcgattgttcattgtgtaataaatcgttcaagagcatatgatgcttcttgccgtgag

SEQ ID NO: 11480 - protein, 211 aa, Zea mays subsp. mays
  peptide (1)..(211): Ceres Seq. ID no. 12411812
MDGWMDACRVEEDPAPHRRQVQEPGVQGPVRPGRAGAGLHRAVAADGGAELRRPQRRHGLQPRLPAARHAARRQGRRRPPGGDGDDEPGAPAEGGGDAAAVREEPQAAGQAAGHLRAAPWRGGLPGRRQVHARRPVPPAQRRPPRRRPAVRTPHGVAQERQQVVGHRIPPRLLGQGQGVAAPAVRGGALLMSIDRKLRRWPLLKPTCSVSA

SEQ ID NO: 11481 - protein, 207 aa, Zea mays subsp. mays
  peptide (1)..(207): Ceres Seq. ID no. 12411813
MDACRVEEDPAPHRRQVQEPGVQGPVRPGRAGAGLHRAVAADGGAELRRPQRRHGLQPRLPAARHAARRQGRRRPPGGDGDDEPGAPAEGGGDAAAVREEPQAAGQAAGHLRAAPWRGGLPGRRQVHARRPVPPAQRRPPRRRPAVRTPHGVAQERQQVVGHRIPPRLLGQGQGVAAPAVRGGALLMSIDRKLRRWPLLKPTCSVSA

SEQ ID NO: 11482 - protein, 188 aa, Zea mays subsp. mays
  peptide (1)..(188): Ceres Seq. ID no. 12411814
MDGWMHAESRKILRHIADKYKNQGYRDLFGPGALERASIEQWLQTEAQSFDVPSADMVYSLAYLPPDMQLDGRGVGGLPAATGTMNPAHRQKVEEMLQLFEKSRRQLGKLLDIYEQRLGEEAFLAGGKFTLADLSHLPNADRLAGDPRSARLMESRRNVSKWWDTVSRRDSWVRVKELQRPPSAEAPF

SEQ ID NO: 11483 - DNA, 786 bp, Zea mays subsp. mays
  misc_feature (1)..(786): Ceres Seq. ID no. 12337520
  misc_feature (1)..(786): Ortholog of  Ceres SEQ ID NO 13595870 as cited in SEQ ID NO 62101
  misc_feature (1)..(786): Ortholog of  Ceres SEQ ID NO 13590241 as cited in SEQ ID NO 63878
agagattcagcggacgttgatggagctccttaaccaattagatggatttgatgagctaggaaaggtaaaaatgatcatggccacaaatcgacctgatgttctggacccggcgctcctgcgtcctggacgtttagataggaagattgaaattccgctacccaacgagcaatcaagaatggaagttctaaaaatccatgcagccggtatcgccaagcatggggagattgattatgaagcagtcgtgaaactagctgaaggtttcaatggggctgatcttcggaacgtgtgcaccgaagctggcatggctgcaattcgtgcagagagagattacgtagtccacgaagacttcatgaaggctgtgaggaagctaaatgatgcaaaanagctggaatcgagtgcgcattacagtgcagattttggcaaagagtaatgatgctaatgccgatgcaacggacaaatgcatttggcatgtatcatcaggcgagcccagtcagatgcgatgcaaaagcgagaaaggaaccagctatttatgttcaggctacaggcagcttctcttttattccttctttctcgtattcacaattttagtgaggaggattgtcgagctgaccggtgggagaaaccagtcgagaatttagtagctttgcaccagatgccatttgcttctgtaaatcacacattatctgcttccgtgtgtagaatggtaataacttgtcccagctccatgtacttaagacagagtgctcgacttgagaggtaaaaacagagaaaagaacaatttggttc

SEQ ID NO: 11484 - protein, 142 aa, Zea mays subsp. mays
  peptide (1)..(142): Ceres Seq. ID no. 12337521
  misc_feature (128)..(128): Xaa is any aa, unknown or other
EIQRTLMELLNQLDGFDELGKVKMIMATNRPDVLDPALLRPGRLDRKIEIPLPNEQSRMEVLKIHAAGIAKHGEIDYEAVVKLAEGFNGADLRNVCTEAGMAAIRAERDYVVHEDFMKAVRKLNDAKXLESSAHYSADFGKE

SEQ ID NO: 11485 - protein, 136 aa, Zea mays subsp. mays
  peptide (1)..(136): Ceres Seq. ID no. 12337522
  misc_feature (122)..(122): Xaa is any aa, unknown or other
MELLNQLDGFDELGKVKMIMATNRPDVLDPALLRPGRLDRKIEIPLPNEQSRMEVLKIHAAGIAKHGEIDYEAVVKLAEGFNGADLRNVCTEAGMAAIRAERDYVVHEDFMKAVRKLNDAKXLESSAHYSADFGKE

SEQ ID NO: 11486 - protein, 119 aa, Zea mays subsp. mays
  peptide (1)..(119): Ceres Seq. ID no. 12337523
  misc_feature (105)..(105): Xaa is any aa, unknown or other
MIMATNRPDVLDPALLRPGRLDRKIEIPLPNEQSRMEVLKIHAAGIAKHGEIDYEAVVKLAEGFNGADLRNVCTEAGMAAIRAERDYVVHEDFMKAVRKLNDAKXLESSAHYSADFGKE

SEQ ID NO: 11487 - DNA, 656 bp, Zea mays subsp. mays
  misc_feature (1)..(656): Ceres Seq. ID no. 12404694
  misc_feature (1)..(656): Ortholog of  Ceres SEQ ID NO 14301738 as cited in SEQ ID NO 61201
atcaccaatctcaactcagcgagctctccaccagttttacagccaagaaagaaccaaccatgatcagcaccaagaggatcgctcagctggccaagaagtggcagaggatggaagcgctcgggaggaagcgccgcctcgcctgggggacggcggcggcggcaaagaaagccgacaggtgctgcgcctccgtggcgagcaagggccactgcgcggtgtacacgactgacggggcacggttcgaggtgccattggcgtgcctcgggacggaagtcttcgccgagctcctgcacatgtccagagaggagttcggcttcgcgggcggccacggcaggatcttgctgccctgcgacgccatggtcatggagtacgccctgtgcttgctgcggaggggcgcctctgcggacctggagaaggcgttcctcagcaccatggcgatgtcgtgccactctgcagaccacgcggcggcgccatatgtggcggcttgctgttagtttgcagctgtataagtagtggcagagagttcatcactgtatatagtaggacaaagagaggtgttgttcagatcctgcgacccattaaggaaggtagcgattagcaagttagcgccagtgctcttgtttgagcagtgagcatattacagcttaatttcacgcccg

SEQ ID NO: 11488 - protein, 162 aa, Zea mays subsp. mays
  peptide (1)..(162): Ceres Seq. ID no. 12404695
HQSQLSELSTSFTAKKEPTMISTKRIAQLAKKWQRMEALGRKRRLAWGTAAAAKKADRCCASVASKGHCAVYTTDGARFEVPLACLGTEVFAELLHMSREEFGFAGGHGRILLPCDAMVMEYALCLLRRGASADLEKAFLSTMAMSCHSADHAAAPYVAACC

SEQ ID NO: 11489 - protein, 143 aa, Zea mays subsp. mays
  peptide (1)..(143): Ceres Seq. ID no. 12404696
MISTKRIAQLAKKWQRMEALGRKRRLAWGTAAAAKKADRCCASVASKGHCAVYTTDGARFEVPLACLGTEVFAELLHMSREEFGFAGGHGRILLPCDAMVMEYALCLLRRGASADLEKAFLSTMAMSCHSADHAAAPYVAACC

SEQ ID NO: 11490 - protein, 127 aa, Zea mays subsp. mays
  peptide (1)..(127): Ceres Seq. ID no. 12404697
MEALGRKRRLAWGTAAAAKKADRCCASVASKGHCAVYTTDGARFEVPLACLGTEVFAELLHMSREEFGFAGGHGRILLPCDAMVMEYALCLLRRGASADLEKAFLSTMAMSCHSADHAAAPYVAACC

SEQ ID NO: 11491 - DNA, 1493 bp, Zea mays subsp. mays
  misc_feature (1)..(1493): Ceres Seq. ID no. 12369010
  misc_feature (1)..(1493): Ortholog of  Ceres SEQ ID NO 12611971 as cited in SEQ ID NO 53205
  misc_feature (1)..(1493): Ortholog of  Ceres SEQ ID NO 12615976 as cited in SEQ ID NO 62440
gagatggtctaacgtgatgtcatagggtgattgtcttctgttctgtctggcagttttttttttttgagaatccgatgcgatcaaggctagaattgtttatcgctcgcgggcgggaagtgtggtgacgcgtctcgatccgcgcaccgcttgggcttctcgtaggagtagtggagtactgctcagcctgtcaccgtcagcgtatgttcttgttccagttcctatttttactccaagtccactagggatcctatccagattcgtggggacactctcttcgagttccaggcttccaaggtccaagggccgtagcatttgtctggttggattgggttgttccgcttgggtagccgggtgggatcggaatctgtgtggcacccatggcggcggtcgaggggacgaagaagaaggtaatcatcgacaccgaccccggaattgatgacgcgatggccatcttcttggcgctgcggtcgccggagctggaggtgctgggcctcaccactaccttcggcaacgtccacaccgccctcgccacgcgcaacgcgctccacctgctggaggctgttggcaggactgacatccccgtggcagagggatcccatctaacgatcaagaaagccaccaaattgaggatcgcaagcttcgtccacggttcagacggcctgggaaatcaggacttccctccaccagctaccaagcctgtaaatcagtctgctgctgccttcctggttgagcaggcaaatctgtaccctggtcaagttaccgttgtcgccctcggcccacttaccaaccttgctctggcagtcgagcttgatcctgcgttcccggagaagatagggcagattattattcttggcggtgcgtattcagttaatggaaacgtgaaccctgcagctgaggcgaacatcttcggggatcctgacgcggcagatatcgtgttcacctgcggtgctgatattttggccgtgggactaaatgtaacccaccaagtcgttctaaccgatgctgaccgggagaagcttgagcagtgtgacagcaaatacgcccgctacttgtgcaagctaatgggcgtttattttgattaccacagggacgcctacttcataaaaggagcgtatcttcacgatccaacgacggttattgctgcggtgaacccatcgctgctgacttacacagaaggcgttgtgagggtacagacggtcgggatcaccaagggccttactgttttcgacaacaccaagaaaaggtacggagagatcacggcctggagtggcatgcccaccgtgaaggtcgctgtcaccgtcgatgcccctgccgtggtagagctgatagtgcagaggctgatgaccgatgactagcaacaacgccaccagctgatccggttgggatcatcatgtggttatgtgcgtgcttggtgtttacgtacagtttatatatgcttgacacgtttgctgatgcttctgagagaacgtgattaaattaaattaaacttgatt

SEQ ID NO: 11492 - protein, 325 aa, Zea mays subsp. mays
  peptide (1)..(325): Ceres Seq. ID no. 12369011
MAAVEGTKKKVIIDTDPGIDDAMAIFLALRSPELEVLGLTTTFGNVHTALATRNALHLLEAVGRTDIPVAEGSHLTIKKATKLRIASFVHGSDGLGNQDFPPPATKPVNQSAAAFLVEQANLYPGQVTVVALGPLTNLALAVELDPAFPEKIGQIIILGGAYSVNGNVNPAAEANIFGDPDAADIVFTCGADILAVGLNVTHQVVLTDADREKLEQCDSKYARYLCKLMGVYFDYHRDAYFIKGAYLHDPTTVIAAVNPSLLTYTEGVVRVQTVGITKGLTVFDNTKKRYGEITAWSGMPTVKVAVTVDAPAVVELIVQRLMTDD

SEQ ID NO: 11493 - protein, 303 aa, Zea mays subsp. mays
  peptide (1)..(303): Ceres Seq. ID no. 12369012
MAIFLALRSPELEVLGLTTTFGNVHTALATRNALHLLEAVGRTDIPVAEGSHLTIKKATKLRIASFVHGSDGLGNQDFPPPATKPVNQSAAAFLVEQANLYPGQVTVVALGPLTNLALAVELDPAFPEKIGQIIILGGAYSVNGNVNPAAEANIFGDPDAADIVFTCGADILAVGLNVTHQVVLTDADREKLEQCDSKYARYLCKLMGVYFDYHRDAYFIKGAYLHDPTTVIAAVNPSLLTYTEGVVRVQTVGITKGLTVFDNTKKRYGEITAWSGMPTVKVAVTVDAPAVVELIVQRLMTDD

SEQ ID NO: 11494 - DNA, 1265 bp, Zea mays subsp. mays
  misc_feature (1)..(1265): Ceres Seq. ID no. 12374386
  misc_feature (1)..(1265): Ortholog of  Ceres SEQ ID NO 13623732 as cited in SEQ ID NO 0
gtctgccgagccgagtgttcctttctagccttcacttctcagcgcggcagccttcgatcccccgactgcagccgccagccgcaccatggagcaagccgccatgccgcaggttccccgcgtcaagctcggcatccaggggcttgaggtgtcgaagctggggttcgggtgcatggggctcacgggcacctacaacgcgccgctcggcgacgaggccgtcgccgccgtcgtcgcgcacgccttccgccgcgggatcaccttcttcgacacctccgatgcctacgggccccgcaccaacgagaccctcctggggaaggcgctcaagcagctgccgagggagcaggtgcaggtggccaccaagttcgggataggccagggcgccgctggcatgaccgtgtgcggcacgcccgagtacgtacgcgcctgctgcgaggccagcctgcgccgcctcgacgccggctacatcgacctctactaccagcaccgcgtcgacaccaccgtccccatcgaggatacgattggtgagctcaagaagttggtggaggaggggaaggtcaagtacatcggcttgtcagaggccagcccagacacaatccgccgtgcgcacgccgtgcatcccatcaccgccgtgcagatggagtggtcgctctggtcccgagacatcgagcccgagatcgtgccactctgcagagaattggggattggaattgtggcttacagtccaattggccgtggattttttggtggaagaggagtgacacagcaagtttcttctgaatctagtctgcaaaggcatccaagatttacaacagaaagcttggagaagaacaagcagatttacctgaaaatagaagatttggcgaagaagtaccagtgcagcccagctcagctagctctagcctgggttctgcatcaaggggatgatgtggttcctataccagggacaacaaaaacgaagaacctagatgccaacgttgactccttgaaggtgaagctcacagctgaggacctgaaggaaattggcagccagatacgtgcagaagatgtggctggtggaagacaatacaattcctatgcacatacctcctggaagtacgcagatacaccaaaaaagtgaagttctggtcctggaaaccttgtagcaatcacaggcgtatgcaaatgttgaactatttccctgcatttgagccggaatcgtacgatgatgcatcttgtgaacatgcggcactaataaatcgagacgaagaataatgtgttttccatcagtg

SEQ ID NO: 11495 - protein, 342 aa, Zea mays subsp. mays
  peptide (1)..(342): Ceres Seq. ID no. 12374387
MEQAAMPQVPRVKLGIQGLEVSKLGFGCMGLTGTYNAPLGDEAVAAVVAHAFRRGITFFDTSDAYGPRTNETLLGKALKQLPREQVQVATKFGIGQGAAGMTVCGTPEYVRACCEASLRRLDAGYIDLYYQHRVDTTVPIEDTIGELKKLVEEGKVKYIGLSEASPDTIRRAHAVHPITAVQMEWSLWSRDIEPEIVPLCRELGIGIVAYSPIGRGFFGGRGVTQQVSSESSLQRHPRFTTESLEKNKQIYLKIEDLAKKYQCSPAQLALAWVLHQGDDVVPIPGTTKTKNLDANVDSLKVKLTAEDLKEIGSQIRAEDVAGGRQYNSYAHTSWKYADTPKK

SEQ ID NO: 11496 - protein, 337 aa, Zea mays subsp. mays
  peptide (1)..(337): Ceres Seq. ID no. 12374388
MPQVPRVKLGIQGLEVSKLGFGCMGLTGTYNAPLGDEAVAAVVAHAFRRGITFFDTSDAYGPRTNETLLGKALKQLPREQVQVATKFGIGQGAAGMTVCGTPEYVRACCEASLRRLDAGYIDLYYQHRVDTTVPIEDTIGELKKLVEEGKVKYIGLSEASPDTIRRAHAVHPITAVQMEWSLWSRDIEPEIVPLCRELGIGIVAYSPIGRGFFGGRGVTQQVSSESSLQRHPRFTTESLEKNKQIYLKIEDLAKKYQCSPAQLALAWVLHQGDDVVPIPGTTKTKNLDANVDSLKVKLTAEDLKEIGSQIRAEDVAGGRQYNSYAHTSWKYADTPKK

SEQ ID NO: 11497 - protein, 314 aa, Zea mays subsp. mays
  peptide (1)..(314): Ceres Seq. ID no. 12374389
MGLTGTYNAPLGDEAVAAVVAHAFRRGITFFDTSDAYGPRTNETLLGKALKQLPREQVQVATKFGIGQGAAGMTVCGTPEYVRACCEASLRRLDAGYIDLYYQHRVDTTVPIEDTIGELKKLVEEGKVKYIGLSEASPDTIRRAHAVHPITAVQMEWSLWSRDIEPEIVPLCRELGIGIVAYSPIGRGFFGGRGVTQQVSSESSLQRHPRFTTESLEKNKQIYLKIEDLAKKYQCSPAQLALAWVLHQGDDVVPIPGTTKTKNLDANVDSLKVKLTAEDLKEIGSQIRAEDVAGGRQYNSYAHTSWKYADTPKK

SEQ ID NO: 11498 - DNA, 1754 bp, Zea mays subsp. mays
  misc_feature (1)..(1754): Ceres Seq. ID no. 12412767
  misc_feature (1)..(1754): Ortholog of  Ceres SEQ ID NO 14310452 as cited in SEQ ID NO 54426
  misc_feature (1)..(1754): Ortholog of  Ceres SEQ ID NO 15174626 as cited in SEQ ID NO 59393
  misc_feature (1)..(1754): Ortholog of  Ceres SEQ ID NO 15169663 as cited in SEQ ID NO 64659
  misc_feature (1)..(1754): Ortholog of  Ceres SEQ ID NO 13656177 as cited in SEQ ID NO 64997
  misc_feature (1)..(1754): Ortholog of  Ceres SEQ ID NO 15225015 as cited in SEQ ID NO 0
gttggtaatactgtacaaattttcgtctagttgcgtgctctcgctagggttccgccccgccggcatacccgaccataaaccccgcgccgcccgccagcaaccttcagtctcatttctcacgcgtagctcggacaggcagcttgaagctcgcgaaccagccatggcgaatggggacgcggccgtggaggtcggcgggaacggggagcaggaagccgcggcgcgccaggcgtcgacgttcgcggagctgggtatctgcgcggagctggtggaggcgtgcgacgccatggggtggaaggagcccaccaggatccaggccgaggccatcccccacgcgctccaagggaaggacctgatcgctctggcgcagacggggtccgggaagacgggcgcgttcgcgctgcccatcctgcaggagctgctcagcaaccgccaggctgaacagtctttcttcgcttgcgtgctctcgccaacaagagagctggcgattcagatcgcagagcagtttgaggcccttggatcagctattggtttgcgttgctcagtgcttgttggaggagtggatcgggtgcagcaagtgttatccatcggaaaacgtccacatattgtagttggaactcctggccgtcttttggaccatttgacagagactaaaggttttagccttaagaaaatcaagtatttggtattggatgaagctgataaattacttaatgtggagtttgagaaatcccttgatgacattctaagcgagatgcctaaagacaggaggactttccttttttcagcgactatgaccaaaaaggtaaataaactgcaacgtgcttgtctcaggaatcctgctaaggttgaagtgtcctccaaatattctacagtagattcacttaaacaagagttctattttgttcctgcagatgacaaggattgctatcttcttcatgttctgaacgagaggctggagagcatgatcatgatctttgtgcgcacctgtgaatctactagactccttgctcttatgttgaggaatcttggtttgaaagctatgtctatcagtggccagatgagtcaggacaagagattaggtgctttgaacagattcaaagcgaaagattgcaatatccttatttgcactgatgtagcaagtcgcggcctcgacattcaaggagttgatatggtcatcaactatgatattccaatcaattctaaggattatgttcatcgggtgggcaggactgcacgtgcagggcgatcaggatacgctgtatctttggtgaaccaatatgaagcccagtggttcgtgctgatcgagcagctccttggcaagaaaattgaccagtgtaaggtggacagagatgaagtccttatacttaaagggcccatatccgatgcaaagagaattgcgctgacgaaattgaaggattccggtggccacaagaagcggagaaatgtgggagatgacgatgaagaggttgaagatcattcttctcattctagaagaccgaaatccttgaagagatcaaacagacgatgaaggctctggagcatgtctggactgcctcgtttcgtgcaagtcctttgtggttcagcgcagatccaccctgtggtggtttggagtgatgctttgcctatttatactagggccagttaagacgttcacttgacaccattccttgggttgaaagcaagtctcccccaattttgtcatcccgacccaaaccatgcttacataaggaatcattttttgctgatggctgccg

SEQ ID NO: 11499 - protein, 508 aa, Zea mays subsp. mays
  peptide (1)..(508): Ceres Seq. ID no. 12412768
LVILYKFSSSCVLSLGFRPAGIPDHKPRAARQQPSVSFLTRSSDRQLEAREPAMANGDAAVEVGGNGEQEAAARQASTFAELGICAELVEACDAMGWKEPTRIQAEAIPHALQGKDLIALAQTGSGKTGAFALPILQELLSNRQAEQSFFACVLSPTRELAIQIAEQFEALGSAIGLRCSVLVGGVDRVQQVLSIGKRPHIVVGTPGRLLDHLTETKGFSLKKIKYLVLDEADKLLNVEFEKSLDDILSEMPKDRRTFLFSATMTKKVNKLQRACLRNPAKVEVSSKYSTVDSLKQEFYFVPADDKDCYLLHVLNERLESMIMIFVRTCESTRLLALMLRNLGLKAMSISGQMSQDKRLGALNRFKAKDCNILICTDVASRGLDIQGVDMVINYDIPINSKDYVHRVGRTARAGRSGYAVSLVNQYEAQWFVLIEQLLGKKIDQCKVDRDEVLILKGPISDAKRIALTKLKDSGGHKKRRNVGDDDEEVEDHSSHSRRPKSLKRSNRR

SEQ ID NO: 11500 - protein, 455 aa, Zea mays subsp. mays
  peptide (1)..(455): Ceres Seq. ID no. 12412769
MANGDAAVEVGGNGEQEAAARQASTFAELGICAELVEACDAMGWKEPTRIQAEAIPHALQGKDLIALAQTGSGKTGAFALPILQELLSNRQAEQSFFACVLSPTRELAIQIAEQFEALGSAIGLRCSVLVGGVDRVQQVLSIGKRPHIVVGTPGRLLDHLTETKGFSLKKIKYLVLDEADKLLNVEFEKSLDDILSEMPKDRRTFLFSATMTKKVNKLQRACLRNPAKVEVSSKYSTVDSLKQEFYFVPADDKDCYLLHVLNERLESMIMIFVRTCESTRLLALMLRNLGLKAMSISGQMSQDKRLGALNRFKAKDCNILICTDVASRGLDIQGVDMVINYDIPINSKDYVHRVGRTARAGRSGYAVSLVNQYEAQWFVLIEQLLGKKIDQCKVDRDEVLILKGPISDAKRIALTKLKDSGGHKKRRNVGDDDEEVEDHSSHSRRPKSLKRSNRR

SEQ ID NO: 11501 - protein, 414 aa, Zea mays subsp. mays
  peptide (1)..(414): Ceres Seq. ID no. 12412770
MGWKEPTRIQAEAIPHALQGKDLIALAQTGSGKTGAFALPILQELLSNRQAEQSFFACVLSPTRELAIQIAEQFEALGSAIGLRCSVLVGGVDRVQQVLSIGKRPHIVVGTPGRLLDHLTETKGFSLKKIKYLVLDEADKLLNVEFEKSLDDILSEMPKDRRTFLFSATMTKKVNKLQRACLRNPAKVEVSSKYSTVDSLKQEFYFVPADDKDCYLLHVLNERLESMIMIFVRTCESTRLLALMLRNLGLKAMSISGQMSQDKRLGALNRFKAKDCNILICTDVASRGLDIQGVDMVINYDIPINSKDYVHRVGRTARAGRSGYAVSLVNQYEAQWFVLIEQLLGKKIDQCKVDRDEVLILKGPISDAKRIALTKLKDSGGHKKRRNVGDDDEEVEDHSSHSRRPKSLKRSNRR

SEQ ID NO: 11502 - DNA, 1458 bp, Zea mays subsp. mays
  misc_feature (1)..(1458): Ceres Seq. ID no. 12373464
  misc_feature (1)..(1458): Ortholog of  Ceres SEQ ID NO 12364737 as cited in SEQ ID NO 51089
  misc_feature (1)..(1458): Ortholog of  Ceres SEQ ID NO 14311515 as cited in SEQ ID NO 51680
  misc_feature (1)..(1458): Ortholog of  Ceres SEQ ID NO 14316263 as cited in SEQ ID NO 55294
  misc_feature (1)..(1458): Ortholog of  Ceres SEQ ID NO 13582301 as cited in SEQ ID NO 56509
  misc_feature (1)..(1458): Ortholog of  Ceres SEQ ID NO 13595567 as cited in SEQ ID NO 56760
  misc_feature (1)..(1458): Ortholog of  Ceres SEQ ID NO 14315035 as cited in SEQ ID NO 56880
  misc_feature (1)..(1458): Ortholog of  Ceres SEQ ID NO 13594276 as cited in SEQ ID NO 57728
  misc_feature (1)..(1458): Ortholog of  Ceres SEQ ID NO 13594147 as cited in SEQ ID NO 58975
  misc_feature (1)..(1458): Ortholog of  Ceres SEQ ID NO 15176751 as cited in SEQ ID NO 59719
  misc_feature (1)..(1458): Ortholog of  Ceres SEQ ID NO 13655302 as cited in SEQ ID NO 63307
  misc_feature (1)..(1458): Ortholog of  Ceres SEQ ID NO 13597380 as cited in SEQ ID NO 64054
  misc_feature (1)..(1458): Ortholog of  Ceres SEQ ID NO 12625474 as cited in SEQ ID NO 64169
  misc_feature (1)..(1458): Ortholog of  Ceres SEQ ID NO 13597502 as cited in SEQ ID NO 64681
aggagtagtagcaaccaagctaccctatctataagtactacggctcgaatgtgtcggccgacggcaatcaccattacatttgatccgccgcgcgcggcccgatcgacgagcgagagcctcattcacaccccgatctagctagctagctagtttacgaaaaaaaaatctggccacagggatgcggtggcggctgcagccggcgccggcgccgacgctgctcctcgtcctgctggtggccaccgtcgccgccgtcgtcgtggtggtgcgggcggagccccaggtgccgtgctacttcgtgttcggggactcgctcgtggacaacggcaacaacaacgacatcgcgtcgctggcgcgggccaactacccgccctacggcatcgacttcgccgccggccccaccggccgtttcagcaatggcctcaccaccgtcgacgctatatctcggcttctgggcttcgacgattacatccccgcgtacgctggcgcgagcggcgatcagctcctcaccggcgtcaacttcgcttccgccgcagccgggatccgtgacgagaccggccagcaactggggcaacggatcagcttcggcgggcagctccagaactaccaggcggcggtgcagcagctggtgagcatcctgggcgacgaggactccgcggccagccacctgagccagtgcatcttcacggtgggcatgggcagcaacgactacctcaacaactacttcatgccggcggtctactccaccagccagcagtacacgccggagcagtacgccgacgtgctcatcaaccagtactcgcagcagctccggaccctgtacagctacggggccaggaaggtggcgctcatgggcgtggggcaggtcgggtgcagccccaacgagctggcgcagcgcagcaccgacggcaccacctgcgtgccgcagatcaacggcgccatcgacatcttcaaccggaagctcgtcgccctcgtcgaccagttcaacgcgctgccgggggcgcacttcacctacataaacgtgtatgggatcttccaggacatcctgagagccccagggtcgcacggtctgacggtgacgaaccaagggtgctgcggcgtcggacggaataacgggcaggtgacgtgcttgccgttccagacgccgtgcgccaacaggaacgagtacctcttctgggacgctttccaccccacggaggcggccaacatcctcgtcggtcggagggcgtacagcgcggcgctgccgtccgacgtccaccccatggatctgcgcacgctcgccaggatctagctgtatggatcatgtgaactcgtgaagagaagcaaagcttacagcgtcttccttttttttgttctttgtttcccctcgtgattgtattgcttaccactcgcaaagggacgtatggtccctccatctaaactatatatataaacatgatatatactccctcgctcccgccc

SEQ ID NO: 11503 - protein, 369 aa, Zea mays subsp. mays
  peptide (1)..(369): Ceres Seq. ID no. 12373465
MRWRLQPAPAPTLLLVLLVATVAAVVVVVRAEPQVPCYFVFGDSLVDNGNNNDIASLARANYPPYGIDFAAGPTGRFSNGLTTVDAISRLLGFDDYIPAYAGASGDQLLTGVNFASAAAGIRDETGQQLGQRISFGGQLQNYQAAVQQLVSILGDEDSAASHLSQCIFTVGMGSNDYLNNYFMPAVYSTSQQYTPEQYADVLINQYSQQLRTLYSYGARKVALMGVGQVGCSPNELAQRSTDGTTCVPQINGAIDIFNRKLVALVDQFNALPGAHFTYINVYGIFQDILRAPGSHGLTVTNQGCCGVGRNNGQVTCLPFQTPCANRNEYLFWDAFHPTEAANILVGRRAYSAALPSDVHPMDLRTLARI

SEQ ID NO: 11504 - protein, 198 aa, Zea mays subsp. mays
  peptide (1)..(198): Ceres Seq. ID no. 12373466
MGSNDYLNNYFMPAVYSTSQQYTPEQYADVLINQYSQQLRTLYSYGARKVALMGVGQVGCSPNELAQRSTDGTTCVPQINGAIDIFNRKLVALVDQFNALPGAHFTYINVYGIFQDILRAPGSHGLTVTNQGCCGVGRNNGQVTCLPFQTPCANRNEYLFWDAFHPTEAANILVGRRAYSAALPSDVHPMDLRTLARI

SEQ ID NO: 11505 - protein, 187 aa, Zea mays subsp. mays
  peptide (1)..(187): Ceres Seq. ID no. 12373467
MPAVYSTSQQYTPEQYADVLINQYSQQLRTLYSYGARKVALMGVGQVGCSPNELAQRSTDGTTCVPQINGAIDIFNRKLVALVDQFNALPGAHFTYINVYGIFQDILRAPGSHGLTVTNQGCCGVGRNNGQVTCLPFQTPCANRNEYLFWDAFHPTEAANILVGRRAYSAALPSDVHPMDLRTLARI

SEQ ID NO: 11506 - DNA, 1563 bp, Zea mays subsp. mays
  misc_feature (1)..(1563): Ceres Seq. ID no. 12351717
  misc_feature (1)..(1563): Ortholog of  Ceres SEQ ID NO 14315275 as cited in SEQ ID NO 52556
  misc_feature (1)..(1563): Ortholog of  Ceres SEQ ID NO 14303351 as cited in SEQ ID NO 54864
  misc_feature (1)..(1563): Ortholog of  Ceres SEQ ID NO 13597260 as cited in SEQ ID NO 63885
  misc_feature (1)..(1563): Ortholog of  Ceres SEQ ID NO 15180208 as cited in SEQ ID NO 0
actcccccgcctcgccgccagtcagattcaccaccggctcccctgcacaaccgcgtccgcgctgcaccaccaccgttcatcgaggaggaggggggacggagaccacggacatggagagatctcaacggcagtctcctccgccaccgtcgccgtcctcctcctcgtcctccgtctccgcggacaccgtcctcgtccctcccggaaagaggcggagggcggcgacggccaaggccggcgccgagcctaataagaggatccgcaaggaccccgccgccgccgccgcggggaagaggagctccgtctacaggggagtcaccaggcacaggtggacgggcaggttcgaggcgcatctctgggacaagcactgcctcgccgcgctccacaacaagaagaaaggcaggcaagtctacctgggggcgtatgacagcgaggaggcagctgctcgtgcctatgacctcgcagctctcaagtactggggtcctgagactctgctcaacttccctgtggaggattactccagcgagatgccggagatggaggccgtttcccgggaggagtacctggcctccctccgccgcaggagcagcggcttctccaggggcgtctccaagtacagaggcgtcgccaggcatcaccacaacgggaggtgggaggcacggattgggcgagtctttgggaacaagtacctctacttgggaacatttgacactcaagaagaggcagccaaggcctatgaccttgcggccattgaataccgtggcgtcaatgctgtaaccaacttcgacatcagctgctacctggaccacccgctgttcctggcacagctccaacaggagccacaggtggtgccggcactcaaccaagaacctcaacctgatcagagcgaaaccggaactacagagcaagagccggagtcaagcgaagccaagacaccggatggcagtgcagaacccgatgagaacgcggtgcctgacgacaccgcggagcccctcagcacagtcgacgacagcatcgaagagggcttatggagcccttgcatggattacgagctagacaccatgtcgagaccaaactttggcagctcaatcaatctgagcgagtggttcgctgacgcagacttcgactgcaacatcgggtgcctgttcgatgggtgttctgcggctgacgaaggaagcaaggatggtgtaggtctggcagatttcagtctgtttgaggcaggtgatgtccagctgaaggatgttctttcggatatggaagaggggatacaacctccagcgatgatcagtgtgtgcaactaattctggaacccgaggaggttttcgctttccaggtgtcctgtcttgggtaatccttgatctgtctaatgccacagtgccactgcaccagagcagctgagaactttcttgtagaaagcccatggcagtttggcgttagacaagtgtgtcgatgttctttaattctttgaatttgcccctaggctgcttggctaacgttaagggtttgtcattgtctcacttagcctagattcaactaatcacatcctgaatctgaagtggttgtgct

SEQ ID NO: 11507 - protein, 431 aa, Zea mays subsp. mays
  peptide (1)..(431): Ceres Seq. ID no. 12351718
SPASPPVRFTTGSPAQPRPRCTTTVHRGGGGTETTDMERSQRQSPPPPSPSSSSSSVSADTVLVPPGKRRRAATAKAGAEPNKRIRKDPAAAAAGKRSSVYRGVTRHRWTGRFEAHLWDKHCLAALHNKKKGRQVYLGAYDSEEAAARAYDLAALKYWGPETLLNFPVEDYSSEMPEMEAVSREEYLASLRRRSSGFSRGVSKYRGVARHHHNGRWEARIGRVFGNKYLYLGTFDTQEEAAKAYDLAAIEYRGVNAVTNFDISCYLDHPLFLAQLQQEPQVVPALNQEPQPDQSETGTTEQEPESSEAKTPDGSAEPDENAVPDDTAEPLSTVDDSIEEGLWSPCMDYELDTMSRPNFGSSINLSEWFADADFDCNIGCLFDGCSAADEGSKDGVGLADFSLFEAGDVQLKDVLSDMEEGIQPPAMISVCN

SEQ ID NO: 11508 - protein, 395 aa, Zea mays subsp. mays
  peptide (1)..(395): Ceres Seq. ID no. 12351719
MERSQRQSPPPPSPSSSSSSVSADTVLVPPGKRRRAATAKAGAEPNKRIRKDPAAAAAGKRSSVYRGVTRHRWTGRFEAHLWDKHCLAALHNKKKGRQVYLGAYDSEEAAARAYDLAALKYWGPETLLNFPVEDYSSEMPEMEAVSREEYLASLRRRSSGFSRGVSKYRGVARHHHNGRWEARIGRVFGNKYLYLGTFDTQEEAAKAYDLAAIEYRGVNAVTNFDISCYLDHPLFLAQLQQEPQVVPALNQEPQPDQSETGTTEQEPESSEAKTPDGSAEPDENAVPDDTAEPLSTVDDSIEEGLWSPCMDYELDTMSRPNFGSSINLSEWFADADFDCNIGCLFDGCSAADEGSKDGVGLADFSLFEAGDVQLKDVLSDMEEGIQPPAMISVCN

SEQ ID NO: 11509 - protein, 257 aa, Zea mays subsp. mays
  peptide (1)..(257): Ceres Seq. ID no. 12351720
MPEMEAVSREEYLASLRRRSSGFSRGVSKYRGVARHHHNGRWEARIGRVFGNKYLYLGTFDTQEEAAKAYDLAAIEYRGVNAVTNFDISCYLDHPLFLAQLQQEPQVVPALNQEPQPDQSETGTTEQEPESSEAKTPDGSAEPDENAVPDDTAEPLSTVDDSIEEGLWSPCMDYELDTMSRPNFGSSINLSEWFADADFDCNIGCLFDGCSAADEGSKDGVGLADFSLFEAGDVQLKDVLSDMEEGIQPPAMISVCN

SEQ ID NO: 11510 - DNA, 1213 bp, Zea mays subsp. mays
  misc_feature (1)..(1213): Ceres Seq. ID no. 12348756
  misc_feature (1)..(1213): Ortholog of  Ceres SEQ ID NO 13594248 as cited in SEQ ID NO 57340
gattggttgctgttgcttcctgctttcgcttcgccttcacccgttcgccgtgcggccgagctctctagttccgccgctcgctagtcgccttcctcccaaatggcgaccgccatgcggggcagcagcctcctgcggttcggtttccgccatccttcctgcctcctgttccagtcccctcggtgtcctgccccgagcctgggtctgaacctggccgttggccgcaccgggcttatacgcctccgatgctcggcggccggggccggcgacgccggtggaaagaaggtgtcggctcggctggctctgacgcagcaggtgctgcggaacgccgaggagcgcgccgcgtcggcgggttcggaccctgcccccaagatcaccctggatcatgttactgttaattttgcaagaagtggtggtcctggtggtcagaatgttaacaaagttaacacaaaggttgacatgcgattcaatgttaaggaagctcactggcttggggagagaatcaaggaacggatattacaagcggagaagaataggataaataaagatggagagcttgttatatcttctacaaaaactagaacacagaagggcaatattgaagatgcattgcagaaaatacaggcaatcattgatgctgcatcatatgttcctccacccccaacagaagaccaaaagaaaaagattgaaaaaattgctgcagttgctgaaaggaagagacttcagaataagaaggtgctttcacagaagaaggaatttagacggaacagaactagctgggattgatgcaaggtatcttgcacagacccgtctttctgttttgtgccattccgcggtgggcattggcaatagtttagagggcttgttctcggggtagcaaaagcattcggctgatccttacagcagtggtgtacagagaccgacgaaaaacaagggtcagacttgctgaaggcatcttggtgaagaagatatagctaagtttcgtaggcatctccagtttttgtttcgtctattagtagggatggattcggatcggatactcatggaaacagatccgaacgtcactatttaccatattttaatccgaatacgaatactatcggatacgaatacaaaacggatagttcgaattcggatttacattcgaatacttacttgatttggaacatagcatcataacaagtattaatttgttttatcgatggatttatagttg

SEQ ID NO: 11511 - protein, 227 aa, Zea mays subsp. mays
  peptide (1)..(227): Ceres Seq. ID no. 12348757
MATAMRGSSLLRFGFRHPSCLLFQSPRCPAPSLGLNLAVGRTGLIRLRCSAAGAGDAGGKKVSARLALTQQVLRNAEERAASAGSDPAPKITLDHVTVNFARSGGPGGQNVNKVNTKVDMRFNVKEAHWLGERIKERILQAEKNRINKDGELVISSTKTRTQKGNIEDALQKIQAIIDAASYVPPPPTEDQKKKIEKIAAVAERKRLQNKKVLSQKKEFRRNRTSWD

SEQ ID NO: 11512 - protein, 223 aa, Zea mays subsp. mays
  peptide (1)..(223): Ceres Seq. ID no. 12348758
MRGSSLLRFGFRHPSCLLFQSPRCPAPSLGLNLAVGRTGLIRLRCSAAGAGDAGGKKVSARLALTQQVLRNAEERAASAGSDPAPKITLDHVTVNFARSGGPGGQNVNKVNTKVDMRFNVKEAHWLGERIKERILQAEKNRINKDGELVISSTKTRTQKGNIEDALQKIQAIIDAASYVPPPPTEDQKKKIEKIAAVAERKRLQNKKVLSQKKEFRRNRTSWD

SEQ ID NO: 11513 - DNA, 1477 bp, Zea mays subsp. mays
  misc_feature (1)..(1477): Ceres Seq. ID no. 12374112
  misc_feature (1)..(1477): Ortholog of  Ceres SEQ ID NO 12474685 as cited in SEQ ID NO 88
  misc_feature (1)..(1477): Ortholog of  Ceres SEQ ID NO 13638574 as cited in SEQ ID NO 51223
  misc_feature (1)..(1477): Ortholog of  Ceres SEQ ID NO 14311531 as cited in SEQ ID NO 51466
  misc_feature (1)..(1477): Ortholog of  Ceres SEQ ID NO 15170465 as cited in SEQ ID NO 52798
  misc_feature (1)..(1477): Ortholog of  Ceres SEQ ID NO 15177112 as cited in SEQ ID NO 55956
  misc_feature (1)..(1477): Ortholog of  Ceres SEQ ID NO 12610790 as cited in SEQ ID NO 56123
  misc_feature (1)..(1477): Ortholog of  Ceres SEQ ID NO 14315399 as cited in SEQ ID NO 57112
  misc_feature (1)..(1477): Ortholog of  Ceres SEQ ID NO 13655636 as cited in SEQ ID NO 63519
  misc_feature (1)..(1477): Ortholog of  Ceres SEQ ID NO 13655896 as cited in SEQ ID NO 64970
aagccacttggcgcacgcgctgacgcgcacccgcaccagcctctagtcggccagtcgggacgaagcctctcgaacgagcgaggccacgaggtgcccgccgcgcccagccggcctcgccgaccgggcccgccggcccctatataggcaggcgccacttcctcctcgcaaccaccagacgccagtccaccaccgcttcccgtgcagcgccctccctctacgttcccccatttcctgtgttggcggcgatggcgcggcacttcgtgctcaacaccggcgccaagatcccctccgtggggctcggcacctggcagtctgaccccggcgtcgttggcaacgctgtctacgccgccgtcaaggcgggttaccgacatatcgattgtgccagagtttacggcaacgaaaaggagattggtttggcgctgaagaagctatttgaagagggtgtagtgaagcgagaagatctgtttatcacctctaagctatggaatgatcatcatgctcctgaagatgtgcctgaggcactaaatgacagcctgaatgatttgcagcttgagtacctggatctttatcttatccattggccatttagagtcaagaagggaacaaataccagccctgaaaattttgttacacctgacttccctgctacttggggggcaatggaaaagttatatgatgctggcaaagctcgcgctattggtgtgagtaacttctcctcaaagaaattgggtgacttgcttgctgtagctcgtgtacctccagctgttgatcaggtggaatgtcatcctggttggcagcaaactaagctccatagcttttgtcagtcaactggtgttcatctaactgcttactcaccactaggttcacctggtacaacttggatgaatggtaatgtccttaaagaaccaataatcatctcaatagctgagaaactcgggaaaacttctgcacaagtggctctgcgctggaacattcagatgggtcacagtgttcttccaaagagcacgaatgaagaaaggataaagcaaaaccttgatgtttatgattggtcaattccagatgacttgcttgcaaagttctctgagattaagcaggctaggctacttagaggcaacttcattgtgaatccagagagcgtttacaagacccatgaggagctctgggatggtgaactttaggaaggacgccgttgtccgtcctgactcctgagcagggagcaagcagcgttccattagggcccgtcagatcatttcacctccaaagttgctcttttgaaatgaaggttcagtgctcggaagctctggtgccatcctgtatcacgaactattgagaaatttatcggtgattttactttgtgctacgggatgtgctgctgcagtctatcctagtgtcagttgatttttctggtaaaactgtgaccaaataagttaattcgccaggcatcattactattggaatttcatcgttttatctccgc

SEQ ID NO: 11514 - protein, 310 aa, Zea mays subsp. mays
  peptide (1)..(310): Ceres Seq. ID no. 12374113
MARHFVLNTGAKIPSVGLGTWQSDPGVVGNAVYAAVKAGYRHIDCARVYGNEKEIGLALKKLFEEGVVKREDLFITSKLWNDHHAPEDVPEALNDSLNDLQLEYLDLYLIHWPFRVKKGTNTSPENFVTPDFPATWGAMEKLYDAGKARAIGVSNFSSKKLGDLLAVARVPPAVDQVECHPGWQQTKLHSFCQSTGVHLTAYSPLGSPGTTWMNGNVLKEPIIISIAEKLGKTSAQVALRWNIQMGHSVLPKSTNEERIKQNLDVYDWSIPDDLLAKFSEIKQARLLRGNFIVNPESVYKTHEELWDGEL

SEQ ID NO: 11515 - protein, 172 aa, Zea mays subsp. mays
  peptide (1)..(172): Ceres Seq. ID no. 12374114
MEKLYDAGKARAIGVSNFSSKKLGDLLAVARVPPAVDQVECHPGWQQTKLHSFCQSTGVHLTAYSPLGSPGTTWMNGNVLKEPIIISIAEKLGKTSAQVALRWNIQMGHSVLPKSTNEERIKQNLDVYDWSIPDDLLAKFSEIKQARLLRGNFIVNPESVYKTHEELWDGEL

SEQ ID NO: 11516 - DNA, 1112 bp, Zea mays subsp. mays
  misc_feature (1)..(1112): Ceres Seq. ID no. 12413854
  misc_feature (1)..(1112): Ortholog of  Ceres SEQ ID NO 14303993 as cited in SEQ ID NO 53511
atcgaatccttatcgttttctgtttttgttttgcccatttttttcgctggcgatttatgccatcacatctggcgctgctgtcgtgcctgctggtactgctcctctctttcgacaagttcctcttccactacctgaagcgccgctggttctccggcggcagcggcgccaccgtcccaagggcccccgccaaatcgaggcggaacatggcggccgccaagtggagcgagacggccatgctcgttatcgacatgcagaaggacttcgtggacccggcgatgcgcagtccgatgctggtagccggtggcgaggccgtcgtccctgccgttgccggggccgtcgccgtcgcaatggagcgcggcattttcgtcgtctgggttgtcagagagcatgacccttctggaagagatgttgaacttttccgtaggcaccattattctgggggaaagggtccaacagtgaaaggtctgaaaggagcggagctggctgatgggcttgttatcaaagaaggggaatacaagttggtgaagactagatttagtgctttcttcgcaacacatcttgattctgtcctgaaaactgcaggaataaagaacttggttattgttggagttcagacaccaaattgcattcggcagactgtgttcgatgctatagcactggactatgagaaagttacggttctaattgacgcaacagctgctgcaagaccagaaatccatttgtccaatatcagggatatgaagaacatcggagtggacacgccaaccctggaagaatggcgccgctagggttactctgtctcttggcagcaacagcaaacggagatgacctgttgtatgagatgcatgcagcacctccctgcatctacttctttgcttctaatctgcgtctgactgcgcgtacgttgttgtattgttatacccagtgcggtagaacaattgcagatggtggtatatggtatatgcaaacttgtaatccctcatatgtagagttcagttcaccataccatgtgatgtgcttgctttcacgtcgcagcagatggcactcaatccactccacatgccttgttatcttctttcttcatgagtcggcaaatgatgcctaaactgttg

SEQ ID NO: 11517 - protein, 261 aa, Zea mays subsp. mays
  peptide (1)..(261): Ceres Seq. ID no. 12413855
RILIVFCFCFAHFFRWRFMPSHLALLSCLLVLLLSFDKFLFHYLKRRWFSGGSGATVPRAPAKSRRNMAAAKWSETAMLVIDMQKDFVDPAMRSPMLVAGGEAVVPAVAGAVAVAMERGIFVVWVVREHDPSGRDVELFRRHHYSGGKGPTVKGLKGAELADGLVIKEGEYKLVKTRFSAFFATHLDSVLKTAGIKNLVIVGVQTPNCIRQTVFDAIALDYEKVTVLIDATAAARPEIHLSNIRDMKNIGVDTPTLEEWRR

SEQ ID NO: 11518 - protein, 243 aa, Zea mays subsp. mays
  peptide (1)..(243): Ceres Seq. ID no. 12413856
MPSHLALLSCLLVLLLSFDKFLFHYLKRRWFSGGSGATVPRAPAKSRRNMAAAKWSETAMLVIDMQKDFVDPAMRSPMLVAGGEAVVPAVAGAVAVAMERGIFVVWVVREHDPSGRDVELFRRHHYSGGKGPTVKGLKGAELADGLVIKEGEYKLVKTRFSAFFATHLDSVLKTAGIKNLVIVGVQTPNCIRQTVFDAIALDYEKVTVLIDATAAARPEIHLSNIRDMKNIGVDTPTLEEWRR

SEQ ID NO: 11519 - protein, 194 aa, Zea mays subsp. mays
  peptide (1)..(194): Ceres Seq. ID no. 12413857
MAAAKWSETAMLVIDMQKDFVDPAMRSPMLVAGGEAVVPAVAGAVAVAMERGIFVVWVVREHDPSGRDVELFRRHHYSGGKGPTVKGLKGAELADGLVIKEGEYKLVKTRFSAFFATHLDSVLKTAGIKNLVIVGVQTPNCIRQTVFDAIALDYEKVTVLIDATAAARPEIHLSNIRDMKNIGVDTPTLEEWRR

SEQ ID NO: 11520 - DNA, 1745 bp, Zea mays subsp. mays
  misc_feature (1)..(1745): Ceres Seq. ID no. 12348768
  misc_feature (1)..(1745): Ortholog of  Ceres SEQ ID NO 14308851 as cited in SEQ ID NO 55618
acgctcgcagcaccggccgttttctacgggcggtgcagtggacgggagtagtaccctttctttctcttcgaagaaaatgcggcggcgtgtggtataaaccccgcccgtcacgccgggccgtccgtgcgtttccttttgtcttcgcttgcttcctttcgaaagtccttgcgtcacactcgccgatcgatcgagtctctccggattacagagaggcccaactgccgaagccatcgatcgccgccacctcttcgagcagaatagttgagaatggctgacgaggatatccagcctatcgtatgtgacaatggcactggaatggtcaaggccggtttcgctggtgatgatgcgccaagagctgtcttccccagcattgtgggaagaccacgccacaccggtgtcatggtcggcatgggccaaaaggatgcctacgtaggtgatgaggctcaggccaagagaggcatcctgacactgaagtacccgattgagcatggcattgtcaacaactgggatgacatggagaaaatctggcatcacaccttctacaacgagctccgtgtttcgcctgaagatcaccctgtgctgctgaccgaggcccctctcaaccccaaggccaacagagaaaaaatgacgcagattatgtttgaaaccttcgaatgcccagcaatttatgttgctatccaggctgttctttcgttgtacgctagtgggcgaacaactggtattgtgatggattccggtgatggtgtgagccacacggttccaatctatgaaggatacacacttcctcatgctattctccgtttggatcttgcggggcgtgacctcaccgaccacctaatgaagatcctcacagagagagggtactccctcactacgagcgctgagcgggagattgtcagggacataaaggagaagcttgcctacgttgcccttgattatgaacaggagctggagactgccaggagcagctcctctgtcgagaagagctacgagatgcctgatggtcaggtcatcaccattgggtcagaaaggtttaggtgccccgaggtgctgttccaaccatcccttgttggcatggaatcgcctggcgtccatgaggccacgtacaactccatcatgaagtgtgatgttgatatcaggaaggatttgtatggtaacgttgtcctcagtgggggatctaccatgttccctgggattgccgatcgtatgagcaaggagatcacgtccctggctcctagcagcatgaaggttaaagtgattgcgccacctgaaaggaagtacagtgtctggatcggtggctctattttggcttctctcagcacttttcagcagatgtggatctccaagggagagtatgacgaaactggtccgggcattgtccacatgaagtgcttctaagtttttttgggaaatttttccaaaaaaaaagaagtttctggggaagttcgacatggtacgtcaggcgttaccggctcattgtgaaccaatacatgaactgccatgataaggttataagcagaaataacagtagcactggctccaattcctgaagatgagtctggtgctccctgctgtatgaaatggatcccactcgtatattcgtcaccgcgccgcactggtgtaacgtgttgcctcagagtttgcttttagctggttccttttttaaaaataagtactgtttttggttggctaccagtcattttgaacttcagtagcaaattatcttatttaatgcttgctttttc

SEQ ID NO: 11521 - protein, 376 aa, Zea mays subsp. mays
  peptide (1)..(376): Ceres Seq. ID no. 12348769
MADEDIQPIVCDNGTGMVKAGFAGDDAPRAVFPSIVGRPRHTGVMVGMGQKDAYVGDEAQAKRGILTLKYPIEHGIVNNWDDMEKIWHHTFYNELRVSPEDHPVLLTEAPLNPKANREKMTQIMFETFECPAIYVAIQAVLSLYASGRTTGIVMDSGDGVSHTVPIYEGYTLPHAILRLDLAGRDLTDHLMKILTERGYSLTTSAEREIVRDIKEKLAYVALDYEQELETARSSSSVEKSYEMPDGQVITIGSERFRCPEVLFQPSLVGMESPGVHEATYNSIMKCDVDIRKDLYGNVVLSGGSTMFPGIADRMSKEITSLAPSSMKVKVIAPPERKYSVWIGGSILASLSTFQQMWISKGEYDETGPGIVHMKCF

SEQ ID NO: 11522 - protein, 360 aa, Zea mays subsp. mays
  peptide (1)..(360): Ceres Seq. ID no. 12348770
MVKAGFAGDDAPRAVFPSIVGRPRHTGVMVGMGQKDAYVGDEAQAKRGILTLKYPIEHGIVNNWDDMEKIWHHTFYNELRVSPEDHPVLLTEAPLNPKANREKMTQIMFETFECPAIYVAIQAVLSLYASGRTTGIVMDSGDGVSHTVPIYEGYTLPHAILRLDLAGRDLTDHLMKILTERGYSLTTSAEREIVRDIKEKLAYVALDYEQELETARSSSSVEKSYEMPDGQVITIGSERFRCPEVLFQPSLVGMESPGVHEATYNSIMKCDVDIRKDLYGNVVLSGGSTMFPGIADRMSKEITSLAPSSMKVKVIAPPERKYSVWIGGSILASLSTFQQMWISKGEYDETGPGIVHMKCF

SEQ ID NO: 11523 - protein, 332 aa, Zea mays subsp. mays
  peptide (1)..(332): Ceres Seq. ID no. 12348771
MVGMGQKDAYVGDEAQAKRGILTLKYPIEHGIVNNWDDMEKIWHHTFYNELRVSPEDHPVLLTEAPLNPKANREKMTQIMFETFECPAIYVAIQAVLSLYASGRTTGIVMDSGDGVSHTVPIYEGYTLPHAILRLDLAGRDLTDHLMKILTERGYSLTTSAEREIVRDIKEKLAYVALDYEQELETARSSSSVEKSYEMPDGQVITIGSERFRCPEVLFQPSLVGMESPGVHEATYNSIMKCDVDIRKDLYGNVVLSGGSTMFPGIADRMSKEITSLAPSSMKVKVIAPPERKYSVWIGGSILASLSTFQQMWISKGEYDETGPGIVHMKCF

SEQ ID NO: 11524 - DNA, 1877 bp, Zea mays subsp. mays
  misc_feature (1)..(1877): Ceres Seq. ID no. 12344575
  misc_feature (1)..(1877): Ortholog of  Ceres SEQ ID NO 15176223 as cited in SEQ ID NO 51535
  misc_feature (1)..(1877): Ortholog of  Ceres SEQ ID NO 15171193 as cited in SEQ ID NO 59370
  misc_feature (1)..(1877): Ortholog of  Ceres SEQ ID NO 13597198 as cited in SEQ ID NO 63665
ctctcctctcgctcgcgtccgcacaaatcccgtgctcccccgtctgaaaaccctccccacctccggcggcggcggcggcgctggcgaccgggtgtcttctccggcgagtctcccccctagtaacaagaaaatatggatgtacctgttgatgaccctgtggagaacctcactggaagtcctagtacccttggcaatgaggaagaagccactacttatgctaatgtgcaagatcagtccaaggaagaaccagaaaagctttacgaggaacccaaagacccaatgcaagacgagttgggtaaccaagggcatgtgagcatgaacaatgaagatgtgggaggccagaacaaagtggaccaagctacccccacagagcacggcgaggaagctggggtgaagcagcatgatgctacagttcctgatgacaagaaatggcctgggtggcctggagagagtgtgttccgtatactggttcctaccacaaaggtgggtgccgtcattgggcgcaaaggggatttcatcaagaaaatgtgtgaggaatcaagagcccgcatcaaggttcttgagggaccaccagctgtgccagaaagagctgtaatgatttcagcaaaggatgaaccagacacagagctacctccagctgttgatgggttgcttagagttcatagaaggataacagatggtttagaaactgaaactgatcagcctcaacgagctactgtcaacactgggccgacaaggctactggttccagcttcccaagctggcagcctaattgggaagcaaggagcaactattaagtcaatacaggatgcttcaaagtgcgttctccggattgttgagaatgttccacctgttgcattaaacgatgacagagttgtagagatacagggtgaacctcatgattctcacaaagccgtagaactgattgcaagtcatttaagaaaatttcttgttgaccgcagtgtcctccctttgtttgaaacacagattaaagcacacaatatgcacagagagcaacctatgcctcctccacaggcatggggcccccctcctccgtcaccctggggtcatccaccaccaaaccttcctcctggtggcccaggttatgttgggaacccacactacatgcctccacggccacaagagaactattatcctcctcccgatgtgccccctgtagaaaagcagccacactatggaatttcttcatatggacgagatgcacctccaagtgctcccccagggaatcaaaaccaagcacatgggtcatctcaggtgacacacagcatgcaagttcctctttcctatgctgatgctgtgataggggcagctggtgccagtatcagctacatccgcaggcatagtggagcaactataagtattcaagaaggcgctcctggcgagatgacagtggagattacaggaagtgcttcacaagtacagactgctcaacagctaatcaagaatttcatggctgaagcttctccccagggaccaccagccccaggtccacacggtcaaccagtggacacgggttacggctcgtacccaccttacgtggagcatcctatgggtctcctccaggtgctccagctccagcgcctcacaacggtggaagttatggtgctgcaccatactcgtcgagctatggatactaatccggagcaagagcttgcctcagacttagggaaggagggttatcgttatggttttgtttgctagtctattcatctgttgagaactcaagattgttattgttaggacgtgtgaactttggtgttctaggctgctttcagacgccagtgtcgatatactctctttgctttattgttgcggaatttatcgtaatatgttattttaatgttcaagaaaaaacc

SEQ ID NO: 11525 - protein, 529 aa, Zea mays subsp. mays
  peptide (1)..(529): Ceres Seq. ID no. 12344576
MDVPVDDPVENLTGSPSTLGNEEEATTYANVQDQSKEEPEKLYEEPKDPMQDELGNQGHVSMNNEDVGGQNKVDQATPTEHGEEAGVKQHDATVPDDKKWPGWPGESVFRILVPTTKVGAVIGRKGDFIKKMCEESRARIKVLEGPPAVPERAVMISAKDEPDTELPPAVDGLLRVHRRITDGLETETDQPQRATVNTGPTRLLVPASQAGSLIGKQGATIKSIQDASKCVLRIVENVPPVALNDDRVVEIQGEPHDSHKAVELIASHLRKFLVDRSVLPLFETQIKAHNMHREQPMPPPQAWGPPPPSPWGHPPPNLPPGGPGYVGNPHYMPPRPQENYYPPPDVPPVEKQPHYGISSYGRDAPPSAPPGNQNQAHGSSQVTHSMQVPLSYADAVIGAAGASISYIRRHSGATISIQEGAPGEMTVEITGSASQVQTAQQLIKNFMAEASPQGPPAPGPHGQPVDTGYGSYPPYVEHPMGLLQVLQLQRLTTVEVMVLHHTRRAMDTNPEQELASDLGKEGYRYGFVC

SEQ ID NO: 11526 - protein, 480 aa, Zea mays subsp. mays
  peptide (1)..(480): Ceres Seq. ID no. 12344577
MQDELGNQGHVSMNNEDVGGQNKVDQATPTEHGEEAGVKQHDATVPDDKKWPGWPGESVFRILVPTTKVGAVIGRKGDFIKKMCEESRARIKVLEGPPAVPERAVMISAKDEPDTELPPAVDGLLRVHRRITDGLETETDQPQRATVNTGPTRLLVPASQAGSLIGKQGATIKSIQDASKCVLRIVENVPPVALNDDRVVEIQGEPHDSHKAVELIASHLRKFLVDRSVLPLFETQIKAHNMHREQPMPPPQAWGPPPPSPWGHPPPNLPPGGPGYVGNPHYMPPRPQENYYPPPDVPPVEKQPHYGISSYGRDAPPSAPPGNQNQAHGSSQVTHSMQVPLSYADAVIGAAGASISYIRRHSGATISIQEGAPGEMTVEITGSASQVQTAQQLIKNFMAEASPQGPPAPGPHGQPVDTGYGSYPPYVEHPMGLLQVLQLQRLTTVEVMVLHHTRRAMDTNPEQELASDLGKEGYRYGFVC

SEQ ID NO: 11527 - protein, 468 aa, Zea mays subsp. mays
  peptide (1)..(468): Ceres Seq. ID no. 12344578
MNNEDVGGQNKVDQATPTEHGEEAGVKQHDATVPDDKKWPGWPGESVFRILVPTTKVGAVIGRKGDFIKKMCEESRARIKVLEGPPAVPERAVMISAKDEPDTELPPAVDGLLRVHRRITDGLETETDQPQRATVNTGPTRLLVPASQAGSLIGKQGATIKSIQDASKCVLRIVENVPPVALNDDRVVEIQGEPHDSHKAVELIASHLRKFLVDRSVLPLFETQIKAHNMHREQPMPPPQAWGPPPPSPWGHPPPNLPPGGPGYVGNPHYMPPRPQENYYPPPDVPPVEKQPHYGISSYGRDAPPSAPPGNQNQAHGSSQVTHSMQVPLSYADAVIGAAGASISYIRRHSGATISIQEGAPGEMTVEITGSASQVQTAQQLIKNFMAEASPQGPPAPGPHGQPVDTGYGSYPPYVEHPMGLLQVLQLQRLTTVEVMVLHHTRRAMDTNPEQELASDLGKEGYRYGFVC

SEQ ID NO: 11528 - DNA, 619 bp, Zea mays subsp. mays
  misc_feature (1)..(619): Ceres Seq. ID no. 13499146
  misc_feature (1)..(619): Ortholog of  Ceres SEQ ID NO 15179096 as cited in SEQ ID NO 0
aagcacccaaatcgacgaattcttcccccctctccgatctcgacgcgcaccgatgcgggcgatgtcgtcggcggttaatggtatgctgcgggcacggctgcgcggggcagcgcgcgttcgcggcggcggcggcgagggggccgggcggtggacgaccccaggtcacgaggagcgccccaaggggtacctcttcaaccggccgccgccgcctccggggggaatctcgcaagtgggaggattgggagctgccctgctacgtgacctccttcctcaccgtcgtcatcctcggcgtcggcctcaacgcgaagcccgaccttacaatcgagacgtgggcgcaccagaaggcgctcgagcgcctccagcagcaggagctcgccgctgccgacacccaggccgagtgatccgcgcgtctcaggtcctctcgaactctcggctgcctctgatttggttccaataagatggccacaatgtgcggtcctgaatgttctggacttctggtattgatggaacacgagctgaacactatgctgctgttttttctgttctgttttgaaatttgcccggtgatgatggcgaatgtcctgaatattctgaatattttgaaatgtttgactgttgt

SEQ ID NO: 11529 - protein, 151 aa, Zea mays subsp. mays
  peptide (1)..(151): Ceres Seq. ID no. 13499147
STQIDEFFPPLRSRRAPMRAMSSAVNGMLRARLRGAARVRGGGGEGAGRWTTPGHEERPKGYLFNRPPPPPGGISQVGGLGAALLRDLLPHRRHPRRRPQREARPYNRDVGAPEGARAPPAAGARRCRHPGRVIRASQVLSNSRLPLIWFQ

SEQ ID NO: 11530 - protein, 134 aa, Zea mays subsp. mays
  peptide (1)..(134): Ceres Seq. ID no. 13499148
MRAMSSAVNGMLRARLRGAARVRGGGGEGAGRWTTPGHEERPKGYLFNRPPPPPGGISQVGGLGAALLRDLLPHRRHPRRRPQREARPYNRDVGAPEGARAPPAAGARRCRHPGRVIRASQVLSNSRLPLIWFQ

SEQ ID NO: 11531 - protein, 132 aa, Zea mays subsp. mays
  peptide (1)..(132): Ceres Seq. ID no. 13499149
APKSTNSSPLSDLDAHRCGRCRRRLMVCCGHGCAGQRAFAAAAARGPGGGRPQVTRSAPRGTSSTGRRRLRGESRKWEDWELPCYVTSFLTVVILGVGLNAKPDLTIETWAHQKALERLQQQELAAADTQAE

SEQ ID NO: 11532 - protein, 107 aa, Zea mays subsp. mays
  peptide (1)..(107): Ceres Seq. ID no. 13499150
MVCCGHGCAGQRAFAAAAARGPGGGRPQVTRSAPRGTSSTGRRRLRGESRKWEDWELPCYVTSFLTVVILGVGLNAKPDLTIETWAHQKALERLQQQELAAADTQAE

SEQ ID NO: 11533 - DNA, 1426 bp, Zea mays subsp. mays
  misc_feature (1)..(1426): Ceres Seq. ID no. 12414746
  misc_feature (1)..(1426): Ortholog of  Ceres SEQ ID NO 13596392 as cited in SEQ ID NO 62136
  misc_feature (1)..(1426): Ortholog of  Ceres SEQ ID NO 13654360 as cited in SEQ ID NO 67980
  misc_feature (1)..(1426): Ortholog of  Ceres SEQ ID NO 13596394 as cited in SEQ ID NO 68561
atgacctatgcgtgtcactgcaggcggacctacaagctctttggaggagtagagacttccagccatcccttctacgctctccccgttcccgtgtcgtcctcccgacaaagagggagccgctagggtttagcggcttccgcttctgggcgagggcttacccgcgagggacggcgcgacgcggcggcacttgagctagggtttccctccgatcccgttcctttcccggcgaggcgatggacgaggcggcgattgacgacttgatccggcggctcctcgaggcccgcggcgggcgcaccccgcgcaacgcgcaggtgactgacgccgagatccggcgcctctgcgccaccgccaaggacgttttcctgctcccagcccaacctcctggagctcgaggcccccattaagatatgcggggatgtccatggccagtattcagacctccttcgattatttgagtatggtggctatccaccagatgcaaattatctgttcctgggtgactatgttgatcgggggaaacagagcatagaaacaatatgccttctcttggcgtacaagataaagtacccagaaaacttctttcttctcaggggaaaccatgaatgtgcctcgatcaaccggatatatgggttttttgatgagtgtaagaggagattcaatgtgcgtatctggaagatattcactgagtgttttaactgcctcccagtggctgcacttattgacgataagatcttttgcatgcatggggggttgtctcctgagctaaagaacatggatcaaatacgtaacatttctcctcctgtggatgttcctgacgttggtcttctatgtgatctgttatggtcggaccctgataaagagattgttgggtggggtgataatgacaggggtgtttcctacacctttggagctgacatagttgctgagtttcttcagaaacatgacctagatttgatctgcagggctcaccaggtcgtagaggatggctatgagtttttcgcaaatcgccagcttgtaacaatattctcagcaccgaactactgtggagagtttgacaatgctggtgcactgatgagcatcgatgactccctagtatgctcgttccagatactcaagccttctgaaaagaaaagaaaagcaggagctgagaacatgccaaagcccggtacacctcccaggaagataaaaataagtgttacccgcatttagccagattctcgttatcaaactggatttgagaagttgtgattaaatgctccccaaacttgttatggtaggttttttggtgagcttaacacggtgttaaactgtggagtgtggaccaccgtgcttatgtcttgctgatctgaagtcatgcaaatgtatcctggcgttttgccaaacaaaaaagatcatgctaacagaaacttctggattttttttattg

SEQ ID NO: 11534 - protein, 156 aa, Zea mays subsp. mays
  peptide (1)..(156): Ceres Seq. ID no. 12414747
MHGGLSPELKNMDQIRNISPPVDVPDVGLLCDLLWSDPDKEIVGWGDNDRGVSYTFGADIVAEFLQKHDLDLICRAHQVVEDGYEFFANRQLVTIFSAPNYCGEFDNAGALMSIDDSLVCSFQILKPSEKKRKAGAENMPKPGTPPRKIKISVTRI

SEQ ID NO: 11535 - protein, 145 aa, Zea mays subsp. mays
  peptide (1)..(145): Ceres Seq. ID no. 12414748
MDQIRNISPPVDVPDVGLLCDLLWSDPDKEIVGWGDNDRGVSYTFGADIVAEFLQKHDLDLICRAHQVVEDGYEFFANRQLVTIFSAPNYCGEFDNAGALMSIDDSLVCSFQILKPSEKKRKAGAENMPKPGTPPRKIKISVTRI

SEQ ID NO: 11536 - DNA, 919 bp, Zea mays subsp. mays
  misc_feature (1)..(919): Ceres Seq. ID no. 12351094
  misc_feature (1)..(919): Ortholog of  Ceres SEQ ID NO 13662677 as cited in SEQ ID NO 63824
gtgcactctctcctacgactcccacttcctctaccagcctagggcctaggctaccaccccagtgcgaaggaagtcagagctctccgcctccgccggcggggctcgatactgatgggtgtcttcgggacctcgcgtcctgcctccgtcaccctctgcgccttcctcacattcctcaacctcttcgccttccttctcgccgtcggcgccgagcgccgccgcagcaccgggaaggtggtgccggacgagtacgacgagcggtcctactgcctctacgacaccgacgcctccacggtctacggcgtttccgctttcttcgtgctgctgctccagcaggccattgtcaccgccgccacgcgttgcctttgcttcggccccgtgctctcctcccgcggctgcgccgtcaccgcattcgtcctctcctgggcaacgtttctcatcgcagaagcctgcctcataggaggatcggtgaggaacgcaaagcacaccaagtatctaggctactacacgaagcatgacctggtgtcgtgcgccaccctccgcaagggagtctttgcggccgccgctgcgatgatgctcgtcaacctcttggcgtcccttgtgtgctgctggagctactcgaaagccgcgacgggcgggttcatgaagcaccagaatgaggtcggagtgggcatgacggattacggccttgacaggggcgtttctgggccctgagtgagttggctggaaccttgttggcgtctgtgctgcagtaggcgtctcacctgtggtgtaatattatcgtcgaaatgtatgtgagtgaagttccgttctttctctacggtcggtgcgaatggtataccagaactgtgctctggaatgtgctagtcagtgatgatgttgtatggttcgtgattttatatctgtgaaaaaatgtggtagc

SEQ ID NO: 11537 - protein, 199 aa, Zea mays subsp. mays
  peptide (1)..(199): Ceres Seq. ID no. 12351095
MGVFGTSRPASVTLCAFLTFLNLFAFLLAVGAERRRSTGKVVPDEYDERSYCLYDTDASTVYGVSAFFVLLLQQAIVTAATRCLCFGPVLSSRGCAVTAFVLSWATFLIAEACLIGGSVRNAKHTKYLGYYTKHDLVSCATLRKGVFAAAAAMMLVNLLASLVCCWSYSKAATGGFMKHQNEVGVGMTDYGLDRGVSGP

SEQ ID NO: 11538 - protein, 170 aa, Zea mays subsp. mays
  peptide (1)..(170): Ceres Seq. ID no. 12351096
ALSPTTPTSSTSLGPRLPPQCEGSQSSPPPPAGLDTDGCLRDLASCLRHPLRLPHIPQPLRLPSRRRRRAPPQHREGGAGRVRRAVLLPLRHRRLHGLRRFRFLRAAAPAGHCHRRHALPLLRPRALLPRLRRHRIRPLLGNVSHRRSLPHRRIGEERKAHQVSRLLHEA

SEQ ID NO: 11539 - DNA, 587 bp, Zea mays subsp. mays
  misc_feature (1)..(587): Ceres Seq. ID no. 12353408
  misc_feature (1)..(587): Ortholog of  Ceres SEQ ID NO 13656408 as cited in SEQ ID NO 65810
aatagtttctctcctgccacttttgcgagcttacttcacgcacgccgccgcagccgccgccgctacagcccgcacctcgcttcctctcccgtcgccgagatgacgaagcgaaccaagaaggccggaattgttggcaaatatggaaccaggtatggtgctagcttgcgtaagcaaatcaagaagatggaggtatctcagcactccaagtatttctgtgagttctgtgggaagtttgctgtgaagaggaaagcggttgggatttggggatgcaaggactgtgggaaggtcaaggccggtggtgcttataccatgaacactgctagtgcggtcactgtcaggagcacgatccgtcgcttgagggagcagactgaagcatgatccgtcgcttgtcaggcatactggggtccactatattggctgtttagccgagacagtactccagcatttttgggttatgctctaggatctctaaaagttgggtgctaagatttctacttgtttaccgttgtgaaaatttcacaagtgatatctgatcctattactatcttgatgacgtcaaatttgcttctggtttctaccctttggtc

SEQ ID NO: 11540 - protein, 125 aa, Zea mays subsp. mays
  peptide (1)..(125): Ceres Seq. ID no. 12353409
NSFSPATFASLLHARRRSRRRYSPHLASSPVAEMTKRTKKAGIVGKYGTRYGASLRKQIKKMEVSQHSKYFCEFCGKFAVKRKAVGIWGCKDCGKVKAGGAYTMNTASAVTVRSTIRRLREQTEA

SEQ ID NO: 11541 - protein, 92 aa, Zea mays subsp. mays
  peptide (1)..(92): Ceres Seq. ID no. 12353410
MTKRTKKAGIVGKYGTRYGASLRKQIKKMEVSQHSKYFCEFCGKFAVKRKAVGIWGCKDCGKVKAGGAYTMNTASAVTVRSTIRRLREQTEA

SEQ ID NO: 11542 - protein, 64 aa, Zea mays subsp. mays
  peptide (1)..(64): Ceres Seq. ID no. 12353411
MEVSQHSKYFCEFCGKFAVKRKAVGIWGCKDCGKVKAGGAYTMNTASAVTVRSTIRRLREQTEA

SEQ ID NO: 11543 - DNA, 929 bp, Zea mays subsp. mays
  misc_feature (1)..(929): Ceres Seq. ID no. 12361987
  misc_feature (1)..(929): Ortholog of  Ceres SEQ ID NO 14302255 as cited in SEQ ID NO 65021
gcacgagaccattacctagaacatcctaatcgaaaatgctcaaccgctacatgcacctctcgggccgcttccacatgcgcgaggtggagcgcaccgtgcagcgcctcatccgcgacggggtgatagtgcacgcgccggcgagcccgttccacggcttcgtctacgtcgccttccaggagcgcgccaccgccatcgcgcacggcaacacggcgcgcctcgtgggcgcgcgcggggccgggggacgccgctctcgcgcgcatctgcggcaccgtcgccgccgacgagaagcggcacgaggcggcgtacacccgcgtcgtgggcaagttcttcgaggccgacccggacgccgccgtgcgcgccatggcgtacatgatgcggcgccggatcgacatgcccactgtgctcatcaacgacggccgccacagcagcggcgacttctacgctcgcttcgtcgccatcgcgcagcaggccggcacgtacacggtttccgactaccgcgccattctcgagcacttcatacggcagtggggcgtcgaggaacttgcggcggggctcaccggcgaggggaggcgcgcgcgggactacctgtgcgcgctgccgcacaagataaagaggatggaagagaaggcccacgatagagcggtcaaagcacaaaagaaacccacacccatccccatcaactggatcttcgataggaccattcctgtcattctaccttagtgtttatctttttcgatctttgtttgggtatctatgctgttattgtaagctaattccatggaccttgatagcgtcgttcatgcctacgtgtcgatagcatcattagtgtcgttctacccttaatcctgttatgccacgttaggtaccatttttttccataagagaatatttacaaatttataatttgttggatcgaggtgatacagggg

SEQ ID NO: 11544 - protein, 200 aa, Zea mays subsp. mays
  peptide (1)..(200): Ceres Seq. ID no. 12361988
MLNRYMHLSGRFHMREVERTVQRLIRDGVIVHAPASPFHGFVYVAFQERATAIAHGNTARLVGARGAGGRRSRAHLRHRRRRREAARGGVHPRRGQVLRGRPGRRRARHGVHDAAPDRHAHCAHQRRPPQQRRLLRSLRRHRAAGRHVHGFRLPRHSRALHTAVGRRGTCGGAHRRGEARAGLPVRAAAQDKEDGREGPR

SEQ ID NO: 11545 - protein, 195 aa, Zea mays subsp. mays
  peptide (1)..(195): Ceres Seq. ID no. 12361989
MHLSGRFHMREVERTVQRLIRDGVIVHAPASPFHGFVYVAFQERATAIAHGNTARLVGARGAGGRRSRAHLRHRRRRREAARGGVHPRRGQVLRGRPGRRRARHGVHDAAPDRHAHCAHQRRPPQQRRLLRSLRRHRAAGRHVHGFRLPRHSRALHTAVGRRGTCGGAHRRGEARAGLPVRAAAQDKEDGREGPR

SEQ ID NO: 11546 - protein, 187 aa, Zea mays subsp. mays
  peptide (1)..(187): Ceres Seq. ID no. 12361990
MREVERTVQRLIRDGVIVHAPASPFHGFVYVAFQERATAIAHGNTARLVGARGAGGRRSRAHLRHRRRRREAARGGVHPRRGQVLRGRPGRRRARHGVHDAAPDRHAHCAHQRRPPQQRRLLRSLRRHRAAGRHVHGFRLPRHSRALHTAVGRRGTCGGAHRRGEARAGLPVRAAAQDKEDGREGPR

SEQ ID NO: 11547 - DNA, 1485 bp, Zea mays subsp. mays
  misc_feature (1)..(1485): Ceres Seq. ID no. 12376376
  misc_feature (1)..(1485): Ortholog of  Ceres SEQ ID NO 13502858 as cited in SEQ ID NO 65109
aattcctaaacaaacgaacgcattctcctcccaaaccaccagacatattgcagtctgccgtagaagtgaaagggtttggtgaaaaattccggccgcctcagcgtcgcgaggtgggggacgagacgaagccagagcgccccaaacccaaaccccagaaccccgacatagggttacgccatcgccatgggatctgttgcctccgcagcagcgccaccttctcctcactcagcgctaccccaggagggcgcgccgccctatggccccgggctcgccgggatcctcccgcagacgtcagtgggagaggagaagaaggaggagaaggtggactacctcaacctcctctgccccgtgcccttcgaggagatccagcgcgaggctctcatgtctttgaagcctgaactttttgaaggattgaggtttgacttcacaaaagggttgaatcaaaagttttctcttagccacagcgtttttatgggctccttagaagttccagcccaggggtctgaaactattaaagttccaactgctcattatgaatttggtgccaattttttagatccaaagttaatgctcattggaagggtgatgacagatggaaggcttaatgctcgcgtgaaatgtgatttgacagacaatctgatgctgaaagtaaatgcacagcttacccaagaggcacattactcacaaggaatgtttaactttgactacaagggaagtgactatcgagcacaattccaaatagggaacaatgcattctatggtgcaaattatattcagagtgttactccgaacctatcaatgggaactgaaatgttctggcttggtcaccaaaggaagtctggaattggttttgcctgtcgctataacacggacaaaatggtgggcactctacaggtcgcaagcactggaatagttgccttaagttatgtccagaagatttctgagaaggtttcccttgcgtctgatttcatgtataaccatatgtcaagagacgtaacttccagctttggttacgattacttgcttaggcagtgccgtctaagaggcaaaattgactcgaatggtgttgttgcggcatatctggaggagaggttgaacatgggtgtcaactttcttctatctgctgagattgaccattgtaagaagaactacaagtttggtttcggaatgaccgtaggagagtaattctgctaaaacaattgctgagaagagcacatgaggactttcgcagtctgctttgcattgtatgttaagatacttcaggtctcagttttgattgatcaggttctgccccgtcgaaaaaatactagctgttgctgctttacagggttttgtctcagtgtattggtggttgtttattttcagctacttgagcatgggggccatgattctttgttcatcttggatgtaactagctgattggtgttccaatgaaaaaaaaaaaaaaaaaaaaaaaaaaaaaaaaaaaaaaaaaaaaaaaataaa

SEQ ID NO: 11548 - protein, 333 aa, Zea mays subsp. mays
  peptide (1)..(333): Ceres Seq. ID no. 12376377
MGSVASAAAPPSPHSALPQEGAPPYGPGLAGILPQTSVGEEKKEEKVDYLNLLCPVPFEEIQREALMSLKPELFEGLRFDFTKGLNQKFSLSHSVFMGSLEVPAQGSETIKVPTAHYEFGANFLDPKLMLIGRVMTDGRLNARVKCDLTDNLMLKVNAQLTQEAHYSQGMFNFDYKGSDYRAQFQIGNNAFYGANYIQSVTPNLSMGTEMFWLGHQRKSGIGFACRYNTDKMVGTLQVASTGIVALSYVQKISEKVSLASDFMYNHMSRDVTSSFGYDYLLRQCRLRGKIDSNGVVAAYLEERLNMGVNFLLSAEIDHCKKNYKFGFGMTVGE

SEQ ID NO: 11549 - protein, 267 aa, Zea mays subsp. mays
  peptide (1)..(267): Ceres Seq. ID no. 12376378
MSLKPELFEGLRFDFTKGLNQKFSLSHSVFMGSLEVPAQGSETIKVPTAHYEFGANFLDPKLMLIGRVMTDGRLNARVKCDLTDNLMLKVNAQLTQEAHYSQGMFNFDYKGSDYRAQFQIGNNAFYGANYIQSVTPNLSMGTEMFWLGHQRKSGIGFACRYNTDKMVGTLQVASTGIVALSYVQKISEKVSLASDFMYNHMSRDVTSSFGYDYLLRQCRLRGKIDSNGVVAAYLEERLNMGVNFLLSAEIDHCKKNYKFGFGMTVGE

SEQ ID NO: 11550 - protein, 237 aa, Zea mays subsp. mays
  peptide (1)..(237): Ceres Seq. ID no. 12376379
MGSLEVPAQGSETIKVPTAHYEFGANFLDPKLMLIGRVMTDGRLNARVKCDLTDNLMLKVNAQLTQEAHYSQGMFNFDYKGSDYRAQFQIGNNAFYGANYIQSVTPNLSMGTEMFWLGHQRKSGIGFACRYNTDKMVGTLQVASTGIVALSYVQKISEKVSLASDFMYNHMSRDVTSSFGYDYLLRQCRLRGKIDSNGVVAAYLEERLNMGVNFLLSAEIDHCKKNYKFGFGMTVGE

SEQ ID NO: 11551 - DNA, 834 bp, Zea mays subsp. mays; identical to SEQ ID NO: 9269
  misc_feature (1)..(834): Ceres Seq. ID no. 12404684
  misc_feature (1)..(834): Ortholog of  Ceres SEQ ID NO 15173015 as cited in SEQ ID NO 51216

SEQ ID NO: 11552 - protein, 177 aa, Zea mays subsp. mays; identical to SEQ ID NO: 9270
  peptide (1)..(177): Ceres Seq. ID no. 12404685

SEQ ID NO: 11553 - protein, 169 aa, Zea mays subsp. mays; identical to SEQ ID NO: 9271
  peptide (1)..(169): Ceres Seq. ID no. 12404686

SEQ ID NO: 11554 - protein, 165 aa, Zea mays subsp. mays; identical to SEQ ID NO: 9272
  peptide (1)..(165): Ceres Seq. ID no. 12404687

SEQ ID NO: 11555 - DNA, 990 bp, Zea mays subsp. mays
  misc_feature (1)..(990): Ceres Seq. ID no. 12345649
  misc_feature (1)..(990): Ortholog of  Ceres SEQ ID NO 15173696 as cited in SEQ ID NO 59972
  misc_feature (1)..(990): Ortholog of  Ceres SEQ ID NO 15226351 as cited in SEQ ID NO 61706
gctccctatccaatcttctcctccctccctcccccgcgtcgcggcaagacgacctcgccgctccctgcctccctctccccgccgcaggtgctggagatgcaggcgactgccgcctccttcctcgcccgcccactcccgcggcttcgccgcattggcagctggggagcggatgcggcggtggtgcgtgagggcgttatcgcgctccctctgcggctgcgggggccgcggtgctccattagcctctccatcggcgccggcgccggcgctggcgccgaagctgaccacgagttcagctacgagcatgttccggtgttccctagataccgaatacgagatccctacaagcttcttggtgttgatcgtgatgcatctgaagaagagatccgaggtgcgaggaatttccttattcaacagtatgctgggcatgaaccgagtgaagaagctattgaaggtgcttatgagaagataattatgaagagctaccagcagcggaagaagacaaaaattaacttgaaaaccaagttaaagaagagagtagaggaatccccttcatgggtcaaagcacttcttggttgctttgaggtgccatcgatggatattatctccagaagattgtttttctttgctttcattgctggatggagcatagcaacttctgcagagaatggacctgcatttcagctcgcgatatcgctattctcatgcatatatttcctcaacgaaaagatgaagaaccttctaagggcatcaaccactgggtttggaatacttgttggcggttggatcattggttctctactggttccactggtcccaacattcatcatcccaccttcatggtctctagagctacttacctcactagttgcttacattttcttgtttctgggatccactttcctgaaatgaatctgtttcaatcttgtaactggaactgttggatcttttgagagggaaattacgatgactgatctctggatttgagttttc

SEQ ID NO: 11556 - protein, 302 aa, Zea mays subsp. mays
  peptide (1)..(302): Ceres Seq. ID no. 12345650
APYPIFSSLPPPRRGKTTSPLPASLSPPQVLEMQATAASFLARPLPRLRRIGSWGADAAVVREGVIALPLRLRGPRCSISLSIGAGAGAGAEADHEFSYEHVPVFPRYRIRDPYKLLGVDRDASEEEIRGARNFLIQQYAGHEPSEEAIEGAYEKIIMKSYQQRKKTKINLKTKLKKRVEESPSWVKALLGCFEVPSMDIISRRLFFFAFIAGWSIATSAENGPAFQLAISLFSCIYFLNEKMKNLLRASTTGFGILVGGWIIGSLLVPLVPTFIIPPSWSLELLTSLVAYIFLFLGSTFLK

SEQ ID NO: 11557 - protein, 270 aa, Zea mays subsp. mays
  peptide (1)..(270): Ceres Seq. ID no. 12345651
MQATAASFLARPLPRLRRIGSWGADAAVVREGVIALPLRLRGPRCSISLSIGAGAGAGAEADHEFSYEHVPVFPRYRIRDPYKLLGVDRDASEEEIRGARNFLIQQYAGHEPSEEAIEGAYEKIIMKSYQQRKKTKINLKTKLKKRVEESPSWVKALLGCFEVPSMDIISRRLFFFAFIAGWSIATSAENGPAFQLAISLFSCIYFLNEKMKNLLRASTTGFGILVGGWIIGSLLVPLVPTFIIPPSWSLELLTSLVAYIFLFLGSTFLK

SEQ ID NO: 11558 - protein, 155 aa, Zea mays subsp. mays
  peptide (1)..(155): Ceres Seq. ID no. 12345652
LPIQSSPPSLPRVAARRPRRSLPPSPRRRCWRCRRLPPPSSPAHSRGFAALAAGERMRRWCVRALSRSLCGCGGRGAPLASPSAPAPALAPKLTTSSATSMFRCSLDTEYEIPTSFLVLIVMHLKKRSEVRGISLFNSMLGMNRVKKLLKVLMRR

SEQ ID NO: 11559 - DNA, 735 bp, Zea mays subsp. mays
  misc_feature (1)..(735): Ceres Seq. ID no. 12350308
  misc_feature (1)..(735): Ortholog of  Ceres SEQ ID NO 13595818 as cited in SEQ ID NO 56698
ctttttttcattacccccacctccgtggcgaggctcccccacctactaatacctctcctctctcgctcgcctgtcgcctttgtattcgtcttgctccagccgccgtcggatcggatccgatccaaagcaagcagcagcagccggctcctcctccgcctcccgcagcagccacaccccgtccgtcaccagaggaagaggaggaggatgtcgggatcgaaggtgtacacccttgaggaggtggccaagcacaacaccaaggacgactgctggctcgtcatcggcggcaaggtgtacaatgtgaccaagtttctggaggaccaccctggaggtgatgatgtcctgctgtcttccactgccaaggatgctaccgatgatttcgaagatgtggggcacagcaccaccgcccgtgcaatgatggacgagtacctcgtcggtgagattgatgcggccacgatacccagtaaggtgaagtacacgccccccaagcagccgcactacaaccaggataagaccccggagttcgtcatcaagatcctccagtttttggtccccctggcaatactgggcctggctgttgctgtaaggatctacaccaagtcggaatctgcctagtcatctgaaccaagttagcgagggttgcatcttgtaccagagtcgcatgtcagaaacttgagtctttgctgtcatacggttatatttatatgagacttctatcggtaaaatgaaatggatgtc

SEQ ID NO: 11560 - protein, 203 aa, Zea mays subsp. mays
  peptide (1)..(203): Ceres Seq. ID no. 12350309
LFFITPTSVARLPHLLIPLLSRSPVAFVFVLLQPPSDRIRSKASSSSRLLLRLPQQPHPVRHQRKRRRMSGSKVYTLEEVAKHNTKDDCWLVIGGKVYNVTKFLEDHPGGDDVLLSSTAKDATDDFEDVGHSTTARAMMDEYLVGEIDAATIPSKVKYTPPKQPHYNQDKTPEFVIKILQFLVPLAILGLAVAVRIYTKSESA

SEQ ID NO: 11561 - protein, 135 aa, Zea mays subsp. mays
  peptide (1)..(135): Ceres Seq. ID no. 12350310
MSGSKVYTLEEVAKHNTKDDCWLVIGGKVYNVTKFLEDHPGGDDVLLSSTAKDATDDFEDVGHSTTARAMMDEYLVGEIDAATIPSKVKYTPPKQPHYNQDKTPEFVIKILQFLVPLAILGLAVAVRIYTKSESA

SEQ ID NO: 11562 - DNA, 769 bp, Zea mays subsp. mays
  misc_feature (1)..(769): Ceres Seq. ID no. 12342308
  misc_feature (1)..(769): Ortholog of  Ceres SEQ ID NO 15226175 as cited in SEQ ID NO 0
catgaggaaagcaaggcacaacttcaggctcgatgaggtcggaataagaaggcagttgaagatcgtctctcagattatcaagcgcaaagattcacacctgtataggcatctgcagaagttgcaggctgaggactgtttctttgtgtacagaatggtggtagttctcttcaggagagagctcacttttgagcagactgtgtgcttgtgggaggttatgtgggctgaccaggcagctatacgagccgggatcgggaggtccacctggggaaggataagactgcgtgctcccccaactgacgacttgctactctatgccatcgccgcttgtgtcctgcagaggaggaagctaataattgagaagtatagcagcatggacgagatactgcgagagtgcaacagcatggctgggcagctcgacgtctggaggctgctagatgatgcacatgacctggttgttaaccttcacgataaaatctgatctgggtggtgagtgctgctctttgctctaacggcggagcaggtgtaagcctcaacagaaggaaaaatattgtggttcctttaccacctactgaaagtattctattatctgctattcattcccagcacggaaccaacttctaggtatagagaatgttgttaacttagagtgaggactcgagtgtcctcgcaaagaaaatgctgaaagattgtttggtgttagtgaggcactgtaaactgttcgttgtttaacttgttataggcaaaaacagagtttcctgggatggcaccc

SEQ ID NO: 11563 - protein, 158 aa, Zea mays subsp. mays
  peptide (1)..(158): Ceres Seq. ID no. 12342309
MRKARHNFRLDEVGIRRQLKIVSQIIKRKDSHLYRHLQKLQAEDCFFVYRMVVVLFRRELTFEQTVCLWEVMWADQAAIRAGIGRSTWGRIRLRAPPTDDLLLYAIAACVLQRRKLIIEKYSSMDEILRECNSMAGQLDVWRLLDDAHDLVVNLHDKI

SEQ ID NO: 11564 - protein, 108 aa, Zea mays subsp. mays
  peptide (1)..(108): Ceres Seq. ID no. 12342310
MVVVLFRRELTFEQTVCLWEVMWADQAAIRAGIGRSTWGRIRLRAPPTDDLLLYAIAACVLQRRKLIIEKYSSMDEILRECNSMAGQLDVWRLLDDAHDLVVNLHDKI

SEQ ID NO: 11565 - protein, 87 aa, Zea mays subsp. mays
  peptide (1)..(87): Ceres Seq. ID no. 12342311
MWADQAAIRAGIGRSTWGRIRLRAPPTDDLLLYAIAACVLQRRKLIIEKYSSMDEILRECNSMAGQLDVWRLLDDAHDLVVNLHDKI

SEQ ID NO: 11566 - DNA, 1191 bp, Zea mays subsp. mays
  misc_feature (1)..(1191): Ceres Seq. ID no. 12376280
  misc_feature (1)..(1191): Ortholog of  Ceres SEQ ID NO 12609041 as cited in SEQ ID NO 51310
  misc_feature (1)..(1191): Ortholog of  Ceres SEQ ID NO 13594966 as cited in SEQ ID NO 56152
  misc_feature (1)..(1191): Ortholog of  Ceres SEQ ID NO 14312224 as cited in SEQ ID NO 57255
  misc_feature (1)..(1191): Ortholog of  Ceres SEQ ID NO 12582457 as cited in SEQ ID NO 57530
  misc_feature (1)..(1191): Ortholog of  Ceres SEQ ID NO 13655804 as cited in SEQ ID NO 64881
gcacgagaccattacctagaacatcctaatcgaaaaattccattgacttgacacgctataaaatcccagctccatggccgcaaaccagcagctgcagcatcagcatcgttccatccatccatcctactatccagcttcagcccgggccagccgctccacagcagcaagcaagcaaggctgagaacgaacgaagcagcccgcatccgcatccatggccgccgtgctggtggcgaggcaggggcgcgagctgcagcggtacagccagagcacgggcgggcgcatcgtggtgggctgcatcccgtaccgcgtgcggcgcgacggcgagctggaggtgctggtgatcacgtcccagaaggggcacggcatgatgttccccaagggcgggtgggaggtggacgagtccatggacgaggccgcccggcgcgaggccctcgaggaggccggcgtgctcggcgacaccgagccggtcctcggcctctggcactacaagagccgccgctacgtggaccagacctacgagggcttcatgttcccgctccgcgtcgccgacgagctccaccagtggcccgagatggcgtcccgcaagcgcacctgggcaacggtgcagcaggcgatggacgggtgcccgcactggtggatgcgcgaggcgctggagcggctcgtcgcgcggcaagccgtgctgcagtctgccctctgatcgccgtcatcgactggggtaacaacagaggcggggaggcgcgaggcaccatgtgcgcacgccgccacggctctctctctctctctgtctcggtgcagcggcaggccggccggcccggcgttccgggtctggaatttggtcgccctcaccgggagagtcgaacggcgcgccgcgcggctcgtgtgctctggcgatgctttcttgtgaccccccctgaccccgaggcgcggagtcgtcgttggcaaataaaatcatcagatcgtttttagagggcggatggtttagacgaaatggaaaacaaaatctgaactggacgcctagtggaaggaaaagaaaaggaatagaacagcagcgcgaaacaattcggcgattctttcgagtaactgcacaaattgtaaaattttagtggtgactcgtttcttgaccttgggtggcaccgtggcagaattgttacgagctgttcaattcaaaaaagaagaagaagaaaaagtttc

SEQ ID NO: 11567 - protein, 161 aa, Zea mays subsp. mays
  peptide (1)..(161): Ceres Seq. ID no. 12376281
MAAVLVARQGRELQRYSQSTGGRIVVGCIPYRVRRDGELEVLVITSQKGHGMMFPKGGWEVDESMDEAARREALEEAGVLGDTEPVLGLWHYKSRRYVDQTYEGFMFPLRVADELHQWPEMASRKRTWATVQQAMDGCPHWWMREALERLVARQAVLQSAL

SEQ ID NO: 11568 - protein, 110 aa, Zea mays subsp. mays
  peptide (1)..(110): Ceres Seq. ID no. 12376282
MMFPKGGWEVDESMDEAARREALEEAGVLGDTEPVLGLWHYKSRRYVDQTYEGFMFPLRVADELHQWPEMASRKRTWATVQQAMDGCPHWWMREALERLVARQAVLQSAL

SEQ ID NO: 11569 - protein, 109 aa, Zea mays subsp. mays
  peptide (1)..(109): Ceres Seq. ID no. 12376283
MFPKGGWEVDESMDEAARREALEEAGVLGDTEPVLGLWHYKSRRYVDQTYEGFMFPLRVADELHQWPEMASRKRTWATVQQAMDGCPHWWMREALERLVARQAVLQSAL

SEQ ID NO: 11570 - DNA, 1310 bp, Zea mays subsp. mays
  misc_feature (1)..(1310): Ceres Seq. ID no. 12347716
  misc_feature (1)..(1310): Ortholog of  Ceres SEQ ID NO 12443653 as cited in SEQ ID NO 65912
catttaccactgaccctgtatttcgtgtcaccttgcgactccgacgaaccccaatcccgcgcgccggtgaccatggagttcatcgacccctgggactcccagtcccgcgctcgcgtcgtccattccggcgccaactccacttcgttctcctcctccaccgccaaagcacccctctccctccgccacgccgcatcttgcgccgccgcggccgtcgcacttctcgccgccgcgttctacctcctcccgacctaccagatcctctcctccctcctcatatggatcgcttcgtccctgctcctcgctcccttcgcgcccttgtcggccactggcggcgacatctccgtcggccgaggccgcgtcgttccggctccagaaccggccccagaacccacgccggaacccacgcccgccccccgccgcggccgtcgccagaacccagtcccgacgcccacaaaaccctcagatccgggcactccccccgtccaatcggccgcatcactgcatccgttgcagaaggcgacaactgcgggtggagccgtggtggacggcggcgagagggaggaggacgccggcgagtggactgaccaagagctggagctgctccggcggcagatggtgaagcacccggcgggtgagccccagcgctgggagaagatcgccgcggtgtttggcggccgccgcacgccggagaatgtcatccgggcggcaaagtcgggcgctcccgcggcgggaggaagctcgttcgagcagttcctacgcaagcggaagccgctcgatccgagggccgaggttgctgacactgcggacgatgcgggaggcgccgagagtgcggacgccgcttggagcgccggggatgaccgggccttgctgaatgctcttaaggagttcccgaaggacactgcaatgaggtgggagaaggtggcggcctctgtacccgggaagacaaaggccgcgtgcatgaagaggatcaccgagctcaagcgagacttcaggagcaccaagacggcatcggaagcagcaccataggcgaaacctgagaattttggtaggggtgccggactgaatgacatgcgctgcactggtttggctagcgaggaagaactttacatggctagctccagtgaaccatggaaacggcagaggattaactacactacggagagggccggagctatagaacagatcatgtaattttcctattgaactagagacagggtatcccttgatataggagaaactttgacttactactggacacatggcatgagacaggaagaacctgttcttgtttcaaactaaagcatgttttc

SEQ ID NO: 11571 - protein, 341 aa, Zea mays subsp. mays
  peptide (1)..(341): Ceres Seq. ID no. 12347717
HLPLTLYFVSPCDSDEPQSRAPVTMEFIDPWDSQSRARVVHSGANSTSFSSSTAKAPLSLRHAASCAAAAVALLAAAFYLLPTYQILSSLLIWIASSLLLAPFAPLSATGGDISVGRGRVVPAPEPAPEPTPEPTPAPRRGRRQNPVPTPTKPSDPGTPPVQSAASLHPLQKATTAGGAVVDGGEREEDAGEWTDQELELLRRQMVKHPAGEPQRWEKIAAVFGGRRTPENVIRAAKSGAPAAGGSSFEQFLRKRKPLDPRAEVADTADDAGGAESADAAWSAGDDRALLNALKEFPKDTAMRWEKVAASVPGKTKAACMKRITELKRDFRSTKTASEAAP

SEQ ID NO: 11572 - protein, 317 aa, Zea mays subsp. mays
  peptide (1)..(317): Ceres Seq. ID no. 12347718
MEFIDPWDSQSRARVVHSGANSTSFSSSTAKAPLSLRHAASCAAAAVALLAAAFYLLPTYQILSSLLIWIASSLLLAPFAPLSATGGDISVGRGRVVPAPEPAPEPTPEPTPAPRRGRRQNPVPTPTKPSDPGTPPVQSAASLHPLQKATTAGGAVVDGGEREEDAGEWTDQELELLRRQMVKHPAGEPQRWEKIAAVFGGRRTPENVIRAAKSGAPAAGGSSFEQFLRKRKPLDPRAEVADTADDAGGAESADAAWSAGDDRALLNALKEFPKDTAMRWEKVAASVPGKTKAACMKRITELKRDFRSTKTASEAAP

SEQ ID NO: 11573 - protein, 193 aa, Zea mays subsp. mays
  peptide (1)..(193): Ceres Seq. ID no. 12347719
FTTDPVFRVTLRLRRTPIPRAGDHGVHRPLGLPVPRSRRPFRRQLHFVLLLHRQSTPLPPPRRILRRRGRRTSRRRVLPPPDLPDPLLPPHMDRFVPAPRSLRALVGHWRRHLRRPRPRRSGSRTGPRTHAGTHARPPPRPSPEPSPDAHKTLRSGHSPRPIGRITASVAEGDNCGWSRGGRRREGGGRRRVD

SEQ ID NO: 11574 - DNA, 1162 bp, Zea mays subsp. mays; identical to SEQ ID NO: 8643
  misc_feature (1)..(1162): Ceres Seq. ID no. 12344858
  misc_feature (1)..(1162): Ortholog of  Ceres SEQ ID NO 12635141 as cited in SEQ ID NO 0

SEQ ID NO: 11575 - protein, 180 aa, Zea mays subsp. mays; identical to SEQ ID NO: 8644
  peptide (1)..(180): Ceres Seq. ID no. 12344859

SEQ ID NO: 11576 - protein, 143 aa, Zea mays subsp. mays; identical to SEQ ID NO: 8645
  peptide (1)..(143): Ceres Seq. ID no. 12344860

SEQ ID NO: 11577 - protein, 132 aa, Zea mays subsp. mays; identical to SEQ ID NO: 8646
  peptide (1)..(132): Ceres Seq. ID no. 12344861

SEQ ID NO: 11578 - DNA, 740 bp, Zea mays subsp. mays
  misc_feature (1)..(740): Ceres Seq. ID no. 12404680
  misc_feature (1)..(740): Ortholog of  Ceres SEQ ID NO 13583909 as cited in SEQ ID NO 63232
aacacaggcaccacagctgagagacgatagaagcacgcagcagctgaaagggaggggaactaggaatgaaggggagcaaggtccacgagcacgaggcagacgtccccgcctccgacctctgggcgatctacggctccctccgcgccgcgagactcctgccggagctgctcccgcacgtgctcgccaaggtggagctcgtcagcggcgacggcggtgttggtaccatcttgcagctaatatttcctcccggtgagtataagatacgtgtgtatgctgccataatatctttgatgttggatatgctaagatactagtagtaaagttttaattgctctgctccgctccgctcctagggattcctgggctacagagttacaaggagaagttcatcaaagttgacaacgagaactatatcaaggaggcagaagccattgatggcgacattttgaagctggggttcgaggcatacatgatacggtttgagatcattccaaaaggggccaattcgtctgtcatcaggtcgactatcgagtatgtgattgctgatgcgcacccggagctcgaagctatggtgagcacagcaactttggctgaaactgctcagaaattttccgagtttgctaaggcgaagtaggtcccataaggaatgtcttgaaatatatatatatatatctcgagagcggagtttatgtttatcatgaaacaagtgaaatacagtttcagcgctttcgtgttgcgcc

SEQ ID NO: 11579 - protein, 83 aa, Zea mays subsp. mays
  peptide (1)..(83): Ceres Seq. ID no. 12404681
TQAPQLRDDRSTQQLKGRGTRNEGEQGPRARGRRPRLRPLGDLRLPPRRETPAGAAPARARQGGARQRRRRCWYHLAANISSR

SEQ ID NO: 11580 - protein, 82 aa, Zea mays subsp. mays
  peptide (1)..(82): Ceres Seq. ID no. 12404682
MKGSKVHEHEADVPASDLWAIYGSLRAARLLPELLPHVLAKVELVSGDGGVGTILQLIFPPGEYKIRVYAAIISLMLDMLRY

SEQ ID NO: 11581 - protein, 54 aa, Zea mays subsp. mays
  peptide (1)..(54): Ceres Seq. ID no. 12404683
MIRFEIIPKGANSSVIRSTIEYVIADAHPELEAMVSTATLAETAQKFSEFAKAK

SEQ ID NO: 11582 - DNA, 923 bp, Zea mays subsp. mays
  misc_feature (1)..(923): Ceres Seq. ID no. 12342226
  misc_feature (1)..(923): Ortholog of  Ceres SEQ ID NO 14314461 as cited in SEQ ID NO 52355
  misc_feature (1)..(923): Ortholog of  Ceres SEQ ID NO 14306812 as cited in SEQ ID NO 56361
  misc_feature (1)..(923): Ortholog of  Ceres SEQ ID NO 15168461 as cited in SEQ ID NO 57068
acaaaagttttagttccaactgggagagctagcatggcaagttcgcgctgctttgagaacccgccggtgctggagccggccagcggaggaggcgaggtggttgacgacttcggcgggcagaaggcctacgtcagcggctccgccgggtccaaggccgccgtcgtcctcatctccgacgccttcgggttcgaagcgccaaacctgaggaagatagccgacaaagttgcttcgctcggttacttcgttgtggtgcccgatttcctgcatggggatccatatgaccccagcaataatgcccatagcaatcctggaacgtggatacagtcgcacaatccgcaaacggcattcgaagaggcaaaaccggtaattgcggctataaaggagaagggtgtgtcgagcatcggagctgcaggttactgttggggcgcaaaggtggttgtggaactggcgaaagttcacgagatccaggctgctgtgttggcacacccttctttactaactgtcgatgatatgaaagatgtcaagtgccccatttccatacttggagctgaaatcgacaggtcagccccgcctgaattgctaaagcagtttgagcaagttctttcagcgaaccccgaggtcgatcactttgtcaaggtttttcctggcgtagcgcatggatgggctgtgaggtacagcgacgacgacgcagcggctgtcacgagtgcggaggaagctttgcgcgacatgagccactggttcaacaagtacctgaactgaattatgtggcggcatatgtgcgtgcaataagctcctaatggtgaacattatgcagggcccccatgctatgcgtgtgttttaaaagtcctcttagtggtggtatttgtactggtctcttacgcaatttttataacatttatcgagaataaagtgatgacacggtg

SEQ ID NO: 11583 - protein, 252 aa, Zea mays subsp. mays
  peptide (1)..(252): Ceres Seq. ID no. 12342227
TKVLVPTGRASMASSRCFENPPVLEPASGGGEVVDDFGGQKAYVSGSAGSKAAVVLISDAFGFEAPNLRKIADKVASLGYFVVVPDFLHGDPYDPSNNAHSNPGTWIQSHNPQTAFEEAKPVIAAIKEKGVSSIGAAGYCWGAKVVVELAKVHEIQAAVLAHPSLLTVDDMKDVKCPISILGAEIDRSAPPELLKQFEQVLSANPEVDHFVKVFPGVAHGWAVRYSDDDAAAVTSAEEALRDMSHWFNKYLN

SEQ ID NO: 11584 - protein, 241 aa, Zea mays subsp. mays
  peptide (1)..(241): Ceres Seq. ID no. 12342228
MASSRCFENPPVLEPASGGGEVVDDFGGQKAYVSGSAGSKAAVVLISDAFGFEAPNLRKIADKVASLGYFVVVPDFLHGDPYDPSNNAHSNPGTWIQSHNPQTAFEEAKPVIAAIKEKGVSSIGAAGYCWGAKVVVELAKVHEIQAAVLAHPSLLTVDDMKDVKCPISILGAEIDRSAPPELLKQFEQVLSANPEVDHFVKVFPGVAHGWAVRYSDDDAAAVTSAEEALRDMSHWFNKYLN

SEQ ID NO: 11585 - DNA, 771 bp, Zea mays subsp. mays
  misc_feature (1)..(771): Ceres Seq. ID no. 13492223
  misc_feature (1)..(771): Ortholog of  Ceres SEQ ID NO 12598105 as cited in SEQ ID NO 61032
gcgaaaacgcgagcgctgcggaacaacgatggcgacgatgtctcttgccgcggcgtcacccctcgcctccattccccgcggcatcgccgctcaggctccttgcgcggcattcctgtccatccgcttaggtggcgcgacggcgacgcggttcgctggactggcggtggcctcgcagccagcggagcgtcgcgccgcggcgatggtcgcgatggcgaagagggagcaggagctggaggagatccgggccatgacgacggaacagatggaagaggaggtggtagacctcaagggggagcttttcctgctccgccttaagcgctcggcgcgccaggagttcaagaacagcgagttcagccgcatgcgcaagaggattgctcgtatgctaaccgtgaaaagagagcgggaaattgaacaaggaatcaataaaagattgtctaggaagcttgataggaaatggaagcagagcattgtggtcagaccaccaccatctctaagggggaacaaagaggagtagaaagccgcaaaaagagggcaatgtgcaaaagtcgtttcatgcgagtgttgcaggaaggtcccttcatgatttcaacccttattgcgttgttatgtattccatgtttacattttgctaagcattgctatctgaatctgaatttcagttgttagtctcttctgtaaattttgacttatttaaatttacacttctatctgtgttatcagtaattgaggatggccagtcatttgcacctggaaggtgcatgcttccttgcc

SEQ ID NO: 11586 - protein, 170 aa, Zea mays subsp. mays
  peptide (1)..(170): Ceres Seq. ID no. 13492224
RKRERCGTTMATMSLAAASPLASIPRGIAAQAPCAAFLSIRLGGATATRFAGLAVASQPAERRAAAMVAMAKREQELEEIRAMTTEQMEEEVVDLKGELFLLRLKRSARQEFKNSEFSRMRKRIARMLTVKREREIEQGINKRLSRKLDRKWKQSIVVRPPPSLRGNKEE

SEQ ID NO: 11587 - protein, 161 aa, Zea mays subsp. mays
  peptide (1)..(161): Ceres Seq. ID no. 13492225
MATMSLAAASPLASIPRGIAAQAPCAAFLSIRLGGATATRFAGLAVASQPAERRAAAMVAMAKREQELEEIRAMTTEQMEEEVVDLKGELFLLRLKRSARQEFKNSEFSRMRKRIARMLTVKREREIEQGINKRLSRKLDRKWKQSIVVRPPPSLRGNKEE

SEQ ID NO: 11588 - protein, 158 aa, Zea mays subsp. mays
  peptide (1)..(158): Ceres Seq. ID no. 13492226
MSLAAASPLASIPRGIAAQAPCAAFLSIRLGGATATRFAGLAVASQPAERRAAAMVAMAKREQELEEIRAMTTEQMEEEVVDLKGELFLLRLKRSARQEFKNSEFSRMRKRIARMLTVKREREIEQGINKRLSRKLDRKWKQSIVVRPPPSLRGNKEE

SEQ ID NO: 11589 - DNA, 1136 bp, Zea mays subsp. mays
  misc_feature (1)..(1136): Ceres Seq. ID no. 12411807
  misc_feature (1)..(1136): Ortholog of  Ceres SEQ ID NO 13491587 as cited in SEQ ID NO 20500
  misc_feature (1)..(1136): Ortholog of  Ceres SEQ ID NO 15169711 as cited in SEQ ID NO 54274
atcctcgctggctatacgtctcccctccgcgcacaaaaaccctagcacgcaggcgcagccaggcctgcacccaaagcttccggagaattcctcccttgccccgccgtcgcatcctcttcgaagttcgaatcgaatcgcgccgcgatcacccacctcatggcggacaaggagcctgtcgtggagcggccagaggcgggtgaggaggaggaggacgcctcagccgccgccgccgcgggggaggaggaggacacgggcgcccaggtggctcccatcgtgcggcttgaggaggtagccgtcaccaccggcgaggaggacgaggacgtcctgctcgacatgaaggcgaagctgtaccgattcgacaaagacggtaaccaatggaaggaacggggcacgggcgctgtcaagcttctcaagcacaagcagaccggcaaggtccgcctagtcatgcgccaggctaaaacgcttaagatctgcgcgaaccacctcgtggcctccaccacgaagatgcaggagcatgcgggcagcgacaagtcgtgtgtttggcacgctgctgactttgccgatggcgaacttaaggaggagatgtttgccatcaggtttggttcggtagaaaactgcaagaagttcaaggagttggttgaggagatagctgagtcgcttacaaagaacgagggcaaggaaggtgaagatggtggttccacggctggattgctggcgaagctcactgtgagcgagggcaaatctgagggaagtggcaagtctgagtccactgattctggcaaagtgactgaaaccaaagccgacacagccccagctgagtagttggtgtggttgcacttgcacgcagattcgcctggtgctgaactagtttgtctgtccgcgtccagtggaagtttggtgccctttagccatggaatacgattgctatcatttgggcccgggccgagttggaggagtctcaggtgttcggtctggtttggtccgggcttgattttgctaaaaacttgggagtccatgggggttgggaacgtttgatatgtgagtcgctagtatttaactgcatggatcgttgtggattgcggtaaattcataaagtggaccctatatattttttatttcgttcaatacacattcat

SEQ ID NO: 11590 - protein, 221 aa, Zea mays subsp. mays
  peptide (1)..(221): Ceres Seq. ID no. 12411808
MADKEPVVERPEAGEEEEDASAAAAAGEEEDTGAQVAPIVRLEEVAVTTGEEDEDVLLDMKAKLYRFDKDGNQWKERGTGAVKLLKHKQTGKVRLVMRQAKTLKICANHLVASTTKMQEHAGSDKSCVWHAADFADGELKEEMFAIRFGSVENCKKFKELVEEIAESLTKNEGKEGEDGGSTAGLLAKLTVSEGKSEGSGKSESTDSGKVTETKADTAPAE

SEQ ID NO: 11591 - protein, 162 aa, Zea mays subsp. mays
  peptide (1)..(162): Ceres Seq. ID no. 12411809
MKAKLYRFDKDGNQWKERGTGAVKLLKHKQTGKVRLVMRQAKTLKICANHLVASTTKMQEHAGSDKSCVWHAADFADGELKEEMFAIRFGSVENCKKFKELVEEIAESLTKNEGKEGEDGGSTAGLLAKLTVSEGKSEGSGKSESTDSGKVTETKADTAPAE

SEQ ID NO: 11592 - protein, 125 aa, Zea mays subsp. mays
  peptide (1)..(125): Ceres Seq. ID no. 12411810
MRQAKTLKICANHLVASTTKMQEHAGSDKSCVWHAADFADGELKEEMFAIRFGSVENCKKFKELVEEIAESLTKNEGKEGEDGGSTAGLLAKLTVSEGKSEGSGKSESTDSGKVTETKADTAPAE

SEQ ID NO: 11593 - DNA, 1135 bp, Zea mays subsp. mays
  misc_feature (1)..(1135): Ceres Seq. ID no. 12408002
  misc_feature (1)..(1135): Ortholog of  Ceres SEQ ID NO 12583413 as cited in SEQ ID NO 56816
  misc_feature (1)..(1135): Ortholog of  Ceres SEQ ID NO 15168480 as cited in SEQ ID NO 57927
  misc_feature (1)..(1135): Ortholog of  Ceres SEQ ID NO 15177738 as cited in SEQ ID NO 0
acgacgccgccaccacctgccccagcagcggcacgctccgacaacgtcgaccatggcggtgcgggcgcgggggctggggagtctgttccctgctagatccagtagatggccgactcatcgaggccctccgtgaacatcatctgcgccggtcgtctgctcggctgcagtggattaggtgagcggggttccggtagaggattgtttagtttgggattctaggttcctcgctcccgtgccggagacgacgctagacgatgaggtcagtgccgcggcggcgcggcgcgtcgcagagatgaaggcgcggaagcggtccgagcggcgcacctacctggtggccgccgtgatgtccaggctcggggtcacgtccatggccgtcgccgccgtgtactatcgcttcagctggcaaatggagggcggcgcggtcccggtgagcgagatgttcggcacgtttgcgctctccgtcggcgcggcggtcgggatggagttctgggcgcggtgggcgcaccgggcgctatggcacgcctccctgtggcacatgcacgagtcgcaccaccggtcgtgcgagggcccattcgagctcaacgacgtgttcgccatcgtcaacgccgtgccggccatctccctcctcggtgacgtcgcgagcagatacaccatatggacaattttgagggcgtcccgtatgggctcttcctgggaccaaaggagctggaggaggtcggtggcctggacgagctggaaaaggagctcgcgcgaatcggccagaccatctgatggatttgtccggattccggcgcggcgatctccgctccgctccgtgattccggcgcagcctcatggttggggagccgacgaccagaacctccagaagggatttggtttggatgcgcgagcgtagatcttgacctgcatttcggatggtctgtggaggcatagctcgtacctggagatgtctggtgccatggaattacttttcttttcttcttttcctgacattttcatgccggcgtctttatttgtggagacgtcgcacgttctggcccctgtattactgttcttatggctaggattctgtatataacttgtagagacatgttatgaaccaccagctcaatgaagctaaaaattcggtggttgg

SEQ ID NO: 11594 - protein, 200 aa, Zea mays subsp. mays
  peptide (1)..(200): Ceres Seq. ID no. 12408003
MKARKRSERRTYLVAAVMSRLGVTSMAVAAVYYRFSWQMEGGAVPVSEMFGTFALSVGAAVGMEFWARWAHRALWHASLWHMHESHHRSCEGPFELNDVFAIVNAVPAISLLGDVASRYTIWTILRASRMGSSWDQRSWRRSVAWTSWKRSSRESARPSDGFVRIPARRSPLRSVIPAQPHGWGADDQNLQKGFGLDARA

SEQ ID NO: 11595 - protein, 183 aa, Zea mays subsp. mays
  peptide (1)..(183): Ceres Seq. ID no. 12408004
MSRLGVTSMAVAAVYYRFSWQMEGGAVPVSEMFGTFALSVGAAVGMEFWARWAHRALWHASLWHMHESHHRSCEGPFELNDVFAIVNAVPAISLLGDVASRYTIWTILRASRMGSSWDQRSWRRSVAWTSWKRSSRESARPSDGFVRIPARRSPLRSVIPAQPHGWGADDQNLQKGFGLDARA

SEQ ID NO: 11596 - protein, 175 aa, Zea mays subsp. mays
  peptide (1)..(175): Ceres Seq. ID no. 12408005
MAVAAVYYRFSWQMEGGAVPVSEMFGTFALSVGAAVGMEFWARWAHRALWHASLWHMHESHHRSCEGPFELNDVFAIVNAVPAISLLGDVASRYTIWTILRASRMGSSWDQRSWRRSVAWTSWKRSSRESARPSDGFVRIPARRSPLRSVIPAQPHGWGADDQNLQKGFGLDARA

SEQ ID NO: 11597 - DNA, 1682 bp, Zea mays subsp. mays; identical to SEQ ID NO: 1677
  misc_feature (1)..(1682): Ceres Seq. ID no. 13577771
  misc_feature (1)..(1682): Ortholog of  Ceres SEQ ID NO 13599602 as cited in SEQ ID NO 0

SEQ ID NO: 11598 - protein, 319 aa, Zea mays subsp. mays; identical to SEQ ID NO: 1678
  peptide (1)..(319): Ceres Seq. ID no. 13577772

SEQ ID NO: 11599 - protein, 299 aa, Zea mays subsp. mays; identical to SEQ ID NO: 1679
  peptide (1)..(299): Ceres Seq. ID no. 13577773

SEQ ID NO: 11600 - protein, 221 aa, Zea mays subsp. mays; identical to SEQ ID NO: 1680
  peptide (1)..(221): Ceres Seq. ID no. 13577774

SEQ ID NO: 11601 - DNA, 625 bp, Zea mays subsp. mays
  misc_feature (1)..(625): Ceres Seq. ID no. 12414401
  misc_feature (1)..(625): Ortholog of  Ceres SEQ ID NO 13503305 as cited in SEQ ID NO 58293
aaaggaggcactggacgcggacatccaggaccgcgtcatgaaggagcgggagatgcagagctacatcgcggagcgcgagcgcgaggttgccgagagggaggccgcgtggaaggccgagctctcccgccgcgaggctgagatcgcgaggcaggaggcgaggctgaaggtggagagggagaacctggagaaagagaagagcgtcctcatggggacggcttcgagccaggacagccaagacggagcgctggagatcaccgtcagcggcgagaagtacaggtgcctccggttctcgaaggcgaagaagtgagaggttgaaccagaacgacacagtcactcagggtcaggggggtagtggtacaccgaaatctcagtttggaggctagtgtaagagtatctgtcaatctggcacacaggctgtcgctgtacgtgctggtttgatgctcactgcgtcgtgcgtcctcattgatgatttaacgatagggtcattgaaccagcgcacaacctgagaaaatggttgcgctgtccgtcctggggtcacggtagcatgaacctcacaactgataacctctgtttcggacggatacaatcgggttgaatgggagcctttcgtgtgcatgtggaaggt

SEQ ID NO: 11602 - protein, 101 aa, Zea mays subsp. mays
  peptide (1)..(101): Ceres Seq. ID no. 12414402
KEALDADIQDRVMKEREMQSYIAEREREVAEREAAWKAELSRREAEIARQEARLKVERENLEKEKSVLMGTASSQDSQDGALEITVSGEKYRCLRFSKAKK

SEQ ID NO: 11603 - protein, 89 aa, Zea mays subsp. mays
  peptide (1)..(89): Ceres Seq. ID no. 12414403
MKEREMQSYIAEREREVAEREAAWKAELSRREAEIARQEARLKVERENLEKEKSVLMGTASSQDSQDGALEITVSGEKYRCLRFSKAKK

SEQ ID NO: 11604 - protein, 84 aa, Zea mays subsp. mays
  peptide (1)..(84): Ceres Seq. ID no. 12414404
MQSYIAEREREVAEREAAWKAELSRREAEIARQEARLKVERENLEKEKSVLMGTASSQDSQDGALEITVSGEKYRCLRFSKAKK

SEQ ID NO: 11605 - DNA, 592 bp, Zea mays subsp. mays
  misc_feature (1)..(592): Ceres Seq. ID no. 12566495
  misc_feature (1)..(592): Ortholog of  Ceres SEQ ID NO 14315684 as cited in SEQ ID NO 53131
  misc_feature (1)..(592): Ortholog of  Ceres SEQ ID NO 13583037 as cited in SEQ ID NO 67953
aaaaagcccaaacccgcatctacgttctactcccactcgcggtcgcggtagccggcggcggcggaggaggaaagcaggcaggccatggcgtcgtcgtcgtcgaccccggcggccgtccgcgagatgcagaaggatctcgaggtccaggccaacgccctcagcaagatccagaaagacatcgccaagaaccaccaggtccgcaagcagtacaccatccaggtcggcgagaacgagctcgtcctcaaggagctggagctgctcagcgatggggccaacgtgtacaagctcatcggaccggtgctggtcaagcaggacctcgcggaggccaaggccaacgtcaagaagcgcatcgagtacatctccgcagagctgaagcggatggatcgggcgctcaaagacttggaggaaaagcaaaacagcaagaaggaatcgatattcaagttgcagcagaggatgcaggctgtacaagctaaggcttagacaactgtttgttggttgcaactagtccaaggccatgcttcatttcatcccaattccctccaggtttttttttggtggggaggaatcaggtgtctgatgttctcgtctccgc

SEQ ID NO: 11606 - protein, 156 aa, Zea mays subsp. mays
  peptide (1)..(156): Ceres Seq. ID no. 12566496
KAQTRIYVLLPLAVAVAGGGGGGKQAGHGVVVVDPGGRPRDAEGSRGPGQRPQQDPERHRQEPPGPQAVHHPGRRERARPQGAGAAQRWGQRVQAHRTGAGQAGPRGGQGQRQEAHRVHLRRAEADGSGAQRLGGKAKQQEGIDIQVAAEDAGCTS

SEQ ID NO: 11607 - protein, 131 aa, Zea mays subsp. mays
  peptide (1)..(131): Ceres Seq. ID no. 12566497
MASSSSTPAAVREMQKDLEVQANALSKIQKDIAKNHQVRKQYTIQVGENELVLKELELLSDGANVYKLIGPVLVKQDLAEAKANVKKRIEYISAELKRMDRALKDLEEKQNSKKESIFKLQQRMQAVQAKA

SEQ ID NO: 11608 - protein, 123 aa, Zea mays subsp. mays
  peptide (1)..(123): Ceres Seq. ID no. 12566498
KSPNPHLRSTPTRGRGSRRRRRRKAGRPWRRRRRPRRPSARCRRISRSRPTPSARSRKTSPRTTRSASSTPSRSARTSSSSRSWSCSAMGPTCTSSSDRCWSSRTSRRPRPTSRSASSTSPQS

SEQ ID NO: 11609 - DNA, 1295 bp, Zea mays subsp. mays
  misc_feature (1)..(1295): Ceres Seq. ID no. 12366636
  misc_feature (1)..(1295): Ortholog of  Ceres SEQ ID NO 14301696 as cited in SEQ ID NO 67215
aggctcaatcgatcagactccttttaactccaccactccattgtccattccctggctgcctctcgttgctgttgttgttgctgctcttctctaccttgctttcccccaataggcctctctgcactcttgagcttctttgccttgttggacttggtagctgtggcgctgcagaaatgggcgctccctaccacctccaatcaccaagaaccatcataaccaaggtaatgagcatgaagcagctgccaccggccctgccacagccgccgccggtggatcagtccgaggtaaccgagcagacaccggtgctgccacggtcgcagccggtggatccacccacgataaccgggcagccacaggcgccgcggcagccagcgcgggcgccttccaagttaatcctgcaaccgcgccagcggacctcgccggcgatgtggtgcgcggccatcggctgcttcgccttcagcatcctcctcatcgtcgcaggcgtcgtcaccctggtcgtcttcctggcggtgaagccgaggccgccgtccttcgacgccgccaacgccatcctcaacagcgtctacgtggactcgccggccccctacttcaacaatgacatgacgctcgttgccaacgtctccaaccccaaccgggagatcgacttggtgttccggtccgccactgtcgagctcttcttccaggacaggcccatggccgtgcaggcgctgcctccgttcgcgcagcggcgaggccagtcccagctcctgaacatgcacctgctctccagccgggtcctgctgccgccccaggtggcggtaaagatggtggaccaggtgaggagcaacagggtggtgtacacgatcagaggcgccttcaaagtggaggccaggttcaggttcggccactactcgtactggatgtacacggtctgtcagctggaactcactgcccctccttctggagttcttgttgcccggagatgcacaacaaaatgactggctctagaaaaaatcccctcgttttcttttgttattatatatcaaatcttagctatttttatactgatgatggaaatggcccgagaacagcggaacgtacctattgttgattcatgtgaattcgaagttggttcttcagctttgtcgatctcttggctgctcagttgttgctgcgtcctagtggctagctgcaacaacacacagtaggtcagtagcttagatcttaagcaacctgaacagagttcaacaaagtgtgtaatgtacagcatagaactctttgcttgagtgtaagcagtacagtggattttttttctc

SEQ ID NO: 11610 - protein, 324 aa, Zea mays subsp. mays
  peptide (1)..(324): Ceres Seq. ID no. 12366637
AQSIRLLLTPPLHCPFPGCLSLLLLLLLFSTLLSPNRPLCTLELLCLVGLGSCGAAEMGAPYHLQSPRTIITKVMSMKQLPPALPQPPPVDQSEVTEQTPVLPRSQPVDPPTITGQPQAPRQPARAPSKLILQPRQRTSPAMWCAAIGCFAFSILLIVAGVVTLVVFLAVKPRPPSFDAANAILNSVYVDSPAPYFNNDMTLVANVSNPNREIDLVFRSATVELFFQDRPMAVQALPPFAQRRGQSQLLNMHLLSSRVLLPPQVAVKMVDQVRSNRVVYTIRGAFKVEARFRFGHYSYWMYTVCQLELTAPPSGVLVARRCTTK

SEQ ID NO: 11611 - protein, 267 aa, Zea mays subsp. mays
  peptide (1)..(267): Ceres Seq. ID no. 12366638
MGAPYHLQSPRTIITKVMSMKQLPPALPQPPPVDQSEVTEQTPVLPRSQPVDPPTITGQPQAPRQPARAPSKLILQPRQRTSPAMWCAAIGCFAFSILLIVAGVVTLVVFLAVKPRPPSFDAANAILNSVYVDSPAPYFNNDMTLVANVSNPNREIDLVFRSATVELFFQDRPMAVQALPPFAQRRGQSQLLNMHLLSSRVLLPPQVAVKMVDQVRSNRVVYTIRGAFKVEARFRFGHYSYWMYTVCQLELTAPPSGVLVARRCTTK

SEQ ID NO: 11612 - protein, 250 aa, Zea mays subsp. mays
  peptide (1)..(250): Ceres Seq. ID no. 12366639
MSMKQLPPALPQPPPVDQSEVTEQTPVLPRSQPVDPPTITGQPQAPRQPARAPSKLILQPRQRTSPAMWCAAIGCFAFSILLIVAGVVTLVVFLAVKPRPPSFDAANAILNSVYVDSPAPYFNNDMTLVANVSNPNREIDLVFRSATVELFFQDRPMAVQALPPFAQRRGQSQLLNMHLLSSRVLLPPQVAVKMVDQVRSNRVVYTIRGAFKVEARFRFGHYSYWMYTVCQLELTAPPSGVLVARRCTTK

SEQ ID NO: 11613 - DNA, 948 bp, Zea mays subsp. mays
  misc_feature (1)..(948): Ceres Seq. ID no. 12413666
  misc_feature (1)..(948): Ortholog of  Ceres SEQ ID NO 15169153 as cited in SEQ ID NO 56962
gcatttgcgcagcaaaaaggaggaaaaagtgaggagaaagaagagaggaaacaggaaagagtacaactcggcggcgacaccaccgctcgcagcctcccgccgcgatggcgatgcgttcgctcgccaggctccaccgccaactctccccttctctcctccaccgccatagcacacggcgtgggtggcctcccgcttctgacgcggcctttctctggcgcgggctcgcctcgtcatcaccttccgcggccggtcgggagaagagctcgagacggactttggggtaccttctcggcgttgcggtcgccatggtcggcgcctcgtacgccgccgtaccgctataccgtcgcttctgccaggctaccggctacggcggcaccgtccaacgacgcgagagtgtggaggagaagatctcacggcatgctcgagacggaactacgacatcacgagaaataattgttcaatttaatgctgatgttgctgatggaatgccgtggaagttcatccctacacagagagaggtcagggttaaacctggtgaaagtgctcttgctttttatactgctgagaatcgcagttcagctccaattactggtgtatccacgtataatgttgctcctatgaaggctgcgatttacttcaataagatacaatgtttctgctttgaggagcaaacacttcttcctggagaacagattgacatgccagtattcttctatatcgatcctgagtttgagacagaccccaaaatggacggggtgaacaatatcgttctttcgtacacattcttcaaggtgaacgatagttagaaaacgtgccaacagcattgttgtattaggaaaacaacacttgaacaatccatatgcagatatgctgcggaatagcatctcatgtaacaccaagagttttttttttgatagttagctcacatttgtctatggagaattttgc

SEQ ID NO: 11614 - protein, 233 aa, Zea mays subsp. mays
  peptide (1)..(233): Ceres Seq. ID no. 12413667
MAMRSLARLHRQLSPSLLHRHSTRRGWPPASDAAFLWRGLASSSPSAAGREKSSRRTLGYLLGVAVAMVGASYAAVPLYRRFCQATGYGGTVQRRESVEEKISRHARDGTTTSREIIVQFNADVADGMPWKFIPTQREVRVKPGESALAFYTAENRSSAPITGVSTYNVAPMKAAIYFNKIQCFCFEEQTLLPGEQIDMPVFFYIDPEFETDPKMDGVNNIVLSYTFFKVNDS

SEQ ID NO: 11615 - protein, 231 aa, Zea mays subsp. mays
  peptide (1)..(231): Ceres Seq. ID no. 12413668
MRSLARLHRQLSPSLLHRHSTRRGWPPASDAAFLWRGLASSSPSAAGREKSSRRTLGYLLGVAVAMVGASYAAVPLYRRFCQATGYGGTVQRRESVEEKISRHARDGTTTSREIIVQFNADVADGMPWKFIPTQREVRVKPGESALAFYTAENRSSAPITGVSTYNVAPMKAAIYFNKIQCFCFEEQTLLPGEQIDMPVFFYIDPEFETDPKMDGVNNIVLSYTFFKVNDS

SEQ ID NO: 11616 - protein, 166 aa, Zea mays subsp. mays
  peptide (1)..(166): Ceres Seq. ID no. 12413669
MVGASYAAVPLYRRFCQATGYGGTVQRRESVEEKISRHARDGTTTSREIIVQFNADVADGMPWKFIPTQREVRVKPGESALAFYTAENRSSAPITGVSTYNVAPMKAAIYFNKIQCFCFEEQTLLPGEQIDMPVFFYIDPEFETDPKMDGVNNIVLSYTFFKVNDS

SEQ ID NO: 11617 - DNA, 1097 bp, Zea mays subsp. mays; identical to SEQ ID NO: 3807
  misc_feature (1)..(1097): Ceres Seq. ID no. 13494437
  misc_feature (1)..(1097): Ortholog of  Ceres SEQ ID NO 14304202 as cited in SEQ ID NO 56346
  misc_feature (1)..(1097): Ortholog of  Ceres SEQ ID NO 12613472 as cited in SEQ ID NO 60611

SEQ ID NO: 11618 - protein, 225 aa, Zea mays subsp. mays; identical to SEQ ID NO: 3808
  peptide (1)..(225): Ceres Seq. ID no. 13494438

SEQ ID NO: 11619 - protein, 149 aa, Zea mays subsp. mays; identical to SEQ ID NO: 3809
  peptide (1)..(149): Ceres Seq. ID no. 13494439

SEQ ID NO: 11620 - protein, 125 aa, Zea mays subsp. mays; identical to SEQ ID NO: 3810
  peptide (1)..(125): Ceres Seq. ID no. 13494440

SEQ ID NO: 11621 - DNA, 576 bp, Zea mays subsp. mays
  misc_feature (1)..(576): Ceres Seq. ID no. 13498290
  misc_feature (1)..(576): Ortholog of  Ceres SEQ ID NO 14303109 as cited in SEQ ID NO 66330
ttgtagaactgtgggcgaagcaaggcaggctcattaggatgcacgagcaagcatcagcgatcgtcaggtatgagctaagtcgaatatcagctggtgtgttcattgcacttggtaaaggaaaagtgcagtgtcgtggtgacgtacgaagcctcctctttcatggatggttcagcacaatgttgttggattttggctggcttcagcgctgccccaaaggtctcgacctaagatcgttggaggagaatttagggcgaggccttttaaccctccctctcaggcagcagcaatgtttgttcgaggaatggttccagttctatgcgaccaaaggacccgagtgtccgaaccttattagagctttccaggtatggtggagaaggtctttcattagatcattggtagaacctcaaaactaagtttttccttgatgtactagtatgttgcgtgtatgatttgtaaaattgcaactgttctgatgacccttaaaaatgttttttcgtttgtagtttagttcttcccattgtatgtgaatagctggatgaatttgcttgaggataacatctgcggcgtggagtatgt

SEQ ID NO: 11622 - protein, 136 aa, Zea mays subsp. mays
  peptide (1)..(136): Ceres Seq. ID no. 13498291
VELWAKQGRLIRMHEQASAIVRYELSRISAGVFIALGKGKVQCRGDVRSLLFHGWFSTMLLDFGWLQRCPKGLDLRSLEENLGRGLLTLPLRQQQCLFEEWFQFYATKGPECPNLIRAFQVWWRRSFIRSLVEPQN

SEQ ID NO: 11623 - protein, 124 aa, Zea mays subsp. mays
  peptide (1)..(124): Ceres Seq. ID no. 13498292
MHEQASAIVRYELSRISAGVFIALGKGKVQCRGDVRSLLFHGWFSTMLLDFGWLQRCPKGLDLRSLEENLGRGLLTLPLRQQQCLFEEWFQFYATKGPECPNLIRAFQVWWRRSFIRSLVEPQN

SEQ ID NO: 11624 - protein, 78 aa, Zea mays subsp. mays
  peptide (1)..(78): Ceres Seq. ID no. 13498293
MLLDFGWLQRCPKGLDLRSLEENLGRGLLTLPLRQQQCLFEEWFQFYATKGPECPNLIRAFQVWWRRSFIRSLVEPQN

SEQ ID NO: 11625 - DNA, 1001 bp, Zea mays subsp. mays
  misc_feature (1)..(1001): Ceres Seq. ID no. 13492971
  misc_feature (1)..(1001): Ortholog of  Ceres SEQ ID NO 15224382 as cited in SEQ ID NO 65962
  misc_feature (1)..(1001): Ortholog of  Ceres SEQ ID NO 15174380 as cited in SEQ ID NO 0
ctcaggctctcagctcagctgcgtcctcctgccacccatggcaaacgcttctctgcaatccttccttctcccgcacgaccattctttcgccggcgccggcggcagccgtgacggctccgcgtccgccgtgcacaagctctccaccaacaccagcggcagcatttccttcaggctctacaccaaaacctccccctcggtgacagcagcctcagccaccaattcgtcagctccgactccagttgccccggcatctgcaccagcggcaggggacgaagaagaagaagaaggcccctctctcgacctcctccgccgccagctcgccgcgggcgactaccggcaggcggacgagaccacgcgggcgctgatcatcgacctcgccggcgagcccgcgaggcgccgagggtacgtcttcttctccgaggtccagttcatcccggccgaggacctcgccgccatcgacgggctctggaaggagcacagcggcggcaggttcgggtacagcgtgcagcggcggctctgggagaagtcgcggcgcgacttcacccgcttcttcatccgggtcggctggatgaggaagctggacacggaggtggagcagtacaactacagggccttccccgacgagttcatgtgggaattgacggacgacacgcccgagggacacctgccgctcaccaacgccctcaggggcacgcagctcctggcgaacatcctcacccacccggccttccaggaggaggaccagggagacggagctgctgctgcagaagagagtgcaaacaccaaagatgataacaaagggagggagagacccaggtccatgagagatttcaagcctgattattctttttgattcaggctggcgaaggaaaccaaaaaaaaaaggggcatgggagtttgtggtgcagagatgctggcatggtgtaattgatttaaaagatcatgtatccgtagttctgtttgggttacttttgtcttaaaacatgcatggaagcttgtgt

SEQ ID NO: 11626 - protein, 283 aa, Zea mays subsp. mays
  peptide (1)..(283): Ceres Seq. ID no. 13492972
SGSQLSCVLLPPMANASLQSFLLPHDHSFAGAGGSRDGSASAVHKLSTNTSGSISFRLYTKTSPSVTAASATNSSAPTPVAPASAPAAGDEEEEEGPSLDLLRRQLAAGDYRQADETTRALIIDLAGEPARRRGYVFFSEVQFIPAEDLAAIDGLWKEHSGGRFGYSVQRRLWEKSRRDFTRFFIRVGWMRKLDTEVEQYNYRAFPDEFMWELTDDTPEGHLPLTNALRGTQLLANILTHPAFQEEDQGDGAAAAEESANTKDDNKGRERPRSMRDFKPDYSF

SEQ ID NO: 11627 - protein, 271 aa, Zea mays subsp. mays
  peptide (1)..(271): Ceres Seq. ID no. 13492973
MANASLQSFLLPHDHSFAGAGGSRDGSASAVHKLSTNTSGSISFRLYTKTSPSVTAASATNSSAPTPVAPASAPAAGDEEEEEGPSLDLLRRQLAAGDYRQADETTRALIIDLAGEPARRRGYVFFSEVQFIPAEDLAAIDGLWKEHSGGRFGYSVQRRLWEKSRRDFTRFFIRVGWMRKLDTEVEQYNYRAFPDEFMWELTDDTPEGHLPLTNALRGTQLLANILTHPAFQEEDQGDGAAAAEESANTKDDNKGRERPRSMRDFKPDYSF

SEQ ID NO: 11628 - DNA, 904 bp, Zea mays subsp. mays
  misc_feature (1)..(904): Ceres Seq. ID no. 12403630
  misc_feature (1)..(904): Ortholog of  Ceres SEQ ID NO 15173764 as cited in SEQ ID NO 57550
  misc_feature (1)..(904): Ortholog of  Ceres SEQ ID NO 15227118 as cited in SEQ ID NO 59038
  misc_feature (1)..(904): Ortholog of  Ceres SEQ ID NO 13597299 as cited in SEQ ID NO 63785
  misc_feature (1)..(904): Ortholog of  Ceres SEQ ID NO 13663895 as cited in SEQ ID NO 66923
aattctggttctagggagcccgcaggaaggcacctctgcggcgaccagcgtgaagaaaggggatcggaacgcctccatctcaaaccccacgaaggcacgaaccctctcttcctaggttcatcgttcctcctccgcgtccttccttccctccgcagcgcggcgcggcgcggcgcgatgatacagctgctcttcacgctgctagcggcggagggcgccgtggcggcggtgctactcttcaagacgccgctgcggaggctggccgtgctcgcgctcgaccacctcaagcggggccgcgggcccgtcatggtgcgcaccatcgcggccaccgtgcttgtcgtgctcgcatccagtctccacagcatggccaagatccgcggccacgccgagggggagctcgacggctccggggtcgtggggctcacccccaccgaccaggtccttcttgcgcgacacctcctcgaggcgtcactcatgggatactccttattccttgctttagtcattgaccggctgcacaactatgtcaaagaaaatcgaaggctcaggaagaaattggaagaggtgttgaaacagaataaggcactagaagaagcaacaaatggaaagctagaagagaacaggcctgaccagaaagacctttcccatgccaaggataattaacaatgacatgcgctcaagaaactccctgccatcactgcctatgcctgaataggatgccggtcactgatgttctccctgttgagaattagcattggtaaatgaatgctcggttacaacgtgctaaatcctttgcatctggccaaatttgtaaataagcactgggtgatgcccatcagtaaacacatgatgctactgctgttaaactaaatgtggcaaatttcataatgctaggtattgttctcgg

SEQ ID NO: 11629 - protein, 219 aa, Zea mays subsp. mays
  peptide (1)..(219): Ceres Seq. ID no. 12403631
NSGSREPAGRHLCGDQREERGSERLHLKPHEGTNPLFLGSSFLLRVLPSLRSAARRGAMIQLLFTLLAAEGAVAAVLLFKTPLRRLAVLALDHLKRGRGPVMVRTIAATVLVVLASSLHSMAKIRGHAEGELDGSGVVGLTPTDQVLLARHLLEASLMGYSLFLALVIDRLHNYVKENRRLRKKLEEVLKQNKALEEATNGKLEENRPDQKDLSHAKDN

SEQ ID NO: 11630 - protein, 161 aa, Zea mays subsp. mays
  peptide (1)..(161): Ceres Seq. ID no. 12403632
MIQLLFTLLAAEGAVAAVLLFKTPLRRLAVLALDHLKRGRGPVMVRTIAATVLVVLASSLHSMAKIRGHAEGELDGSGVVGLTPTDQVLLARHLLEASLMGYSLFLALVIDRLHNYVKENRRLRKKLEEVLKQNKALEEATNGKLEENRPDQKDLSHAKDN

SEQ ID NO: 11631 - protein, 118 aa, Zea mays subsp. mays
  peptide (1)..(118): Ceres Seq. ID no. 12403633
MVRTIAATVLVVLASSLHSMAKIRGHAEGELDGSGVVGLTPTDQVLLARHLLEASLMGYSLFLALVIDRLHNYVKENRRLRKKLEEVLKQNKALEEATNGKLEENRPDQKDLSHAKDN

SEQ ID NO: 11632 - DNA, 1426 bp, Zea mays subsp. mays
  misc_feature (1)..(1426): Ceres Seq. ID no. 12341231
  misc_feature (1)..(1426): Ortholog of  Ceres SEQ ID NO 15177842 as cited in SEQ ID NO 51547
  misc_feature (1)..(1426): Ortholog of  Ceres SEQ ID NO 13594859 as cited in SEQ ID NO 51974
  misc_feature (1)..(1426): Ortholog of  Ceres SEQ ID NO 13597887 as cited in SEQ ID NO 64295
gaacttgaactggagaggcagtagccagagtgtgagctgacggcggacgtgctcgcctctcctctcctcacatttccggctcccctctccgcattccatggcaccgcattaccggtatttttagccgccggaggagacgggttgcgtagagagagggaaaaccagagctcctgactgttcctctctccctcctcacgggcgggctccgtctgttccgtccatccaccgccccggtcgtctcccggccagatccctctcctgcaaggtttctttgcgagtggccggagaagatgatgggcgggttcctctccagggtcctcctgctggcttttggctatgcctatcctgcctatgaatgctacaagaccgttgaactgaacaaaccacagattgagcagctcatattttggtgtcagtattggattttagttgccctgttgacagttttggagagatttggagattttacaatatcatggctaccgttttactcagaagcaaaggtgttgttctttgtatatttgtggtaccctaagacaaagggaactacgtatgtttatggaactttctttaagccatatatttctcagcatgagaatgaaatcgaccgaaatcttcttgagctcagagctcgagccaccgatatggttgtcctttacttccataaggctgcttcggtagggcaaaatactttctttgacgttttaaaatatgttgctgcccagtccccttctcggaaatcaagactgcaccctcatcaggaaccacagcagcagcaaccacaagtgcaggtggagctgcagcagccgcaaccacaaaaacaagcagcacctgttatgcgcagaggagcatctattgctgctcggcaagcagcaatggcacagcaatctctggagactatacccgttccatcttcacccaagatcaagcgtcaaacatcagggagacctggttcggtggcatccacaaagcctgcagcagctgcatccacaccaaaacctggcggtagcccaaagaaaggtgaggtcaaacctgctgtcgacccagttcaaactccagccacaagtgcagattcaccaaaatccgagcctagcgccccaccactttctgagaccgaaggagtagacaacatggcaatcgatgaggtcagtggtgatgctgcagagggcgcggaagagcttgaccctgcgctcgaggagacgccgatggaggagacaatccgtgtgacgcgcgccaagctaaggaggcgcaccgccaccgaggattctgctgggaattagctgcatgccgttgttttccctgcacattgtattgatctttttccgagttttaggctcacatgttgtttgctggaatggagatatgttgttgttcacttggttcttgtgacacagagttaattatcttatttccgtgctttcttagt

SEQ ID NO: 11633 - protein, 329 aa, Zea mays subsp. mays
  peptide (1)..(329): Ceres Seq. ID no. 12341232
MMGGFLSRVLLLAFGYAYPAYECYKTVELNKPQIEQLIFWCQYWILVALLTVLERFGDFTISWLPFYSEAKVLFFVYLWYPKTKGTTYVYGTFFKPYISQHENEIDRNLLELRARATDMVVLYFHKAASVGQNTFFDVLKYVAAQSPSRKSRLHPHQEPQQQQPQVQVELQQPQPQKQAAPVMRRGASIAARQAAMAQQSLETIPVPSSPKIKRQTSGRPGSVASTKPAAAASTPKPGGSPKKGEVKPAVDPVQTPATSADSPKSEPSAPPLSETEGVDNMAIDEVSGDAAEGAEELDPALEETPMEETIRVTRAKLRRRTATEDSAGN

SEQ ID NO: 11634 - protein, 328 aa, Zea mays subsp. mays
  peptide (1)..(328): Ceres Seq. ID no. 12341233
MGGFLSRVLLLAFGYAYPAYECYKTVELNKPQIEQLIFWCQYWILVALLTVLERFGDFTISWLPFYSEAKVLFFVYLWYPKTKGTTYVYGTFFKPYISQHENEIDRNLLELRARATDMVVLYFHKAASVGQNTFFDVLKYVAAQSPSRKSRLHPHQEPQQQQPQVQVELQQPQPQKQAAPVMRRGASIAARQAAMAQQSLETIPVPSSPKIKRQTSGRPGSVASTKPAAAASTPKPGGSPKKGEVKPAVDPVQTPATSADSPKSEPSAPPLSETEGVDNMAIDEVSGDAAEGAEELDPALEETPMEETIRVTRAKLRRRTATEDSAGN

SEQ ID NO: 11635 - protein, 211 aa, Zea mays subsp. mays
  peptide (1)..(211): Ceres Seq. ID no. 12341234
MVVLYFHKAASVGQNTFFDVLKYVAAQSPSRKSRLHPHQEPQQQQPQVQVELQQPQPQKQAAPVMRRGASIAARQAAMAQQSLETIPVPSSPKIKRQTSGRPGSVASTKPAAAASTPKPGGSPKKGEVKPAVDPVQTPATSADSPKSEPSAPPLSETEGVDNMAIDEVSGDAAEGAEELDPALEETPMEETIRVTRAKLRRRTATEDSAGN

SEQ ID NO: 11636 - DNA, 1695 bp, Zea mays subsp. mays
  misc_feature (1)..(1695): Ceres Seq. ID no. 12406091
  misc_feature (1)..(1695): Ortholog of  Ceres SEQ ID NO 13597861 as cited in SEQ ID NO 64918
gcacgagaccattacctagaacatcctaatcaaaaagcaaaactcgactccacgcgtcgcccttcttctccggagagatcgttttaatagccccgtaccaaatccaattcgtctctcctcaccggagaacagaaacgatacggttaatagatatagcgaagaagggcagcaccaccagtagcagcagccatgcccgctcgcgctcgatggcgactcctcgcgctgccgctcgcgctcttactcgttgccgggtcggcgcatggcctcgtgaagccggaggcagccgcggcgcccaagccccccgtccccaaggccatatcggacctgagggacgcgatcgtgaaggggctgggattccaggccgaggggctcaaggtgtccgggttcgacgtgcgagacgcgctcgtggggcacgcggtggcgtacgagttcgacatcgaggtcggcaggaaggtcctaccggtgcgcctgctggaggacgtcagccggtgggacttcgtcgacctccccatcttccgttcccaggccgacgctgacgatacggcgctcgccgagatccggcgggccgggagggggagcatcgttgagcctaccctgccgccctttcagctcgccgggcccatggagctctggatccagaacggcgacgacgtcaggcttgccttgccgcatgatgtggacgctggtaccttgaagaaggttgttctttctgatggtgcagtcgtaacagtgaagggtgctagagctgtgagcctccgtttgccgcttgaattaccacttcctctcaaccgtaccacttacaagggtcgcctctcaagcctgatatccatcgcacaagccctgcgtggtgcagcccggtctaatcagaaacccctgctctctcttcgcgttgagggtccagtttccttgtcctcgactccttccatgtctcccaaggacaagctcaagctcaaacggttggccccaggccaagtggagctctcctcacaggcgggggcaatccctgctatcaccgaagacgaggatgaaccacataaccctggattgtggcctcttttgtctctgaatggttcagatggcagcctgcaggggtttgaggagctattggcctcagtacttggaaagaaggcaggcgagaagggtaccttcaagctactgaaggcacgggcctcggctcaaacctatgtcaagatggcattcacggtggagaagaagcttgctgaaggggatgtgaactggtcaaatattccagaatggaagacgaagcccaagaggatgagagcacactacgaagtccttgctcgagtggaggagggtcaggcgatccctgagaggatagcgcaggtacagcctttccaggccaacgaggccatgtcggagagtgtgctcaccggcaacgtcacgaggtcgaagatggaaatcgtccatccaccgccggtttacttcactctctgagtgagcgaagaactggatgctgtttgatgttctcttcagagctactacacgttgggtggtgggtagtttacgctggctcgtaggcaacaaagttgtacaagcggcaagagtttgttgcctatacactgactgcgttgacatgaatattgacgttctatgtgtactgaaaggctggcaagcctttaatattatcaattggaataatgaggaataagaaaaatctgtacatctttagagggc

SEQ ID NO: 11637 - protein, 421 aa, Zea mays subsp. mays
  peptide (1)..(421): Ceres Seq. ID no. 12406092
MPARARWRLLALPLALLLVAGSAHGLVKPEAAAAPKPPVPKAISDLRDAIVKGLGFQAEGLKVSGFDVRDALVGHAVAYEFDIEVGRKVLPVRLLEDVSRWDFVDLPIFRSQADADDTALAEIRRAGRGSIVEPTLPPFQLAGPMELWIQNGDDVRLALPHDVDAGTLKKVVLSDGAVVTVKGARAVSLRLPLELPLPLNRTTYKGRLSSLISIAQALRGAARSNQKPLLSLRVEGPVSLSSTPSMSPKDKLKLKRLAPGQVELSSQAGAIPAITEDEDEPHNPGLWPLLSLNGSDGSLQGFEELLASVLGKKAGEKGTFKLLKARASAQTYVKMAFTVEKKLAEGDVNWSNIPEWKTKPKRMRAHYEVLARVEEGQAIPERIAQVQPFQANEAMSESVLTGNVTRSKMEIVHPPPVYFTL

SEQ ID NO: 11638 - protein, 277 aa, Zea mays subsp. mays
  peptide (1)..(277): Ceres Seq. ID no. 12406093
MELWIQNGDDVRLALPHDVDAGTLKKVVLSDGAVVTVKGARAVSLRLPLELPLPLNRTTYKGRLSSLISIAQALRGAARSNQKPLLSLRVEGPVSLSSTPSMSPKDKLKLKRLAPGQVELSSQAGAIPAITEDEDEPHNPGLWPLLSLNGSDGSLQGFEELLASVLGKKAGEKGTFKLLKARASAQTYVKMAFTVEKKLAEGDVNWSNIPEWKTKPKRMRAHYEVLARVEEGQAIPERIAQVQPFQANEAMSESVLTGNVTRSKMEIVHPPPVYFTL

SEQ ID NO: 11639 - DNA, 793 bp, Zea mays subsp. mays
  misc_feature (1)..(793): Ceres Seq. ID no. 12355690
  misc_feature (1)..(793): Ortholog of  Ceres SEQ ID NO 12582856 as cited in SEQ ID NO 51905
  misc_feature (1)..(793): Ortholog of  Ceres SEQ ID NO 14316155 as cited in SEQ ID NO 52377
aaaccctagaaagctcttaaaaagcccccaggggccagggctagcagcggcggcgtatccctaatcccacctccagtctctgggcaccaaatttccggcggcgatggcggcggctgtggcgaggtcagggttccggcgcatgttctccgtctctgccttcgcgccgccgaaggcgcccgccgcgcgccccaaggccgacccatcccccaacctcttcgtctccggcttaagcaagcgtaccacaagtgaaggacttagagaagcctttgcggagtttggtgaagttttgcatgctcgagttgtgaccgatcgtgtcagtgggttttctaagggatttggctttgtaaggtatgctacgaccgaagaggcagccaagggaatagagggaaaggatggaaagttccttgatggatgggttatttttgcggaatacgctaaacccagaccaccaccggaggaaacagggatgaattcgcagccccagcagtcatggggagctccatcaggttcctggggtgcacagtagatgaagtgatattgtgagagcccctccctgtcccagccctagggctcgtagcggatcgtgagggatgattttgtgtggtgtgtcgcaggtgtgaaatgcctttgttgtcccaatattcctaccgtgttgggggtggtcgcttgctcgcgtccacgtctttcacatgaattggttactgtggtagttgtagttctggatacggtaccaaaacaaaagtattgctgtcaacaatctgcaacagccgggaaaacagtcgaaaacctttgc

SEQ ID NO: 11640 - protein, 140 aa, Zea mays subsp. mays; identical to SEQ ID NO: 6608
  peptide (1)..(140): Ceres Seq. ID no. 12355691

SEQ ID NO: 11641 - protein, 128 aa, Zea mays subsp. mays; identical to SEQ ID NO: 6609
  peptide (1)..(128): Ceres Seq. ID no. 12355692

SEQ ID NO: 11642 - DNA, 1134 bp, Zea mays subsp. mays
  misc_feature (1)..(1134): Ceres Seq. ID no. 12350920
  misc_feature (1)..(1134): Ortholog of  Ceres SEQ ID NO 14311568 as cited in SEQ ID NO 51732
  misc_feature (1)..(1134): Ortholog of  Ceres SEQ ID NO 14303877 as cited in SEQ ID NO 53500
  misc_feature (1)..(1134): Ortholog of  Ceres SEQ ID NO 15169781 as cited in SEQ ID NO 54829
  misc_feature (1)..(1134): Ortholog of  Ceres SEQ ID NO 15173757 as cited in SEQ ID NO 57537
  misc_feature (1)..(1134): Ortholog of  Ceres SEQ ID NO 13597743 as cited in SEQ ID NO 65452
  misc_feature (1)..(1134): Ortholog of  Ceres SEQ ID NO 13654231 as cited in SEQ ID NO 68285
atcaagcacaagcacgccacgcgatccacacacggcaagcaacgcccagggctcgtgctcgccccgcgacccgcgaaagatctgtgctggttcgctcgctcgctcgcgccgcgccgccgcgtgggggtgccgatgagctgcgcggggcaggccggcgggtggctgctcgactacgcgctggtggagtaggagatccagggctccgagttcatctacatggtcgacgacccggccgtctccagcgtgatactggggtttgatgctcccaggaaagaggacggcgtccaggacaaccccggcgccaagaagagatcccggccggagtccagcgcgccacccggcaccaaggcttgccgtgagaagctccggcgagacaggctcaacgaaaggttcaacgagctctgtgccatcttggaacccggcaagccacccaaggccgacaaagtcgctatcctaagcgacgctgcccgtctcctgaaccagctgcagggcgaggcccagaagcttaagcaatcgaacgaatcgctccaggagtccatcaagagtcttaaggctgagaagtccgagctgcgagacgagaagacgaggctcaaggctgagaaggagaggttggagcagatgctcaagggcgtcgtcagccacgccgcggtggctgctccggggcccttcgtcccgcaccctgctgcggtcgctccatctttccaccaccacccggcggcgtttgctcaggctggaaagttcgtcccgtaccccagctacccgccgccggctgcgttctggcagtggataccgccgacgtccctcgacacgaccaaggaccccgcacactggccgccggtcgcctagccgacctaccacctcaccgtggcatcattcatcggtgatgcgttgccgtgtgtactgaatttgatcgaagcatgcctgaaaaaagaaaccttggctgctgctcgtgtcaaggacgtgatgtgctgaagttcaggcgatctaggtcggctggagaagtctatgtaacagccataatgctaaagcaatgaaagtgatatattaattgaatcgggctagtgtttcctgaaactacggttatttagacattgcctggaaggctagaacaatgcaaacttgggtaacattgtg

SEQ ID NO: 11643 - protein, 209 aa, Zea mays subsp. mays
  peptide (1)..(209): Ceres Seq. ID no. 12350921
MVDDPAVSSVILGFDAPRKEDGVQDNPGAKKRSRPESSAPPGTKACREKLRRDRLNERFNELCAILEPGKPPKADKVAILSDAARLLNQLQGEAQKLKQSNESLQESIKSLKAEKSELRDEKTRLKAEKERLEQMLKGVVSHAAVAAPGPFVPHPAAVAPSFHHHPAAFAQAGKFVPYPSYPPPAAFWQWIPPTSLDTTKDPAHWPPVA

SEQ ID NO: 11644 - DNA, 772 bp, Zea mays subsp. mays
  misc_feature (1)..(772): Ceres Seq. ID no. 12379466
  misc_feature (1)..(772): Ortholog of  Ceres SEQ ID NO 14302679 as cited in SEQ ID NO 0
aacgcactgctaaaagagctcgacgactacgttgtatgctgatcgattcgtctccgatctcctccttcgaccgccgccaccttcgtctccgagactccgacgatgtcctccgccgccgatgaggatgcgttgtcgtctgacaaggggaagaagagggaggaggacggcactgacgggaggagccaacgtcaggagggtgtcgaggtggccgacgggaaagtggatctaggagacctgtacggcgcggcggcggggtgggtagaggcgcggaccagctgcccgcacatcggcaccatgccacccgctggtgctgacgacctcgcgcgcgtgccttcgcccgactctccgtgctccagatgtaatcaccctgctgaaaactggttatgcttcatatgcaaagatgtgctttgcagccgttttatcaacaaacatatgttgtgccatcatcaagaaactggtcactgtcttgctttgagcttcagtgatctgtcagtttggtgtttctcatgtgattcatacctagatgttcaagccattttagaattgcgcccagtgtatgaagttgcacatttgttgaagtttggacaacgtccaccatttcgatcacttgatgtacaggattctggcactggtgaaagtggaagtgtgtcaagggcttagttatatgtattccagtaatgagtttcttttcatgatacttcaatcagattcagacagacagttgtctactatcctggcatttcttaagctgcagtgcaatataattcatttg

SEQ ID NO: 11645 - protein, 185 aa, Zea mays subsp. mays
  peptide (1)..(185): Ceres Seq. ID no. 12379467
MSSAADEDALSSDKGKKREEDGTDGRSQRQEGVEVADGKVDLGDLYGAAAGWVEARTSCPHIGTMPPAGADDLARVPSPDSPCSRCNHPAENWLCFICKDVLCSRFINKHMLCHHQETGHCLALSFSDLSVWCFSCDSYLDVQAILELRPVYEVAHLLKFGQRPPFRSLDVQDSGTGESGSVSRA

SEQ ID NO: 11646 - protein, 121 aa, Zea mays subsp. mays
  peptide (1)..(121): Ceres Seq. ID no. 12379468
MPPAGADDLARVPSPDSPCSRCNHPAENWLCFICKDVLCSRFINKHMLCHHQETGHCLALSFSDLSVWCFSCDSYLDVQAILELRPVYEVAHLLKFGQRPPFRSLDVQDSGTGESGSVSRA

SEQ ID NO: 11647 - DNA, 1064 bp, Zea mays subsp. mays
  misc_feature (1)..(1064): Ceres Seq. ID no. 13494390
  misc_feature (1)..(1064): Ortholog of  Ceres SEQ ID NO 12625648 as cited in SEQ ID NO 63959
gaacctcctccactccagcacgtacaagagctctcgccaaagcctaaatttagctacgacccgcgtagcttctcacgtactcaccacccatggcgaagccaagtagctacggtcttgcgcttcttgcttgcgccgccgtcgccgctgcggtcgccggcggaacgcagttcacggtcggcggcgcccaatggctggagcgtgcccgccgccggcgcggagcccttcaatgcttgggcggagaggacgaggtttcagatcggagacgccctagtgttcgtgtaccccaaggaccaagacgcggtgctgctggtggagccggcgggctacaacgcgtgcaacacgtcgtcgtacgtgaggaagttcgacgacggcgacaccgtggtcgcgctcgacagcgccggcccgctcttcttcatcagtggcgtcgaggccaactgccgcgccgacgagaagctcatcgtcatggtcctcgccgcccgcagcaacggcaccggcgcgccggctccgagcacggcgcccccgcctccggctcccgccagctccgcgccgcccacgccggcgtcgcccgctcctaagggcgcccccccgaccacggcggcgtcgcctccgccgccctcggcctctgctcccgcaacgacaccggccacgccgccgcccgccgcgtcggcggcgccccctgctccgagggcgtcgtcaaccccgccgcctccatctgccccggccggtgccccgccggcgcccgcggcaagctctccggctccgagcgcacatggggcgacggataactccacgggcacgccgtcgtcgcctcccgccggctcctccaaggacaagaacggcgccgccttcacggtggccacaggtttggccagctcgttcggaacctgcatcncttgtacgccatgcttgctctctgaagtgaagtgggccgccgtggaagactccagtaaatatgtgtgtgtttacgtgtaatttaattgagacatgcgatttgtgcatgttattgctagatcttgcattcgttttccgccggatgaataagaaatcaaccattcgttattcct

SEQ ID NO: 11648 - protein, 323 aa, Zea mays subsp. mays
  peptide (1)..(323): Ceres Seq. ID no. 13494391
  misc_feature (298)..(298): Xaa is any aa, unknown or other
EPPPLQHVQELSPKPKFSYDPRSFSRTHHPWRSQVATVLRFLLAPPSPLRSPAERSSRSAAPNGWSVPAAGAEPFNAWAERTRFQIGDALVFVYPKDQDAVLLVEPAGYNACNTSSYVRKFDDGDTVVALDSAGPLFFISGVEANCRADEKLIVMVLAARSNGTGAPAPSTAPPPPAPASSAPPTPASPAPKGAPPTTAASPPPPSASAPATTPATPPPAASAAPPAPRASSTPPPPSAPAGAPPAPAASSPAPSAHGATDNSTGTPSSPPAGSSKDKNGAAFTVATGLASSFGTCIXCTPCLLSEVKWAAVEDSSKYVCVYV

SEQ ID NO: 11649 - protein, 169 aa, Zea mays subsp. mays
  peptide (1)..(169): Ceres Seq. ID no. 13494392
  misc_feature (144)..(144): Xaa is any aa, unknown or other
MVLAARSNGTGAPAPSTAPPPPAPASSAPPTPASPAPKGAPPTTAASPPPPSASAPATTPATPPPAASAAPPAPRASSTPPPPSAPAGAPPAPAASSPAPSAHGATDNSTGTPSSPPAGSSKDKNGAAFTVATGLASSFGTCIXCTPCLLSEVKWAAVEDSSKYVCVYV

SEQ ID NO: 11650 - protein, 161 aa, Zea mays subsp. mays
  peptide (1)..(161): Ceres Seq. ID no. 13494393
MAKPSSYGLALLACAAVAAAVAGGTQFTVGGAQWLERARRRRGALQCLGGEDEVSDRRRPSVRVPQGPRRGAAGGAGGLQRVQHVVVREEVRRRRHRGRARQRRPALLHQWRRGQLPRRREAHRHGPRRPQQRHRRAGSEHGAPASGSRQLRAAHAGVARS

SEQ ID NO: 11651 - DNA, 1662 bp, Zea mays subsp. mays
  misc_feature (1)..(1662): Ceres Seq. ID no. 12413861
  misc_feature (1)..(1662): Ortholog of  Ceres SEQ ID NO 12625948 as cited in SEQ ID NO 64717
acagtcaactgtgttctagacagttgagttcaaaaaggtgaggcggcgagatcgaatcaagcggagcggagcctacacatggcgatggcgctgcgtcggctgctgcttcctctcctcctcctcgtactcttaggtctgcggccgcagagctgcgtcgccagtggcggaggtggaggggagccggcggagttcgagatacctcgggacgggagcgtgctggagcttgacgagagcaacttcgaggcggcggtgcgcgcagccgaattcctcttcgtcgacttctacgctccctggtgcggccactgcaagcgcctcgccccgcagttagatgaggctgctgcagtgctagctggactgagcacgcccgtccttgtggctaaagtaaatgctgacaaatacaagaagctcggctctaaatatggagtagatgggttccctactttgatgttttttgaccatggagtgccctcggagtacacgggttcaaggaaggctgatgtgctagttgagaaccttaagaagcttgttgcacctgatgtttctgtccttgagtcggactcgtcaattaacggctttgttcaagcagctggcatcaattttccattgtttattgggtttggaatggatgagtcattgattgttgaatatggagcgaagtacaagaagaaggcatggttttcaacagcaaaggatttctctgaggatgtgatggttgtgtatgattttgacaaggttccagcgttggtttctgttaacccaaaatataatgagcagagtgtattctatggcccgtttgaaggaacttttctggaagattttataaggcaatccctactgcctgcaactgtgcccatcaatagagagacagtaaagctattgaaagatgatgggaggaaagttgttcttacaatcttggaggatgaatcagatgaaagctctctgcagctaataaaagtgttgaggtctgccgccaatgcaaaccatgatttagtgttcggatatgtgggagtcaaacagtgggaggagttcaccgagacttttgatgtgaaggtttcgcagctgccaaagattgttgtctgggacacaaaagaggagtacgaagtggttgagggttcagagagtttcatagaaggtgactatggatcccaagtcagtcgatttctagagggatatagggaaggaagaacaacaaagaagaaagtgggccgtggttccccaacactgctcggccttaacgcggtatacatcctcgtcctgttggtcgccgttctcgttgttttgatgtatttttccgcgcaaggcgaggaggatcatcagccaagaagagcccatgaggactgacagcaatctgagatggcttagattcaaggcgttgatccggaggctgccgagttatttttgaaggggggtaacatataacatctgatggacaaattttcctgatcttcatttcacgtgccctagggtcgagttttagatatttgttgcagagctatgcatgagctcccctgtgtttctcttgaacccttgaagtttttggacttgttacttgaggaccgggtttcctcaggtttatgtcattgtaattattcggcactttgtaacatagcattcatgtgttatatttgagacccttggagaaacgacttctatagattgaac

SEQ ID NO: 11652 - protein, 420 aa, Zea mays subsp. mays
  peptide (1)..(420): Ceres Seq. ID no. 12413862
MAMALRRLLLPLLLLVLLGLRPQSCVASGGGGGEPAEFEIPRDGSVLELDESNFEAAVRAAEFLFVDFYAPWCGHCKRLAPQLDEAAAVLAGLSTPVLVAKVNADKYKKLGSKYGVDGFPTLMFFDHGVPSEYTGSRKADVLVENLKKLVAPDVSVLESDSSINGFVQAAGINFPLFIGFGMDESLIVEYGAKYKKKAWFSTAKDFSEDVMVVYDFDKVPALVSVNPKYNEQSVFYGPFEGTFLEDFIRQSLLPATVPINRETVKLLKDDGRKVVLTILEDESDESSLQLIKVLRSAANANHDLVFGYVGVKQWEEFTETFDVKVSQLPKIVVWDTKEEYEVVEGSESFIEGDYGSQVSRFLEGYREGRTTKKKVGRGSPTLLGLNAVYILVLLVAVLVVLMYFSAQGEEDHQPRRAHED

SEQ ID NO: 11653 - protein, 418 aa, Zea mays subsp. mays
  peptide (1)..(418): Ceres Seq. ID no. 12413863
MALRRLLLPLLLLVLLGLRPQSCVASGGGGGEPAEFEIPRDGSVLELDESNFEAAVRAAEFLFVDFYAPWCGHCKRLAPQLDEAAAVLAGLSTPVLVAKVNADKYKKLGSKYGVDGFPTLMFFDHGVPSEYTGSRKADVLVENLKKLVAPDVSVLESDSSINGFVQAAGINFPLFIGFGMDESLIVEYGAKYKKKAWFSTAKDFSEDVMVVYDFDKVPALVSVNPKYNEQSVFYGPFEGTFLEDFIRQSLLPATVPINRETVKLLKDDGRKVVLTILEDESDESSLQLIKVLRSAANANHDLVFGYVGVKQWEEFTETFDVKVSQLPKIVVWDTKEEYEVVEGSESFIEGDYGSQVSRFLEGYREGRTTKKKVGRGSPTLLGLNAVYILVLLVAVLVVLMYFSAQGEEDHQPRRAHED

SEQ ID NO: 11654 - protein, 298 aa, Zea mays subsp. mays
  peptide (1)..(298): Ceres Seq. ID no. 12413864
MFFDHGVPSEYTGSRKADVLVENLKKLVAPDVSVLESDSSINGFVQAAGINFPLFIGFGMDESLIVEYGAKYKKKAWFSTAKDFSEDVMVVYDFDKVPALVSVNPKYNEQSVFYGPFEGTFLEDFIRQSLLPATVPINRETVKLLKDDGRKVVLTILEDESDESSLQLIKVLRSAANANHDLVFGYVGVKQWEEFTETFDVKVSQLPKIVVWDTKEEYEVVEGSESFIEGDYGSQVSRFLEGYREGRTTKKKVGRGSPTLLGLNAVYILVLLVAVLVVLMYFSAQGEEDHQPRRAHED

SEQ ID NO: 11655 - DNA, 1653 bp, Zea mays subsp. mays
  misc_feature (1)..(1653): Ceres Seq. ID no. 13493002
  misc_feature (1)..(1653): Ortholog of  Ceres SEQ ID NO 14312212 as cited in SEQ ID NO 54399
  misc_feature (1)..(1653): Ortholog of  Ceres SEQ ID NO 15225341 as cited in SEQ ID NO 55222
  misc_feature (1)..(1653): Ortholog of  Ceres SEQ ID NO 13653980 as cited in SEQ ID NO 69253
actgttcaaacaaaccctccactgccctccccactctccccttcaccgcgccgcactcccaagtcccaacaggcctaaatggcggcggccggaacaattcccggcgccgccgcagccattggcgcttctgtgtcccaacgccaacgtcgcgtcggcgctccttctttcgtagctgcctacgtctccgagggcacccgcctcgtctgccggaggcagctccgtccggctccggtcctcgcttcttccttcatctccctttctcatccagcgaggcggcggttcctctgcgatgctgcggccggagcctcctcaggtcccgctggagaagccaagccccagggatttgcagagagatacccagctcttgtcacaggtttcttcttcttcttgtggtattttctgaatgtaatatttaacatcctcaacaagaagatcttcgactacttcccctatccatattttgtgtcagtgagccatctttttattggagtactatacttccttattggctggagcttcggcatcccaaagcgcgcgccaatcaactcaacacttctgaagcagcttgttccagttgcggtttgccatgccattggccatgtaacaagcactgtgtcatttgctgctgtagctgtgtcatttgcccacactattaaagctctcgagccattcttcaatgcggctgcttcccagtttatccttggacaaccagttccattgacactctggctgtctcttgttccagtggtgattggtgtctcggtagcatccctcactgaactctcatttaattggactggcttcattaatgccatgatctcaaatatttctttcacctaccgaagcatctattctaagaaggctatgactgacatggatagtaccaacttgtatgcatacatatcaataattgctctctttgtctgcatcccccctgcaattattattgaaggacctcaattagtgcagcatggttttaaagatgcaattgccaaagttggattaacaaagttgatttctaatttttttgtggtgggcttattctatcacctttataaccaggttgctacaaacacattggagcgggtagcccctttaacacatgccatcggcaatgtgttgaaacgtgttttcgtcattggcttttccatcatcgcattcggcaacaagatcaccacacagactggaattggcacttccattgctgtttctggtgttgccctctactcatttataaaggctaagattgaggagaaaaagcaaataaagagtgcataaggtgttggctgatgtggatgcggttggtttgtcgctttgatggacctctattctctcggtgaacgaacaaacttgcaagatggataaaatcttgctatctcctagtacatttgattgttattcccagtctggtactgaggtgtgcggttgttgttggctaacttgtttatttgaagcaaatttgagcaatgctcagtggcatggaatttccatttctgttttccttcgctcatttattctgacttgacatggtgctattgtaatcttaagcagtagtgtctctagaatgttttccccaaggagatttcagtaccaaatttgaacaatcctcaaactagaaattttgatttccatgcaccccactcagcaattctg

SEQ ID NO: 11656 - protein, 399 aa, Zea mays subsp. mays
  peptide (1)..(399): Ceres Seq. ID no. 13493003
MAAAGTIPGAAAAIGASVSQRQRRVGAPSFVAAYVSEGTRLVCRRQLRPAPVLASSFISLSHPARRRFLCDAAAGASSGPAGEAKPQGFAERYPALVTGFFFFLWYFLNVIFNILNKKIFDYFPYPYFVSVSHLFIGVLYFLIGWSFGIPKRAPINSTLLKQLVPVAVCHAIGHVTSTVSFAAVAVSFAHTIKALEPFFNAAASQFILGQPVPLTLWLSLVPVVIGVSVASLTELSFNWTGFINAMISNISFTYRSIYSKKAMTDMDSTNLYAYISIIALFVCIPPAIIIEGPQLVQHGFKDAIAKVGLTKLISNFFVVGLFYHLYNQVATNTLERVAPLTHAIGNVLKRVFVIGFSIIAFGNKITTQTGIGTSIAVSGVALYSFIKAKIEEKKQIKSA

SEQ ID NO: 11657 - DNA, 1531 bp, Zea mays subsp. mays
  misc_feature (1)..(1531): Ceres Seq. ID no. 12405655
  misc_feature (1)..(1531): Ortholog of  Ceres SEQ ID NO 13542155 as cited in SEQ ID NO 64236
attaacggagtcaggcccaggcctaacctcagttcatccgagcagccgaacacgcccgccgccattctacgccctgctgcccaggtcggacggaccctttgccggagacgagcacacgccacagcaggaattatcgggcgtagagcagcgcgaagcgagagatccaatggcggcggcggaggggcagtgggtgctcatggcaacggggcggacgccgactaacattgcggtgatcaagtactgggggaagcgggacgaggcgctcatcctccccatcaacgacagcatcagcgtaacgctcgaccctgaccatctctccgccaccaccactgtcgccgtcagcccctcattcccttccgaccgcatgtggctcaatggcaaggagatctcgctattaggaggaaggtttcagagctgcctcagagaaatcagaaagcgtgctcgtgactttgaggacaaggagaagggcgtcaagatcaagaaagaggactgggacaagttgcatgttcacatagcctcgtacaacaacttccccactgctgctggtttggcctcttcggctgctggccttgcctgtttcgttttcacccttggaaagctgatgaatgtgaaagaagattatggagaactttcttcaatagcaaggcagggatctgggagtgcatgccgcagtatatatggtggttttgtgaaatggtgcatgggagaaaaagatgatggaagtgacagtattgccgtgcagcttgctgacgaaacacactggaatgatcttgtaattattattgcagtggtcagttcaaagcagaaggaaaccagtagcaccagtgggatgcgagatagtgttgaaacaagtcctctcttgcagtacagggcccagacagtggtgccaggtcgggtgttgaaaatggaagaagctatcaagaaccgtgactttgaatcatttgccaaattaacttgtgcagatagcaaccagtttcatgctgtatgcttagacacgagccctcccatcttctatatgaatgacacgtcacaccggataattagccttgtggaaaaatggaaccactcagaaggaaccccacaggtcgcttacaccttcgatgctgggccaaacgctgttctaatcgcccaaaaccgtaaaactgcagcacatttcctccagaagctcctatactatttccctccacaggataatgatttgagcagctatctggttggcgataaatcaattctaggtgacgccggattgcattccatgaaagacgtcgaggctcttccagcacctccagatacgaagataccggatcagaaattcaagggcgatgttagctacttcatctgcagcaggcttggggcaggtccaaaggttgttgttgacgaaggtcaagcactgatcgattcagtcaccggacttccaaaaggcgtgtagttctagatttaggttggaataatggtttaagctggggattaaagacaatggtatcatacaagcaacctgggccggccaataaagatagaacacgttctcgcc

SEQ ID NO: 11658 - protein, 475 aa, Zea mays subsp. mays
  peptide (1)..(475): Ceres Seq. ID no. 12405656
LTESGPGLTSVHPSSRTRPPPFYALLPRSDGPFAGDEHTPQQELSGVEQREARDPMAAAEGQWVLMATGRTPTNIAVIKYWGKRDEALILPINDSISVTLDPDHLSATTTVAVSPSFPSDRMWLNGKEISLLGGRFQSCLREIRKRARDFEDKEKGVKIKKEDWDKLHVHIASYNNFPTAAGLASSAAGLACFVFTLGKLMNVKEDYGELSSIARQGSGSACRSIYGGFVKWCMGEKDDGSDSIAVQLADETHWNDLVIIIAVVSSKQKETSSTSGMRDSVETSPLLQYRAQTVVPGRVLKMEEAIKNRDFESFAKLTCADSNQFHAVCLDTSPPIFYMNDTSHRIISLVEKWNHSEGTPQVAYTFDAGPNAVLIAQNRKTAAHFLQKLLYYFPPQDNDLSSYLVGDKSILGDAGLHSMKDVEALPAPPDTKIPDQKFKGDVSYFICSRLGAGPKVVVDEGQALIDSVTGLPKGV

SEQ ID NO: 11659 - protein, 420 aa, Zea mays subsp. mays
  peptide (1)..(420): Ceres Seq. ID no. 12405657
MAAAEGQWVLMATGRTPTNIAVIKYWGKRDEALILPINDSISVTLDPDHLSATTTVAVSPSFPSDRMWLNGKEISLLGGRFQSCLREIRKRARDFEDKEKGVKIKKEDWDKLHVHIASYNNFPTAAGLASSAAGLACFVFTLGKLMNVKEDYGELSSIARQGSGSACRSIYGGFVKWCMGEKDDGSDSIAVQLADETHWNDLVIIIAVVSSKQKETSSTSGMRDSVETSPLLQYRAQTVVPGRVLKMEEAIKNRDFESFAKLTCADSNQFHAVCLDTSPPIFYMNDTSHRIISLVEKWNHSEGTPQVAYTFDAGPNAVLIAQNRKTAAHFLQKLLYYFPPQDNDLSSYLVGDKSILGDAGLHSMKDVEALPAPPDTKIPDQKFKGDVSYFICSRLGAGPKVVVDEGQALIDSVTGLPKGV

SEQ ID NO: 11660 - protein, 410 aa, Zea mays subsp. mays
  peptide (1)..(410): Ceres Seq. ID no. 12405658
MATGRTPTNIAVIKYWGKRDEALILPINDSISVTLDPDHLSATTTVAVSPSFPSDRMWLNGKEISLLGGRFQSCLREIRKRARDFEDKEKGVKIKKEDWDKLHVHIASYNNFPTAAGLASSAAGLACFVFTLGKLMNVKEDYGELSSIARQGSGSACRSIYGGFVKWCMGEKDDGSDSIAVQLADETHWNDLVIIIAVVSSKQKETSSTSGMRDSVETSPLLQYRAQTVVPGRVLKMEEAIKNRDFESFAKLTCADSNQFHAVCLDTSPPIFYMNDTSHRIISLVEKWNHSEGTPQVAYTFDAGPNAVLIAQNRKTAAHFLQKLLYYFPPQDNDLSSYLVGDKSILGDAGLHSMKDVEALPAPPDTKIPDQKFKGDVSYFICSRLGAGPKVVVDEGQALIDSVTGLPKGV

SEQ ID NO: 11661 - DNA, 1523 bp, Zea mays subsp. mays
  misc_feature (1)..(1523): Ceres Seq. ID no. 12381293
  misc_feature (1)..(1523): Ortholog of  Ceres SEQ ID NO 14308615 as cited in SEQ ID NO 58538
  misc_feature (1)..(1523): Ortholog of  Ceres SEQ ID NO 13585342 as cited in SEQ ID NO 63601
  misc_feature (1)..(1523): Ortholog of  Ceres SEQ ID NO 15177459 as cited in SEQ ID NO 0
atcgtggcctcatctcgcgctcaagctgctccccgtagtcccattgagaccaacggcagcgcgcgcgttcgtgtacgtttatattatttttttataagggagcaagagggctcggcggcagcggcgacggcgaccgcgacggcagtggcagtggcagtggcaggctgtcagccgtccctatcttgtgtgtcaagcgcgaactccctatctcgtgtgtcaagcgcgttcgcgtgcgttctaggcacaggcagccgaggcgagccccttccgctcagtggccgccgccggaccgtggacgcagctagcccatcagcccatggcagggacggacgtcgcaggctccgcacgcggctccgatgccgcgctcgggaagacgggcgaaccacccgccgcggcgcgctctggcgcagccaagaaggtggctctcgctctgctagcctccttctcggcgctgctgtacagccagattcagccgccgccgtctaagatccccggcatgccgggcgggcctccggtcacggcgcccagaacaaggctcaaggacggccggcacttggcgtacctggaatctggcgtcccaaaggagaaggccaagtacaagatcatattcgttcacggcttcgactgctgtagatacgacgtgctgaatgtctcccaggggctgttggaagagctgggaatctacctgttgtccttcgaccggccccgggtacgccgagagcgacgcccacccggcccggacagagaagagcatcgcccttgacatcgcggagctggcggacaatctccagctcggccccaagttccatctcatcggcttctccatgggcggcgagatcatgtggagctgcctcaagtacatcccgcacaggctcgccggcgtggcgattcttgccccggtgggcaactactggtggtccggcttcccgccggacgtgttcaaggaggcgtggcgcgtgcagtttccgcaagaccagcgcgcggtctgggtcgctcaccacctgccgtggctgacgcactggtggaacacccagaagctgttccgcggatccagcgtcaaggacggcgaccctgccatgctatccaaggaggacaggcttgtagctgacaagttcgagaagcgaacctatgagaagcaggtcagacagcagggagagcacgactcgctccaccgcgacatgatggtcggtttcgggaagtgggactggagcccgctggagatggagaacccgttcgccggcggcctagacgaggtgaaggtgcacctgtggcacggcgtcgaggacctctacgtgccggttcaactgtcgcggtacatcagcgagaggctcccatgggtcatctaccatgagctcccgacggccggccacctcttcccggtcgccgacggcatgcccgacgctatcgtcaggtcgcttctgctcggagatgagtgatcagtatttaggatgcgcggatccaggacttgtgcactttttgcagcttcatcagtaataaaaatacactcggaggtcgagatctgt

SEQ ID NO: 11662 - protein, 262 aa, Zea mays subsp. mays
  peptide (1)..(262): Ceres Seq. ID no. 12381294
MSPRGCWKSWESTCCPSTGPGYAESDAHPARTEKSIALDIAELADNLQLGPKFHLIGFSMGGEIMWSCLKYIPHRLAGVAILAPVGNYWWSGFPPDVFKEAWRVQFPQDQRAVWVAHHLPWLTHWWNTQKLFRGSSVKDGDPAMLSKEDRLVADKFEKRTYEKQVRQQGEHDSLHRDMMVGFGKWDWSPLEMENPFAGGLDEVKVHLWHGVEDLYVPVQLSRYISERLPWVIYHELPTAGHLFPVADGMPDAIVRSLLLGDE

SEQ ID NO: 11663 - protein, 203 aa, Zea mays subsp. mays; identical to SEQ ID NO: 2392
  peptide (1)..(203): Ceres Seq. ID no. 12381295

SEQ ID NO: 11664 - protein, 198 aa, Zea mays subsp. mays
  peptide (1)..(198): Ceres Seq. ID no. 12381296
MWSCLKYIPHRLAGVAILAPVGNYWWSGFPPDVFKEAWRVQFPQDQRAVWVAHHLPWLTHWWNTQKLFRGSSVKDGDPAMLSKEDRLVADKFEKRTYEKQVRQQGEHDSLHRDMMVGFGKWDWSPLEMENPFAGGLDEVKVHLWHGVEDLYVPVQLSRYISERLPWVIYHELPTAGHLFPVADGMPDAIVRSLLLGDE

SEQ ID NO: 11665 - DNA, 1505 bp, Zea mays subsp. mays
  misc_feature (1)..(1505): Ceres Seq. ID no. 12381259
  misc_feature (1)..(1505): Ortholog of  Ceres SEQ ID NO 13594260 as cited in SEQ ID NO 57558
  misc_feature (1)..(1505): Ortholog of  Ceres SEQ ID NO 13654956 as cited in SEQ ID NO 62966
atctctctctctctctcttcctgcgcccacacgcacgtttccactccgaccgggccagagccccgccgggcagtttccgttcgctgttgcgatccacctcctgcctgcacatcccctcccccgagttcgagccggagggccgaatagtagatctgcggcggcggcggccagaggatggccgtcaactgggagctgcggggctgctgcgaccacgaccagaggatcttcatcgccgccgtcggcgtctccaccgtcgtcatcctcctcctctggaggacgttcctgctcacgccgttcaagctcatcaccgtcttcctccacgagaccagccacgcgcttgcctgcaagctcacttgcggcgatgtagaaggcatgcaggtccatgcgaatgagggtggcgttactcaaacccggggtggcatatattggataatcttgccccgctggatatctgggttcatcattttggggaatggtcttcatacttgcatccacaaatctccttactacaagaattgcagcgggttgtttcatacttgcgttgtttattgttctttttgttgcagaaaattggtttcttcgctggctctgccttggattcattgtgttcattgctgttgtttgggtcatacaagaatttacatctttccatattctgaaatatgtgatcttattcataggtgagacggaagatgtcgtacaatcatgtcctctttattttaatttctggaatgcaaattgtatgcttgaaatttaatctttatgtttatttatgtgcaacaggtgtgatgaacagcttattttcagtttacggtaaagaaaccaaaaaaaaaacatttttcttgttattccatgttagaataatccatgtgttactctcaatgaaatattctcaaattatatagatatttatgatgacttgatatcccgaagagttaacacaagtgatgctgaaaagtttgctgaaatctgcccttgcccctgcaatggttttgcatggggtgttatatggtctgctccaagtttcgatagttatatttttctgtataccttgatggtgtgttaagatattcctgatgtaacgacaccaatggtaacgttttctgttctttgtttcaggggattcatctcgtttatctttctctgcgcttcaatataccttggactggtcatattgtcttgagggttcgccattttgatctgacaatctactctgattggctttttcgaagcttcgttgctcgaggttttggttcaagcttacatggttctggtggttgtacagtatacatgtgcagggtaaacatgtacatccattataagttaatttgttggggattattcatgggattcttcgattttagtggttctatagagtaccattttacttaccattaccagttgcatttatggtctgtagcctcttcaatttatgtacctgtatatcatatattgctcatttatccatttcaaaatgtattcagagatgcaatattgtgcatctt

SEQ ID NO: 11666 - protein, 169 aa, Zea mays subsp. mays
  peptide (1)..(169): Ceres Seq. ID no. 12381260
MAVNWELRGCCDHDQRIFIAAVGVSTVVILLLWRTFLLTPFKLITVFLHETSHALACKLTCGDVEGMQVHANEGGVTQTRGGIYWIILPRWISGFIILGNGLHTCIHKSPYYKNCSGLFHTCVVYCSFCCRKLVSSLALPWIHCVHCCCLGHTRIYIFPYSEICDLIHR

SEQ ID NO: 11667 - protein, 129 aa, Zea mays subsp. mays
  peptide (1)..(129): Ceres Seq. ID no. 12381261
LSLSLFLRPHARFHSDRARAPPGSFRSLLRSTSCLHIPSPEFEPEGRIVDLRRRRPEDGRQLGAAGLLRPRPEDLHRRRRRLHRRHPPPLEDVPAHAVQAHHRLPPRDQPRACLQAHLRRCRRHAGPCE

SEQ ID NO: 11668 - protein, 121 aa, Zea mays subsp. mays
  peptide (1)..(121): Ceres Seq. ID no. 12381262
SLSLSLPAPTRTFPLRPGQSPAGQFPFAVAIHLLPAHPLPRVRAGGPNSRSAAAAARGWPSTGSCGAAATTTRGSSSPPSASPPSSSSSSGGRSCSRRSSSSPSSSTRPATRLPASSLAAM

SEQ ID NO: 11669 - DNA, 1976 bp, Zea mays subsp. mays
  misc_feature (1)..(1976): Ceres Seq. ID no. 12358191
  misc_feature (1)..(1976): Ortholog of  Ceres SEQ ID NO 13598023 as cited in SEQ ID NO 66487
tgcgggatccaaatgaacatttaaatttgttaattatttttttgttctatgatcctattcatagttcactatgctcaagtaattttgaggctgcaagttatggacacatgttaccatatatccaaggaggaacataaatatcaatctttttcaatgtgatagtggtttgaaaccattgcatttgtacttttaccgtgagagtccatagcttttgtgataaacatgttttcagaagcctggccaagaaaagttgatattattctagtattctagcaggactgtgctagcagtattctaggctattgcagatttctgactaaaacattaggtgtatatccttagatattcacattgaatacaggtaaatcacatttgatgcaggagatggattatagagaagaagcaagaaatggacttaagttcagagaattgtttgggaaatttagagatgtgtcggttcctgaaatgtatctggaacagacaagaaggcgagtccttatcatggaatggatcgagggggaaaagttatcagaagtcagagatcaatatttggttgaggttggagtatattgttcactttcacagctattagaatatggattctatcatgcagatccacaccctggaaatcttttgcgtacagttgatgggaaattagcctacttagattttgggatgatgggagaattccgacaagaacttcgtgatggatttattgaagcttgtcttcatcttgttaaccgtgattttgatgctttagcaaaagactttgtaacccttggtttacttcctccaactgcccagaaaggtgaagtcacaaaggcattgacaggtgtatttgagaatgctgttaacagaggagttcagaatataagctttggagatctgtcaggaaatcttggacgaacaatgtataaattcaagttccagataccgtcttacttttcccttgtaattcgaagccttgctgttttagaaggtatcgcaatcagcttcaatccaaagtataaagttctggggagttcatatccatggattgcaagaaaagttctcactgacagttcgccaaagcttcgatcaactttgcagactcttctttataaggatggcactttccaaattgatcgcctggaatctttgttaactgagtcacttcgtgcaagaacagagcaatcattggtcagaaatgaacaagatgtcgacagtacgagatatgcaattaagcaagtcttgtcattcacactcgctgaccagggtgcctttgtgaaggacttacttcttcaggagattgctaagggaatagatgcacttggtgtagccacattaagttctgcaacgtctgcagcagcctccagattgccattcggtggtggaccatccccattgacctcactagatgacgaagatgccacaaacttaagaaatctgtatcgcctgctcctacttttatctaaggtttctcagaaggaaaatccatctccaattcctgaatataacagtgccatagagaaggaaggtggtagcacggatgaacttgctcttgcgctgtatggaatgacctctctgccagaatttcttccagttctttctgtcattcctgagcttccaccggagtcccaacagcagttgcttcttctgccagcggatttaaccaatcgtattttatctcgggctctcgcgagaaccattagaagactcatgtaaagccataggtgcagaaattttcggtccctgcttaatttttattttactattctttttggttcactgctagaagatggggatttttttagcatctcatctacaacccaagatcaatcccttttttgttatctacgattactatgtacatattgttcaaactaaagcaggcattgtaaatggcccatgttgttatgcacatatggtgtaactgataaactttaaatatatgtgaacatagaaataattctgtaatgcaatttgcctcgaaagcg

SEQ ID NO: 11670 - protein, 442 aa, Zea mays subsp. mays
  peptide (1)..(442): Ceres Seq. ID no. 12358192
MQEMDYREEARNGLKFRELFGKFRDVSVPEMYLEQTRRRVLIMEWIEGEKLSEVRDQYLVEVGVYCSLSQLLEYGFYHADPHPGNLLRTVDGKLAYLDFGMMGEFRQELRDGFIEACLHLVNRDFDALAKDFVTLGLLPPTAQKGEVTKALTGVFENAVNRGVQNISFGDLSGNLGRTMYKFKFQIPSYFSLVIRSLAVLEGIAISFNPKYKVLGSSYPWIARKVLTDSSPKLRSTLQTLLYKDGTFQIDRLESLLTESLRARTEQSLVRNEQDVDSTRYAIKQVLSFTLADQGAFVKDLLLQEIAKGIDALGVATLSSATSAAASRLPFGGGPSPLTSLDDEDATNLRNLYRLLLLLSKVSQKENPSPIPEYNSAIEKEGGSTDELALALYGMTSLPEFLPVLSVIPELPPESQQQLLLLPADLTNRILSRALARTIRRLM

SEQ ID NO: 11671 - protein, 439 aa, Zea mays subsp. mays
  peptide (1)..(439): Ceres Seq. ID no. 12358193
MDYREEARNGLKFRELFGKFRDVSVPEMYLEQTRRRVLIMEWIEGEKLSEVRDQYLVEVGVYCSLSQLLEYGFYHADPHPGNLLRTVDGKLAYLDFGMMGEFRQELRDGFIEACLHLVNRDFDALAKDFVTLGLLPPTAQKGEVTKALTGVFENAVNRGVQNISFGDLSGNLGRTMYKFKFQIPSYFSLVIRSLAVLEGIAISFNPKYKVLGSSYPWIARKVLTDSSPKLRSTLQTLLYKDGTFQIDRLESLLTESLRARTEQSLVRNEQDVDSTRYAIKQVLSFTLADQGAFVKDLLLQEIAKGIDALGVATLSSATSAAASRLPFGGGPSPLTSLDDEDATNLRNLYRLLLLLSKVSQKENPSPIPEYNSAIEKEGGSTDELALALYGMTSLPEFLPVLSVIPELPPESQQQLLLLPADLTNRILSRALARTIRRLM

SEQ ID NO: 11672 - protein, 412 aa, Zea mays subsp. mays
  peptide (1)..(412): Ceres Seq. ID no. 12358194
MYLEQTRRRVLIMEWIEGEKLSEVRDQYLVEVGVYCSLSQLLEYGFYHADPHPGNLLRTVDGKLAYLDFGMMGEFRQELRDGFIEACLHLVNRDFDALAKDFVTLGLLPPTAQKGEVTKALTGVFENAVNRGVQNISFGDLSGNLGRTMYKFKFQIPSYFSLVIRSLAVLEGIAISFNPKYKVLGSSYPWIARKVLTDSSPKLRSTLQTLLYKDGTFQIDRLESLLTESLRARTEQSLVRNEQDVDSTRYAIKQVLSFTLADQGAFVKDLLLQEIAKGIDALGVATLSSATSAAASRLPFGGGPSPLTSLDDEDATNLRNLYRLLLLLSKVSQKENPSPIPEYNSAIEKEGGSTDELALALYGMTSLPEFLPVLSVIPELPPESQQQLLLLPADLTNRILSRALARTIRRLM

SEQ ID NO: 11673 - DNA, 1309 bp, Zea mays subsp. mays
  misc_feature (1)..(1309): Ceres Seq. ID no. 12411788
  misc_feature (1)..(1309): Ortholog of  Ceres SEQ ID NO 14314964 as cited in SEQ ID NO 54270
tcattggagctagcaaaagctgggtatcagaggccttcacatgtaatcatacatctgaagaattttaggaggtcagagaactttgtaaggcttattaagtgcaacattgacaacgaacgggaacctcaggctctttcactttgctgttcaattcggaaaatgtggagatctcaccaagcagcaatgaaagttataccattgaaggttccatcaggccagcgtcatgtgtattttgtgtcagatgatgataaaaaggaatcccacagtttatctaggcctttgctaagctcgggaggaacctctactgatgttgagcaacagttcataaacaatacagttcactttcagaaaatgtggagcagtgaaccagaaattcagagccgatgcaaactagttgccaagcagattgcggatgacggaagggtgttcagcatatggaggcctctctgccctaatgggtatgtctcaattggtgatattgcgcatgttggcatccatccaccgcattttgctgctgtatacaagaatatcaatgggaactttgcactgcctcttggctatgacctggtttggagaaattgtgctgaggattacaagagccctgtatcaatatggcttccaaggccaccggggggatacgtagctcttgggtgtgttgctgtcccttcattcaaggagcccactcttgactgtgctttctgtgtggatgagagactcgcggaggatgccgcgtatgaggagcaaatcatatgggcctcatcggatgcttacccatggggatgctatatctaccaagttcagagcgcctcaatgcagttcatggcacttcgtgtcccaaaagaacaatctgagctaaggcccaagaagatattggagtcatttctgcagcaagcatcagagactcaaacgtcccgtgcatgaagaagctgcacatgatgcttgtgcgtgcaagagaactcggctgggacaaagggcaagtctcgtgcaagaaagctcgaagaatgccacttctttcggatcactccatttctccgttgtcaaagcatacacagaggacagagccttgcatgccaacactcgggttgacggaagtgttgtatactagaatagtaggttaaaggttgtaaatgtaaagttttgtaacgtttgatatagtttttgtccagctacatttgttaaggcccatgtggacgtgggccatattagttgtggctacatattctactaagaagttctcaggactaatcatactttctctaatttaaggttgttaaggcccatgtggacgtgggccatactagttgtggct

SEQ ID NO: 11674 - protein, 306 aa, Zea mays subsp. mays
  peptide (1)..(306): Ceres Seq. ID no. 12411789
SLELAKAGYQRPSHVIIHLKNFRRSENFVRLIKCNIDNEREPQALSLCCSIRKMWRSHQAAMKVIPLKVPSGQRHVYFVSDDDKKESHSLSRPLLSSGGTSTDVEQQFINNTVHFQKMWSSEPEIQSRCKLVAKQIADDGRVFSIWRPLCPNGYVSIGDIAHVGIHPPHFAAVYKNINGNFALPLGYDLVWRNCAEDYKSPVSIWLPRPPGGYVALGCVAVPSFKEPTLDCAFCVDERLAEDAAYEEQIIWASSDAYPWGCYIYQVQSASMQFMALRVPKEQSELRPKKILESFLQQASETQTSRA

SEQ ID NO: 11675 - protein, 253 aa, Zea mays subsp. mays
  peptide (1)..(253): Ceres Seq. ID no. 12411790
MWRSHQAAMKVIPLKVPSGQRHVYFVSDDDKKESHSLSRPLLSSGGTSTDVEQQFINNTVHFQKMWSSEPEIQSRCKLVAKQIADDGRVFSIWRPLCPNGYVSIGDIAHVGIHPPHFAAVYKNINGNFALPLGYDLVWRNCAEDYKSPVSIWLPRPPGGYVALGCVAVPSFKEPTLDCAFCVDERLAEDAAYEEQIIWASSDAYPWGCYIYQVQSASMQFMALRVPKEQSELRPKKILESFLQQASETQTSRA

SEQ ID NO: 11676 - protein, 245 aa, Zea mays subsp. mays
  peptide (1)..(245): Ceres Seq. ID no. 12411791
MKVIPLKVPSGQRHVYFVSDDDKKESHSLSRPLLSSGGTSTDVEQQFINNTVHFQKMWSSEPEIQSRCKLVAKQIADDGRVFSIWRPLCPNGYVSIGDIAHVGIHPPHFAAVYKNINGNFALPLGYDLVWRNCAEDYKSPVSIWLPRPPGGYVALGCVAVPSFKEPTLDCAFCVDERLAEDAAYEEQIIWASSDAYPWGCYIYQVQSASMQFMALRVPKEQSELRPKKILESFLQQASETQTSRA

SEQ ID NO: 11677 - DNA, 989 bp, Zea mays subsp. mays
  misc_feature (1)..(989): Ceres Seq. ID no. 12372536
  misc_feature (1)..(989): Ortholog of  Ceres SEQ ID NO 15173624 as cited in SEQ ID NO 60470
ccacacggccacacacacttcacttcataggcgccccagcagagctcatctctgcctcctgtgtccttctccatgacagagaatctccactccaggaaaatggtacagccaaagaagtttcgtggagtccggcagcgccactggggctcctgggtctctgagatcaggcatcccctccttaagaggagggtctggctgggtacctttgagacggctgaggaggcagcgagagcatatgatgaggctgctgtgctgatgagcggacgcaacgccaagaccaacttcccaatccaaagaagcagcacaggggagcctaccccagctgcgggaagggacgcccgcagcaacttcagcagcggctcctctaccaccaacctgtcccagattctcagtgcgaagctccgcaaatgctgcaaggcgccatcaccgtccctgacctgtctccgccttgaccctgagaagtcccacattggtgtttggcagaagcgtgcaggagcccgtgctgactccaactgggtcatgacagtggagctcaacaaagatgcagcatccactgatgctgcatcacagtccacatcagcaacaactgctccaccagccacgccgatggatgaggaggagaggatcgcactgcaaatgatcgaagagttgctgagcagcagcagcccagcttcaccctcaaacggagatgaccaaggtcgcttcatcatctgaaaagcatggatcaaacagcacaagtcaccatcccagatcagagtttcgctaggtcggttggtacacaagcagttcaggttgcttcagtaatatagatatatgtctattactaaatccaacttacaagaactataaagtttgcaattgtgtgcagttctatgtacgtgaaaagctctacatacacatgttcctatcaagatactttgttacacatcaatgtcagtgatataattgcttataaaagaaataaatagattatgattgtgttactgctc

SEQ ID NO: 11678 - protein, 213 aa, Zea mays subsp. mays
  peptide (1)..(213): Ceres Seq. ID no. 12372537
MTENLHSRKMVQPKKFRGVRQRHWGSWVSEIRHPLLKRRVWLGTFETAEEAARAYDEAAVLMSGRNAKTNFPIQRSSTGEPTPAAGRDARSNFSSGSSTTNLSQILSAKLRKCCKAPSPSLTCLRLDPEKSHIGVWQKRAGARADSNWVMTVELNKDAASTDAASQSTSATTAPPATPMDEEERIALQMIEELLSSSSPASPSNGDDQGRFII

SEQ ID NO: 11679 - protein, 204 aa, Zea mays subsp. mays
  peptide (1)..(204): Ceres Seq. ID no. 12372538
MVQPKKFRGVRQRHWGSWVSEIRHPLLKRRVWLGTFETAEEAARAYDEAAVLMSGRNAKTNFPIQRSSTGEPTPAAGRDARSNFSSGSSTTNLSQILSAKLRKCCKAPSPSLTCLRLDPEKSHIGVWQKRAGARADSNWVMTVELNKDAASTDAASQSTSATTAPPATPMDEEERIALQMIEELLSSSSPASPSNGDDQGRFII

SEQ ID NO: 11680 - protein, 152 aa, Zea mays subsp. mays
  peptide (1)..(152): Ceres Seq. ID no. 12372539
MSGRNAKTNFPIQRSSTGEPTPAAGRDARSNFSSGSSTTNLSQILSAKLRKCCKAPSPSLTCLRLDPEKSHIGVWQKRAGARADSNWVMTVELNKDAASTDAASQSTSATTAPPATPMDEEERIALQMIEELLSSSSPASPSNGDDQGRFII

SEQ ID NO: 11681 - DNA, 924 bp, Zea mays subsp. mays
  misc_feature (1)..(924): Ceres Seq. ID no. 12340623
  misc_feature (1)..(924): Ortholog of  Ceres SEQ ID NO 14310616 as cited in SEQ ID NO 55699
  misc_feature (1)..(924): Ortholog of  Ceres SEQ ID NO 15173907 as cited in SEQ ID NO 62356
  misc_feature (1)..(924): Ortholog of  Ceres SEQ ID NO 13596519 as cited in SEQ ID NO 62572
  misc_feature (1)..(924): Ortholog of  Ceres SEQ ID NO 12625108 as cited in SEQ ID NO 68102
attagtgctggtgtgtgtggtgtggttcgtccatctctcctgctagcttagctcgctcgctggcaacaacaatgaaagccgcaactggctcgtcatcagtcgctcgcgctcttgcgttgctcttggcggcgtgccttctctggaaggaagccgcgtgcttctcggcgtccgggctaaacaaggcgttcgccaccttctatggcggtagcgacgcttcaggaacgatgggtggggcctgtgggtacggcaacctgtactcgacggggtacggcacggacacggcggcgctgagcacggcgctcttcaacgacggcgcctcgtgcgggcagtgctaccggatctcctgcgactaccaggcggacccgcggttctgcatccgcggcacgtcggtgaccatcaccgccaccaacctgtgccctcccaactacgcgctgcccaacgacgacggcggctggtgcaacccgccgcggcagcacttcgacatggccgagccggcctggctcaagatcggcatctaccgcggcggcatcgtgcccgtcaactaccaaagggtgccgtgtgtgaagaaaggcggggtgaggttcagcatcaacgggcgcgactacttcgagctggtgctcatctccaacgtgggcggctgcgggtccatccagtcggcgtccatcaaggggtcgcgcaccgggtggatggccatgtcccggaactggggcgtcaactggcagtccaacgcgtacctcaatggccagagcctgtcgttccaggtcaccagcagcgacggccagaccaaaaccttccccgacgtcgcgcccgccagctgggggttcggtcagacgtttgcgacctcgcagcagttctcttagtatagacacatctttgttttctgcctcgttcgcttgtcgtttatatatatccctcactcggctc

SEQ ID NO: 11682 - protein, 262 aa, Zea mays subsp. mays
  peptide (1)..(262): Ceres Seq. ID no. 12340624
MKAATGSSSVARALALLLAACLLWKEAACFSASGLNKAFATFYGGSDASGTMGGACGYGNLYSTGYGTDTAALSTALFNDGASCGQCYRISCDYQADPRFCIRGTSVTITATNLCPPNYALPNDDGGWCNPPRQHFDMAEPAWLKIGIYRGGIVPVNYQRVPCVKKGGVRFSINGRDYFELVLISNVGGCGSIQSASIKGSRTGWMAMSRNWGVNWQSNAYLNGQSLSFQVTSSDGQTKTFPDVAPASWGFGQTFATSQQFS

SEQ ID NO: 11683 - protein, 211 aa, Zea mays subsp. mays
  peptide (1)..(211): Ceres Seq. ID no. 12340625
MGGACGYGNLYSTGYGTDTAALSTALFNDGASCGQCYRISCDYQADPRFCIRGTSVTITATNLCPPNYALPNDDGGWCNPPRQHFDMAEPAWLKIGIYRGGIVPVNYQRVPCVKKGGVRFSINGRDYFELVLISNVGGCGSIQSASIKGSRTGWMAMSRNWGVNWQSNAYLNGQSLSFQVTSSDGQTKTFPDVAPASWGFGQTFATSQQFS

SEQ ID NO: 11684 - DNA, 757 bp, Zea mays subsp. mays
  misc_feature (1)..(757): Ceres Seq. ID no. 12345655
  misc_feature (1)..(757): Ortholog of  Ceres SEQ ID NO 12635836 as cited in SEQ ID NO 0
  misc_feature (1)..(757): Ortholog of  Ceres SEQ ID NO 13599004 as cited in SEQ ID NO 0
agccatcgccaccacctccctccgcggctccgccttccgccgcgaacacgccgctgtctcgaccccttgtcctcctccttcagcaagatggcggagattgagataaaaacagcacctgctgacttccgcttccctacaacaaaccaaacaaggcattgttttactcgctatgtcgagtaccacaggtgtttgaatgccaaaggggatgatgctggtgtttgcgaaaaatttgccaagtactacaggtccctttgccctggagaatgggttgagaaatggaacgagcagagggagcatgggacgtttccaggacctctctgaatgtaccgcccgagacctccagttggaccagtcaacaagttggccaggcagtcctactgttccattctgcattcctacttccagaatcgtaaatgccttttgtcccttgctcttcaaccagtcaccacaaaactgttagtgatgcctctcgtatgcagctctaataatttggctacagttgccccacatgcagccttgttttgtgtgtggactgtggacctcattttgtaaacgtctgaatggacttgcattttctttcgtgcctgcgaccgcgtcgtcctgtactgcggcttttgtgtcgtcagtaagctggcattgtagtaatggcctatgaatgtgggtgtacctttcccgtttaaattaagggtctccaattctggaggattggaggggattgagtttaaaaataaactgatttcccctcttattcacctcc

SEQ ID NO: 11685 - protein, 106 aa, Zea mays subsp. mays
  peptide (1)..(106): Ceres Seq. ID no. 12345656
SHRHHLPPRLRLPPRTRRCLDPLSSSFSKMAEIEIKTAPADFRFPTTNQTRHCFTRYVEYHRCLNAKGDDAGVCEKFAKYYRSLCPGEWVEKWNEQREHGTFPGPL

SEQ ID NO: 11686 - protein, 88 aa, Zea mays subsp. mays
  peptide (1)..(88): Ceres Seq. ID no. 12345657
MPKGMMLVFAKNLPSTTGPFALENGLRNGTSRGSMGRFQDLSECTARDLQLDQSTSWPGSPTVPFCIPTSRIVNAFCPLLFNQSPQNC

SEQ ID NO: 11687 - protein, 84 aa, Zea mays subsp. mays
  peptide (1)..(84): Ceres Seq. ID no. 12345658
MMLVFAKNLPSTTGPFALENGLRNGTSRGSMGRFQDLSECTARDLQLDQSTSWPGSPTVPFCIPTSRIVNAFCPLLFNQSPQNC

SEQ ID NO: 11688 - protein, 77 aa, Zea mays subsp. mays
  peptide (1)..(77): Ceres Seq. ID no. 12345659
MAEIEIKTAPADFRFPTTNQTRHCFTRYVEYHRCLNAKGDDAGVCEKFAKYYRSLCPGEWVEKWNEQREHGTFPGPL

SEQ ID NO: 11689 - DNA, 528 bp, Zea mays subsp. mays
  misc_feature (1)..(528): Ceres Seq. ID no. 13492510
  misc_feature (1)..(528): Ortholog of  Ceres SEQ ID NO 14308813 as cited in SEQ ID NO 55485
  misc_feature (1)..(528): Ortholog of  Ceres SEQ ID NO 13655744 as cited in SEQ ID NO 64032
  misc_feature (1)..(528): Ortholog of  Ceres SEQ ID NO 13590394 as cited in SEQ ID NO 66581
ctcgtctccactgctctgctgctcctcgcaccgccgccgccgccgccgcagcgacgtaatggcttccgccgcggtgctccggaacgccggctcccggcgcctcttctcctaccctactctccgcgccgctgcgatatatgtaccttctgcgctacccgatgcgcccgcggcggcggcagcgccggcccagccgccaccgacggccgggaccctctgggcgaggtctatggccaccttcacgcgcacgaagccccatgtgaatgtcggcaccattgggcacgtcgatcacggcaaaaccactctcactgctgccattaccaaggtcctggccgaggcagggaaggccaaagccgttgctttcgacgagatcgacaaggctccggaggagaaagccagaggaatcaccattgcgacagctcacgtcgagtatgagacggctaaaaggcattatgctcacgttgattgtccaggtcacgcagattatgtcaagaacatgatcactggagctgctcagcgtttcctgtgttc

SEQ ID NO: 11690 - protein, 175 aa, Zea mays subsp. mays
  peptide (1)..(175): Ceres Seq. ID no. 13492511
SSPLLCCSSHRRRRRRSDVMASAAVLRNAGSRRLFSYPTLRAAAIYVPSALPDAPAAAAAPAQPPPTAGTLWARSMATFTRTKPHVNVGTIGHVDHGKTTLTAAITKVLAEAGKAKAVAFDEIDKAPEEKARGITIATAHVEYETAKRHYAHVDCPGHADYVKNMITGAAQRFLC

SEQ ID NO: 11691 - protein, 156 aa, Zea mays subsp. mays
  peptide (1)..(156): Ceres Seq. ID no. 13492512
MASAAVLRNAGSRRLFSYPTLRAAAIYVPSALPDAPAAAAAPAQPPPTAGTLWARSMATFTRTKPHVNVGTIGHVDHGKTTLTAAITKVLAEAGKAKAVAFDEIDKAPEEKARGITIATAHVEYETAKRHYAHVDCPGHADYVKNMITGAAQRFLC

SEQ ID NO: 11692 - protein, 143 aa, Zea mays subsp. mays
  peptide (1)..(143): Ceres Seq. ID no. 13492513
LVSTALLLLAPPPPPPQRRNGFRRGAPERRLPAPLLLPYSPRRCDICTFCATRCARGGGSAGPAATDGRDPLGEVYGHLHAHEAPCECRHHWARRSRQNHSHCCHYQGPGRGREGQSRCFRRDRQGSGGESQRNHHCDSSRRV

SEQ ID NO: 11693 - DNA, 1320 bp, Zea mays subsp. mays
  misc_feature (1)..(1320): Ceres Seq. ID no. 12350438
  misc_feature (1)..(1320): Ortholog of  Ceres SEQ ID NO 13654209 as cited in SEQ ID NO 62121
  misc_feature (1)..(1320): Ortholog of  Ceres SEQ ID NO 13596965 as cited in SEQ ID NO 63363
aagatctccgtgctcgatagctcacatcgattcccgccagcgggttccctcaaaattttcggtctctcttcttcccacgggaccagcagtgttcgattcgagcagagatggcggcggcatgggcggtgctggctttgttcctcgtcgcggcgcaggtggcggcggcggcgccggtcacggcgccagcgttcctgtgggcgcccaaaaactacggattcagctctgatgatgctaaggaggtagtccattaccaaacaatctcaccaaagagcttagctaaatctgttctcgaggaaggtggctgtcaaacttcatgtgctcaagggaggatactcagaataatgttgatgttgccattgtttttattggctcaaagctgcaatcgtcagacatatctaaagataagcaagttgatccagctttagcagacacactgaagctctccttcacacgctcagagttttccatggcattcccctacgtttccaccacagtcgacgagagactagaggactcgttgctatccagctttgccgagaactgcaacaatggtttcggaagaaaccgcgtcacctacacagacacgtgtaccggtcaagatctgaagaaataccacaacatggatgccatcaatgacctggtagtgtcaggggtagcgtcaaggagagtcaaccacccaagtggacagaccgatgtaatcgtcttctgtagcggcgggttcgagaatccaggcactgcgaaatcagaaggagagctgctttcccagcttgtggacttgctggacttgtcgggagccaaatatacggtcctctatgcgtcccaaccgtctggtttgctggagagcccttcgggcctgccgctgggtaggcatctcgcggagaagaagactaacggcacgaaagctgtccagggcgaaaaatgcgatggcgagtgcctcgtcaaatctagtctcctcgaaggaactttcgttgggatagtgcttctcatcatcctgatatcaggactcatgtgcatgatggggatcgatactccctcgaggtttgaagctccccaggagtcttgatctctcccttggactgcagaatccgcggggcggttgtgacgagggcacgcggcggcgttgaggggggccggtgttctgttggtctgcactgtggatatatatcgtttagcttcccatttggaagggagtacgccttgtgtatttttttttaccgagccaactgtcactcacaatgtgctagaattttttggtgtaatatttggctatttgcgtttcgcgtctacggacaactaataagctgaggcctgaggcattgc

SEQ ID NO: 11694 - protein, 249 aa, Zea mays subsp. mays; identical to SEQ ID NO: 4545
  peptide (1)..(249): Ceres Seq. ID no. 12350439

SEQ ID NO: 11695 - protein, 198 aa, Zea mays subsp. mays
  peptide (1)..(198): Ceres Seq. ID no. 12350440
MAFPYVSTTVDERLEDSLLSSFAENCNNGFGRNRVTYTDTCTGQDLKKYHNMDAINDLVVSGVASRRVNHPSGQTDVIVFCSGGFENPGTAKSEGELLSQLVDLLDLSGAKYTVLYASQPSGLLESPSGLPLGRHLAEKKTNGTKAVQGEKCDGECLVKSSLLEGTFVGIVLLIILISGLMCMMGIDTPSRFEAPQES

SEQ ID NO: 11696 - protein, 147 aa, Zea mays subsp. mays
  peptide (1)..(147): Ceres Seq. ID no. 12350441
MDAINDLVVSGVASRRVNHPSGQTDVIVFCSGGFENPGTAKSEGELLSQLVDLLDLSGAKYTVLYASQPSGLLESPSGLPLGRHLAEKKTNGTKAVQGEKCDGECLVKSSLLEGTFVGIVLLIILISGLMCMMGIDTPSRFEAPQES

SEQ ID NO: 11697 - DNA, 1364 bp, Zea mays subsp. mays
  misc_feature (1)..(1364): Ceres Seq. ID no. 13498509
  misc_feature (1)..(1364): Ortholog of  Ceres SEQ ID NO 14305247 as cited in SEQ ID NO 0
acgcacctggtttcgtccccaaatctcactcaatccccagtcccgacacccatcctctccaccgaagtcaccaccgcatggacgacgccgcgaatcccacccctccaccatccacctccgccgcatccgcggcggccgcggcggcgcaacaccagcagctccagcgccaactcttcctaatgcagcaggcgcagtcccatccgcagcagctgtcgcagcaggccatgtcccgcttcccctccaacatcgacgctcacctccgccctctagggccgcttcgcttccaacagccccagccccagccccagccgtcccactcccagggtccatctcagtcgccgtcgcaggccacgcagcaggcgtcaccccagcagcagcagcagcaggcggcggcggcggcggcagcggcgcaggcacaagcacaggcccaggcccaggcggcacgggtacgaagccccgagatggagatggcgctgcaggacgccatgcgggtctgcaatccggacgtcaagacgcccttccagtccatcgaggacgctgtcaacaggttattaccttaccatgttgttgccgactatgaggctgaagaagatgacaggatccttgatagcgacacaacaggccagatcccttctcgcctgcagcaatgggaccataatattctggtgaagattgctgagttcacgacaacttttgacaagcaagtattggcatataacataatgaccaagaaaagggccatcggtgagttcaggtcggaggagcggctcatgctggagcaagccttattgcaggaggaaaagcaagctatgctgggactgagggcagagatggagtcgagagagaaagctggtcgcgaggctgccgaagtgaagatgcgtttggcaatggagcatgctcgtgctgaggcacaagctcactctgagatgatgaatcatggtcctataagggccagtgctgttgcttcgcaaggggaggatggtccgagtcatgacatggtgcaagaacatggcgaagatgggtggggaaattctcagagggatgatgaagatccatcggaggatttcctcaacgatgagaacgaacctgagaatgggaactcagatgggcaggaggactggcgcagatctggggagtttgatctcaactctaggtaaggcagttggatttccacatgaaggtttctaggtaggctacgacatgctggtattgtatctactattctattgttgtgttcggtgaagatgtctttgtggctgtaaacatggcattcgaacaattcagtttctttgtaatttgactagtaatatttacttgagcactcaatatgtgccatttccaacttggagaaaaaaaattacaat

SEQ ID NO: 11698 - protein, 384 aa, Zea mays subsp. mays
  peptide (1)..(384): Ceres Seq. ID no. 13498510
APGFVPKSHSIPSPDTHPLHRSHHRMDDAANPTPPPSTSAASAAAAAAQHQQLQRQLFLMQQAQSHPQQLSQQAMSRFPSNIDAHLRPLGPLRFQQPQPQPQPSHSQGPSQSPSQATQQASPQQQQQQAAAAAAAAQAQAQAQAQAARVRSPEMEMALQDAMRVCNPDVKTPFQSIEDAVNRLLPYHVVADYEAEEDDRILDSDTTGQIPSRLQQWDHNILVKIAEFTTTFDKQVLAYNIMTKKRAIGEFRSEERLMLEQALLQEEKQAMLGLRAEMESREKAGREAAEVKMRLAMEHARAEAQAHSEMMNHGPIRASAVASQGEDGPSHDMVQEHGEDGWGNSQRDDEDPSEDFLNDENEPENGNSDGQEDWRRSGEFDLNSR

SEQ ID NO: 11699 - protein, 359 aa, Zea mays subsp. mays
  peptide (1)..(359): Ceres Seq. ID no. 13498511
MDDAANPTPPPSTSAASAAAAAAQHQQLQRQLFLMQQAQSHPQQLSQQAMSRFPSNIDAHLRPLGPLRFQQPQPQPQPSHSQGPSQSPSQATQQASPQQQQQQAAAAAAAAQAQAQAQAQAARVRSPEMEMALQDAMRVCNPDVKTPFQSIEDAVNRLLPYHVVADYEAEEDDRILDSDTTGQIPSRLQQWDHNILVKIAEFTTTFDKQVLAYNIMTKKRAIGEFRSEERLMLEQALLQEEKQAMLGLRAEMESREKAGREAAEVKMRLAMEHARAEAQAHSEMMNHGPIRASAVASQGEDGPSHDMVQEHGEDGWGNSQRDDEDPSEDFLNDENEPENGNSDGQEDWRRSGEFDLNSR

SEQ ID NO: 11700 - protein, 325 aa, Zea mays subsp. mays
  peptide (1)..(325): Ceres Seq. ID no. 13498512
MQQAQSHPQQLSQQAMSRFPSNIDAHLRPLGPLRFQQPQPQPQPSHSQGPSQSPSQATQQASPQQQQQQAAAAAAAAQAQAQAQAQAARVRSPEMEMALQDAMRVCNPDVKTPFQSIEDAVNRLLPYHVVADYEAEEDDRILDSDTTGQIPSRLQQWDHNILVKIAEFTTTFDKQVLAYNIMTKKRAIGEFRSEERLMLEQALLQEEKQAMLGLRAEMESREKAGREAAEVKMRLAMEHARAEAQAHSEMMNHGPIRASAVASQGEDGPSHDMVQEHGEDGWGNSQRDDEDPSEDFLNDENEPENGNSDGQEDWRRSGEFDLNSR

SEQ ID NO: 11701 - DNA, 1351 bp, Zea mays subsp. mays
  misc_feature (1)..(1351): Ceres Seq. ID no. 13498901
  misc_feature (1)..(1351): Ortholog of  Ceres SEQ ID NO 15178181 as cited in SEQ ID NO 58740
  misc_feature (1)..(1351): Ortholog of  Ceres SEQ ID NO 12614739 as cited in SEQ ID NO 68587
attcgaaaaagcaaaaatgatatgcacgtcacaatagttgttccccagatttgttttgtcacgcgccccgcccgacgcccgccacggcgccaccatgtcgcaggctacggaggtcgtcggaaacccgtacgccgccgagctcgctgcagccaagaaggccgtcgccctagcggcccgcctctgccagagagtgcagcggagcattttgcactctgacattcaatcgaaggcagacaagactcctgttacagttgcggattatggatcacaggtactggtatgtctggtcctgaagaaggaattgccttctcactctttctcaatcatagctgaagaggattcaaaagacttgagagaagatggtgcccaagaaattatagaacacattaccaccctcattaatgaaaccatcgtaaatgatggttcatacaacatgtcgttatctaaggaagatgtgctttctgcaattgatggtggtaaatctgagggaggtccatctgggcgacattggatattagacccaatagatggcactaaaggtttcataaggggagatcagtatgcagttgcacttggactacttgatgagggcaaagttgttctgggtgtgttgggatgtccaaatcttccattaaaatcaacaaacaagaacaatagcagctcttttggggatcgaataggttccctcttttttgctacaattggttgtggagcgcaagttgaggccttagaaggatctgagccacaaaagattagtgtttgctccaccaataatccagttgacgcctcattctttgaatcctttgaagcatcacactccaagcgtgatttaactagctccattgcagagaaacttggtgtccgagctcctcctgttagaatggatagccaagcaaaatatggtgccctagcacgtggtgatggtgccatttttctgcgcatcccgcacaaaagttacatagaaacagtttgggatcatgcagctggatcaattattgtcacagaagctggtggcatggtaaaagatgccgcaggaaacgatttggatttttgcaaaggtagatatcttgatcgtgacagaggaattattgcaacaaacaagcatttaatgccactagttctaaaggcggttcaagaggctatgaaggaggaacagtaggctgctgtgttcatggagcagttgcaatatttgttatgacatttcctgtttgaatcttaatattagttttgcacaatctcgatgtgcggaaaagttgttgtacttgtaccatatgctagtgtatcgtgtgagtcatatgccactcacatactcacatttccttatctcaacaaatggatatgaatttacctg

SEQ ID NO: 11702 - protein, 354 aa, Zea mays subsp. mays
  peptide (1)..(354): Ceres Seq. ID no. 13498902
MSQATEVVGNPYAAELAAAKKAVALAARLCQRVQRSILHSDIQSKADKTPVTVADYGSQVLVCLVLKKELPSHSFSIIAEEDSKDLREDGAQEIIEHITTLINETIVNDGSYNMSLSKEDVLSAIDGGKSEGGPSGRHWILDPIDGTKGFIRGDQYAVALGLLDEGKVVLGVLGCPNLPLKSTNKNNSSSFGDRIGSLFFATIGCGAQVEALEGSEPQKISVCSTNNPVDASFFESFEASHSKRDLTSSIAEKLGVRAPPVRMDSQAKYGALARGDGAIFLRIPHKSYIETVWDHAAGSIIVTEAGGMVKDAAGNDLDFCKGRYLDRDRGIIATNKHLMPLVLKAVQEAMKEEQ

SEQ ID NO: 11703 - protein, 241 aa, Zea mays subsp. mays
  peptide (1)..(241): Ceres Seq. ID no. 13498903
MSLSKEDVLSAIDGGKSEGGPSGRHWILDPIDGTKGFIRGDQYAVALGLLDEGKVVLGVLGCPNLPLKSTNKNNSSSFGDRIGSLFFATIGCGAQVEALEGSEPQKISVCSTNNPVDASFFESFEASHSKRDLTSSIAEKLGVRAPPVRMDSQAKYGALARGDGAIFLRIPHKSYIETVWDHAAGSIIVTEAGGMVKDAAGNDLDFCKGRYLDRDRGIIATNKHLMPLVLKAVQEAMKEEQ

SEQ ID NO: 11704 - DNA, 1814 bp, Zea mays subsp. mays
  misc_feature (1)..(1814): Ceres Seq. ID no. 12411778
  misc_feature (1)..(1814): Ortholog of  Ceres SEQ ID NO 15171430 as cited in SEQ ID NO 51500
  misc_feature (1)..(1814): Ortholog of  Ceres SEQ ID NO 15170354 as cited in SEQ ID NO 54190
  misc_feature (1)..(1814): Ortholog of  Ceres SEQ ID NO 14307253 as cited in SEQ ID NO 54783
  misc_feature (1)..(1814): Ortholog of  Ceres SEQ ID NO 15172476 as cited in SEQ ID NO 54945
  misc_feature (1)..(1814): Ortholog of  Ceres SEQ ID NO 13594213 as cited in SEQ ID NO 57038
  misc_feature (1)..(1814): Ortholog of  Ceres SEQ ID NO 15171508 as cited in SEQ ID NO 58526
  misc_feature (1)..(1814): Ortholog of  Ceres SEQ ID NO 14312300 as cited in SEQ ID NO 58632
  misc_feature (1)..(1814): Ortholog of  Ceres SEQ ID NO 15176106 as cited in SEQ ID NO 60324
  misc_feature (1)..(1814): Ortholog of  Ceres SEQ ID NO 13654989 as cited in SEQ ID NO 63117
  misc_feature (1)..(1814): Ortholog of  Ceres SEQ ID NO 13584744 as cited in SEQ ID NO 69137
acaggaagggaaggggaggaagcagcagcagcacacagctttgctctcgctctcggctccccgtccaccaaaggaggaaacgcgcagcccgcagcgctagccgtcgtctatctcgtctcctagtccaaggaaggaaagaggcgcttggcatgaagcgacctaccaagaatgagacgctgggctacccctggcacaagtagagcaagagccccagcaaccgagccacagtgaggaggactcgagggaagagatgggcaactgcggcacgcgggaggagaatgccgtcgtcgctgcgcacgcacaagttcaacagctccacttgttacaaaatcctgccaagaatgccattggagataggaagcacaaccgcacctcatcagatataagtgatccttccacacctaggaaagctgaagatgccaagaacatttccatatacaacgatgtgattgtcttcacattgtttgagctagagacaatcacaaagagcttccgtgccgattatgttctcggcgaaggaggatttgggaccgtttacaagggctacatagatgaaaatgtcagggtggggctgaagtcactgcctgttgcagtcaaggtgctcaacaaagatggacaccaagggcacagagaatggcttaccgaagttaactgcctggggcagttaaggcatccaaacttggtgaagttgatcggatattgctgcgaagatgaccatcggctgcttgtctacgagttcatgtttcgaggaagcctagaaaaccacctattccgaaagacagctacaccattaccctggggtactaggatgtcaatcgcactgggagctgctaaagggcttgcttgcctccacaatgctcaaaggcctgtcatctacagagatttcaagacatcaaatattctactggactctgattatactgctaagctgtctgactttggcctggcaaaagctggccctgaaggtgatcagacccatgtatcaacacgggtgatgggaacctacggttatgctgcccctgaatatgtgatgactggccacttgactgctagaagtgatgtctacagcttcggtgtggtccttctggagctcttgacagggcgcaagtcaatcgacaagtcgcggcccagcagggagcagagcctggttgactgggccctccccaagctgaacgacaagaggcggcttctccagatcatcgacccgagactggaggggcagtactcggccagagccgcccacaaagcctgcagccttgcgttctactgcctgagccagaaccccaaggccaggccactcatgagcgacgtcgtcgagaccctcgaaccgttgcagggcagcggtggaggcgacggacgcggccagccttctggccttcctgactataggggtcgccgcaggataaccgggaacagcgtccacttcagggccatcccgaaccccaagtgctcccccgccgtcccggccacggcttgccgagtgcggtgatgggtgctgtgtttcggttggagttgccggggtaggttccgttgtgtatattgcggccgtgggcggtggtgtgtgtgtgggtgcatgtgtgtgcttggcggcggcggggtttcggtttcttctcgggttttggccggcgttttgatgtgtaaatttgatctgcgtgctgcattgctgctgctgcttttgtaaggccctctaattttcactgtggtcttatgtatccttcgactgagcgagccctgctgaaactggcgggttcgggattaaccctagaaatgaaatgaaaggctgaaccgagagcgggttggatgattgatatggc

SEQ ID NO: 11705 - protein, 412 aa, Zea mays subsp. mays
  peptide (1)..(412): Ceres Seq. ID no. 12411779
MGNCGTREENAVVAAHAQVQQLHLLQNPAKNAIGDRKHNRTSSDISDPSTPRKAEDAKNISIYNDVIVFTLFELETITKSFRADYVLGEGGFGTVYKGYIDENVRVGLKSLPVAVKVLNKDGHQGHREWLTEVNCLGQLRHPNLVKLIGYCCEDDHRLLVYEFMFRGSLENHLFRKTATPLPWGTRMSIALGAAKGLACLHNAQRPVIYRDFKTSNILLDSDYTAKLSDFGLAKAGPEGDQTHVSTRVMGTYGYAAPEYVMTGHLTARSDVYSFGVVLLELLTGRKSIDKSRPSREQSLVDWALPKLNDKRRLLQIIDPRLEGQYSARAAHKACSLAFYCLSQNPKARPLMSDVVETLEPLQGSGGGDGRGQPSGLPDYRGRRRITGNSVHFRAIPNPKCSPAVPATACRVR

SEQ ID NO: 11706 - protein, 249 aa, Zea mays subsp. mays
  peptide (1)..(249): Ceres Seq. ID no. 12411780
MFRGSLENHLFRKTATPLPWGTRMSIALGAAKGLACLHNAQRPVIYRDFKTSNILLDSDYTAKLSDFGLAKAGPEGDQTHVSTRVMGTYGYAAPEYVMTGHLTARSDVYSFGVVLLELLTGRKSIDKSRPSREQSLVDWALPKLNDKRRLLQIIDPRLEGQYSARAAHKACSLAFYCLSQNPKARPLMSDVVETLEPLQGSGGGDGRGQPSGLPDYRGRRRITGNSVHFRAIPNPKCSPAVPATACRVR

SEQ ID NO: 11707 - protein, 226 aa, Zea mays subsp. mays
  peptide (1)..(226): Ceres Seq. ID no. 12411781
MSIALGAAKGLACLHNAQRPVIYRDFKTSNILLDSDYTAKLSDFGLAKAGPEGDQTHVSTRVMGTYGYAAPEYVMTGHLTARSDVYSFGVVLLELLTGRKSIDKSRPSREQSLVDWALPKLNDKRRLLQIIDPRLEGQYSARAAHKACSLAFYCLSQNPKARPLMSDVVETLEPLQGSGGGDGRGQPSGLPDYRGRRRITGNSVHFRAIPNPKCSPAVPATACRVR

SEQ ID NO: 11708 - DNA, 1314 bp, Zea mays subsp. mays
  misc_feature (1)..(1314): Ceres Seq. ID no. 12342241
  misc_feature (1)..(1314): Ortholog of  Ceres SEQ ID NO 15176941 as cited in SEQ ID NO 55559
gctttccatgaagaaccaagaaatagtacaggcatcagggaacagatcttggacattcttacattcgagacattatggttttgtgttattgatcaacttggatcaagtaataatgttgtcaaatctgttctcatcaacatcatcgtcagaataataccatttgttctgtggggtctaaaatctgcacatgttatttgcaggttcgtattgatgccgctggcagtatttgtcttcctagcctataaatactggaaaacacggataacaatagatgcagtcgagaagttcctgcgaatgcagcatatgctcgttccgatgagatatgcatacacaaacatcattgcaatcaccagccatttcagagacaagctcggacaaggaggctacggtactgtatacaagggggtgctacagccaggtgaagttcatgttgctattaagatgctaggcaactccaactgtaacggagacgagttcatcagtgaggtggccaccattggaaagatccaccatgtcaatgttgtgcgcctcattgggttttgctccgaggaaaatatcagggcacttatctatgagttcatgccccgtggatctctcgataagtacatcttctcgtcggagaagacattctcatgggacaaactcaacgagatcgctctgggcattgctagaggtctcaactacctacatcacgggtgtgatatgcagattgtacacttcgacatcaagccacacaacatccttcttgacagcaactttgttccaaaagttgctgattttgggcttgccaaactgttcccaagaggcgacactttcgtgccactgagcgctatgcggggaacgataggatatatagctccagatggtatctcgaagctttggtgtcatctctagcaaatctgatgtgtatagctttggaatgctactgttggagatgacgggcgggcgaaggaatgcagatcctcatgcaggaagctccagtcaagcatactacccatccttggtgtacagccaactaagccaaggagatgtgggcgggatcagtaaaggtgttgatatgcacgagttagagaagaagctatgtatcattggactttggtgcatccagatgaagacgcaagatcgacagacgatgagtgaggtcatagagatgcttgaagctagtgtcgatggcatccaaatgcctccaaggccattcttttgtgatgacgagggtgatagttcttactctgcaatctctgaattggatacaatagaagagtagtagtagtaaaatacacttgtgtatatttgatcttaatgtattagactact

SEQ ID NO: 11709 - protein, 297 aa, Zea mays subsp. mays
  peptide (1)..(297): Ceres Seq. ID no. 12342242
AFHEEPRNSTGIREQILDILTFETLWFCVIDQLGSSNNVVKSVLINIIVRIIPFVLWGLKSAHVICRFVLMPLAVFVFLAYKYWKTRITIDAVEKFLRMQHMLVPMRYAYTNIIAITSHFRDKLGQGGYGTVYKGVLQPGEVHVAIKMLGNSNCNGDEFISEVATIGKIHHVNVVRLIGFCSEENIRALIYEFMPRGSLDKYIFSSEKTFSWDKLNEIALGIARGLNYLHHGCDMQIVHFDIKPHNILLDSNFVPKVADFGLAKLFPRGDTFVPLSAMRGTIGYIAPDGISKLWCHL

SEQ ID NO: 11710 - protein, 227 aa, Zea mays subsp. mays
  peptide (1)..(227): Ceres Seq. ID no. 12342243
MPLAVFVFLAYKYWKTRITIDAVEKFLRMQHMLVPMRYAYTNIIAITSHFRDKLGQGGYGTVYKGVLQPGEVHVAIKMLGNSNCNGDEFISEVATIGKIHHVNVVRLIGFCSEENIRALIYEFMPRGSLDKYIFSSEKTFSWDKLNEIALGIARGLNYLHHGCDMQIVHFDIKPHNILLDSNFVPKVADFGLAKLFPRGDTFVPLSAMRGTIGYIAPDGISKLWCHL

SEQ ID NO: 11711 - protein, 199 aa, Zea mays subsp. mays
  peptide (1)..(199): Ceres Seq. ID no. 12342244
MQHMLVPMRYAYTNIIAITSHFRDKLGQGGYGTVYKGVLQPGEVHVAIKMLGNSNCNGDEFISEVATIGKIHHVNVVRLIGFCSEENIRALIYEFMPRGSLDKYIFSSEKTFSWDKLNEIALGIARGLNYLHHGCDMQIVHFDIKPHNILLDSNFVPKVADFGLAKLFPRGDTFVPLSAMRGTIGYIAPDGISKLWCHL

SEQ ID NO: 11712 - DNA, 1056 bp, Zea mays subsp. mays
  misc_feature (1)..(1056): Ceres Seq. ID no. 13493533
  misc_feature (1)..(1056): Ortholog of  Ceres SEQ ID NO 14302493 as cited in SEQ ID NO 67957
ctagacgccacacacacacatcgcttctccacacgacctcgctgaaccggaagacccgcacacacacgccacttgtgcaccatggcgccccgggtggcggacaagtcgccattgccgctggccaccggcctgaagctgggcgtaggcggaggcatgggcctgggtccacactaccgaggcgtgaggaagcggccgtggggacgttacgccgcggagatccgcgacccagccaagaagagtcgcgtgtggctgggcacgtacgacacggccgaggaggccgccaaggcctacgacgtcgccgcccgcgagttccgtggcgccaaggccaagactaacttcccgttccccctcgccgtcgccgtcgccgtcgccggcggtgctggtagccccagcagcgacagcaccaccttggaatcgagctgtggcggcagcgggtgtggcgtcgaagcgcctgtgcaggcggccatgccgctgaccccggccctcgacctcgatctcttccaccgggcggccgccgtcagcgcggtcaccaccggcggcatgccctttccgttcaaggccttccccgtcgtgcgcccgaccccacatcagtacttcctctacaatcaggccgcggcggccgcggcagccgggtacaggatggtcaaggtcgcctcagctccagtcaccgtagccgccgtcgcgcagagcgactccgactcctcgtctgtggttgatcgcacctgttcgcctcccgcggtgacggcaaagaaggaggtcagcttcgaactggatctgaactggccgccgccggcagagaactagtcgcaccggagttttcagctgacgactttgcagtttcctttttcccttttggccttcatcaggaattgtagtgtagctctgggtgtttggtcttttttttttcttgcatgtagagtgtagactatgatatggtggagccttgtacatagtactgtagtgttttttttttccgccgagacggagtagatctgttcgtgtgtctggacagatcaaaccggcgttgatatgggctttaaaccatggagcatgttg

SEQ ID NO: 11713 - protein, 240 aa, Zea mays subsp. mays
  peptide (1)..(240): Ceres Seq. ID no. 13493534
MAPRVADKSPLPLATGLKLGVGGGMGLGPHYRGVRKRPWGRYAAEIRDPAKKSRVWLGTYDTAEEAAKAYDVAAREFRGAKAKTNFPFPLAVAVAVAGGAGSPSSDSTTLESSCGGSGCGVEAPVQAAMPLTPALDLDLFHRAAAVSAVTTGGMPFPFKAFPVVRPTPHQYFLYNQAAAAAAAGYRMVKVASAPVTVAAVAQSDSDSSSVVDRTCSPPAVTAKKEVSFELDLNWPPPAEN

SEQ ID NO: 11714 - protein, 216 aa, Zea mays subsp. mays
  peptide (1)..(216): Ceres Seq. ID no. 13493535
MGLGPHYRGVRKRPWGRYAAEIRDPAKKSRVWLGTYDTAEEAAKAYDVAAREFRGAKAKTNFPFPLAVAVAVAGGAGSPSSDSTTLESSCGGSGCGVEAPVQAAMPLTPALDLDLFHRAAAVSAVTTGGMPFPFKAFPVVRPTPHQYFLYNQAAAAAAAGYRMVKVASAPVTVAAVAQSDSDSSSVVDRTCSPPAVTAKKEVSFELDLNWPPPAEN

SEQ ID NO: 11715 - DNA, 1081 bp, Zea mays subsp. mays
  misc_feature (1)..(1081): Ceres Seq. ID no. 12386976
  misc_feature (1)..(1081): Ortholog of  Ceres SEQ ID NO 14305682 as cited in SEQ ID NO 59267
  misc_feature (1)..(1081): Ortholog of  Ceres SEQ ID NO 14315060 as cited in SEQ ID NO 60039
  misc_feature (1)..(1081): Ortholog of  Ceres SEQ ID NO 13594430 as cited in SEQ ID NO 60181
  misc_feature (1)..(1081): Ortholog of  Ceres SEQ ID NO 13597809 as cited in SEQ ID NO 64598
  misc_feature (1)..(1081): Ortholog of  Ceres SEQ ID NO 14313544 as cited in SEQ ID NO 68424
  misc_feature (1)..(1081): Ortholog of  Ceres SEQ ID NO 12617960 as cited in SEQ ID NO 69051
  misc_feature (1)..(1081): Ortholog of  Ceres SEQ ID NO 13589401 as cited in SEQ ID NO 0
  misc_feature (1)..(1081): Ortholog of  Ceres SEQ ID NO 15179361 as cited in SEQ ID NO 0
aaaggctacaagcctacaagcaaccgcgtccgcgtgtggagcaaggaaggagaggggagccgagcgggcaaaggggagcgcggcgacagacatggcggagcagcacaaggaggagtcgggcgtgacagtgctggacaagatctccgacaagctccacgggcgcgggggcggctcgtcttcgtcgtcggactcggacgacgagcgctcgtcggcgacggccgccgtgaaggccaagatctaccgcatcttcgggcgcgagaagcccgtgcactccgtcctcggcggcggcaagccggccgatctgtttctatggaggaacaagaggatctctggtggggtgctcgcaggcgcaactgccttctggctgctgtttgaggtcatggattaccacctcctcaccctgctatgccactgcctcatcctcaccctggccatcctgttcctctggtccaatgccacgactttcatcaacaagtctcctcctaacatccccgaggtgaagatcccagatgacctggctgtgaattttgcacgttccctgagatatgagatcaacaggggttttgctaccttgagggagattggccaaggccatgacctcaagaaatttctgattgtgattgcaggactgtggatcctttctgttcttgggagctgctgcaatttcctcaccttgtcttacatagtttttatggtactgtacactgtaccggtcctgtatgagaaacatgaggataaggttgatgcttttggtgagaaggccatggtcgagctgaagaagtactacgccatcttcgacgagaaatgtctatcaaagattccgaagggcccattaaaagacaagaagcaacattagaagcgtagaatcagataagggtctgcggtgatttatcatctcttttgaccattactcgtcggttttggaggatggatgtgattccatgtctaaatacctggacgtgctctagtgttttagtgtggtcagtatcaatgttctaaattatctgagattacgctgaatcatgttctgaagtccacgtttaactttgctctccctatcctttggaagtggcaatttcct

SEQ ID NO: 11716 - protein, 284 aa, Zea mays subsp. mays
  peptide (1)..(284): Ceres Seq. ID no. 12386977
KATSLQATASACGARKERGAERAKGSAATDMAEQHKEESGVTVLDKISDKLHGRGGGSSSSSDSDDERSSATAAVKAKIYRIFGREKPVHSVLGGGKPADLFLWRNKRISGGVLAGATAFWLLFEVMDYHLLTLLCHCLILTLAILFLWSNATTFINKSPPNIPEVKIPDDLAVNFARSLRYEINRGFATLREIGQGHDLKKFLIVIAGLWILSVLGSCCNFLTLSYIVFMVLYTVPVLYEKHEDKVDAFGEKAMVELKKYYAIFDEKCLSKIPKGPLKDKKQH

SEQ ID NO: 11717 - protein, 254 aa, Zea mays subsp. mays
  peptide (1)..(254): Ceres Seq. ID no. 12386978
MAEQHKEESGVTVLDKISDKLHGRGGGSSSSSDSDDERSSATAAVKAKIYRIFGREKPVHSVLGGGKPADLFLWRNKRISGGVLAGATAFWLLFEVMDYHLLTLLCHCLILTLAILFLWSNATTFINKSPPNIPEVKIPDDLAVNFARSLRYEINRGFATLREIGQGHDLKKFLIVIAGLWILSVLGSCCNFLTLSYIVFMVLYTVPVLYEKHEDKVDAFGEKAMVELKKYYAIFDEKCLSKIPKGPLKDKKQH

SEQ ID NO: 11718 - protein, 158 aa, Zea mays subsp. mays
  peptide (1)..(158): Ceres Seq. ID no. 12386979
MDYHLLTLLCHCLILTLAILFLWSNATTFINKSPPNIPEVKIPDDLAVNFARSLRYEINRGFATLREIGQGHDLKKFLIVIAGLWILSVLGSCCNFLTLSYIVFMVLYTVPVLYEKHEDKVDAFGEKAMVELKKYYAIFDEKCLSKIPKGPLKDKKQH

SEQ ID NO: 11719 - DNA, 1445 bp, Zea mays subsp. mays
  misc_feature (1)..(1445): Ceres Seq. ID no. 12411772
  misc_feature (1)..(1445): Ortholog of  Ceres SEQ ID NO 13596392 as cited in SEQ ID NO 62136
  misc_feature (1)..(1445): Ortholog of  Ceres SEQ ID NO 14313244 as cited in SEQ ID NO 66802
  misc_feature (1)..(1445): Ortholog of  Ceres SEQ ID NO 13654360 as cited in SEQ ID NO 67980
  misc_feature (1)..(1445): Ortholog of  Ceres SEQ ID NO 13596394 as cited in SEQ ID NO 68561
actatccattttcattcaatgcgtccgcgccgcgcgcctccattcctctcgattcccttcctccttccttgttcgaggacctccgtgaccgtggccgagggattgaggacggaaagcgaaaatgatgctgacgcgggcgtcgatgggggtgatggatgcggcggcggtggacgaggtggtgcgtcgcctcgtcgagggcggccgcgggggccggcaggtgcagatgtccgaggccgagatccgccagctctgcgtcgaggccaaacaggtgctgctgtcgcagcccaacctcctccgcatccacgcgcccgtcaagatctgcggtgatatccatggacaatttgttgatctcttgaggctctttgatttgggtggttatcctccaacttcaacttatattttccttggagactatgtggatagaggcaaacaaagcttagaaaccatatgtctgcttctggcatacaagttgaagtaccctgataatatataccttttaaggggaaaccatgaagatgcaaaaattaacagagtttatggtttctatgatgaatgtaaaaggagattcaatgttcgactatggaagatattctgtgattgcttcaactgcttgcctatggcagcacttattgatgacaaaatattatgcatgcatggtggcctctcacctgaattgactagcttggatcaaataaaagatattgagaggcctaccgaaattccagactatggtcttctgtgcgatctcctttggtctgatcccagtcatgatacagaaggttggggggagagtgatagaggtgtttcttgcacttttggcgcagataagcttgttgaatttttggagaagaatgatcttgaccttgtgtgcagagctcatcaggtggtagaagatggctacgagttctttgcagagagaagactagtgaccatcttttcagctccaaactactgtggcgaatttgataatgcaggtgctctattgagcatagatgaaagcttgatgtgttcttttcagatcttgaaaccaaatgaaacaggtgcaccacattcaaggaaacctcttccaagcaaggcaccaaaaggagagaacgtctaatttgtatccagtgacctaatcacaatcgatgtcagctcgaagggggcgatctcgttgtctcggatccaccagggcatggcattagcgttctacacttgctgaatttgtgtggactcaatcggcagcgcttacattcttctgtacagcagcagtgtttctaacttggcatatcgtccgttctgatagttacattgccacagctgcaatattttagtcgggtggacaaggcattttgttgggtacagtagctgttgttttgttagcctttttttggtaatgtttgtttggttgattgaacgctgtgagttttgtttgccgcgtatcttcgtcaggctcgggtatttac

SEQ ID NO: 11720 - protein, 325 aa, Zea mays subsp. mays
  peptide (1)..(325): Ceres Seq. ID no. 12411773
MMLTRASMGVMDAAAVDEVVRRLVEGGRGGRQVQMSEAEIRQLCVEAKQVLLSQPNLLRIHAPVKICGDIHGQFVDLLRLFDLGGYPPTSTYIFLGDYVDRGKQSLETICLLLAYKLKYPDNIYLLRGNHEDAKINRVYGFYDECKRRFNVRLWKIFCDCFNCLPMAALIDDKILCMHGGLSPELTSLDQIKDIERPTEIPDYGLLCDLLWSDPSHDTEGWGESDRGVSCTFGADKLVEFLEKNDLDLVCRAHQVVEDGYEFFAERRLVTIFSAPNYCGEFDNAGALLSIDESLMCSFQILKPNETGAPHSRKPLPSKAPKGENV

SEQ ID NO: 11721 - protein, 324 aa, Zea mays subsp. mays
  peptide (1)..(324): Ceres Seq. ID no. 12411774
MLTRASMGVMDAAAVDEVVRRLVEGGRGGRQVQMSEAEIRQLCVEAKQVLLSQPNLLRIHAPVKICGDIHGQFVDLLRLFDLGGYPPTSTYIFLGDYVDRGKQSLETICLLLAYKLKYPDNIYLLRGNHEDAKINRVYGFYDECKRRFNVRLWKIFCDCFNCLPMAALIDDKILCMHGGLSPELTSLDQIKDIERPTEIPDYGLLCDLLWSDPSHDTEGWGESDRGVSCTFGADKLVEFLEKNDLDLVCRAHQVVEDGYEFFAERRLVTIFSAPNYCGEFDNAGALLSIDESLMCSFQILKPNETGAPHSRKPLPSKAPKGENV

SEQ ID NO: 11722 - protein, 318 aa, Zea mays subsp. mays
  peptide (1)..(318): Ceres Seq. ID no. 12411775
MGVMDAAAVDEVVRRLVEGGRGGRQVQMSEAEIRQLCVEAKQVLLSQPNLLRIHAPVKICGDIHGQFVDLLRLFDLGGYPPTSTYIFLGDYVDRGKQSLETICLLLAYKLKYPDNIYLLRGNHEDAKINRVYGFYDECKRRFNVRLWKIFCDCFNCLPMAALIDDKILCMHGGLSPELTSLDQIKDIERPTEIPDYGLLCDLLWSDPSHDTEGWGESDRGVSCTFGADKLVEFLEKNDLDLVCRAHQVVEDGYEFFAERRLVTIFSAPNYCGEFDNAGALLSIDESLMCSFQILKPNETGAPHSRKPLPSKAPKGENV

SEQ ID NO: 11723 - DNA, 1995 bp, Zea mays subsp. mays
  misc_feature (1)..(1995): Ceres Seq. ID no. 12423833
  misc_feature (1)..(1995): Ortholog of  Ceres SEQ ID NO 13595900 as cited in SEQ ID NO 69289
gcacgagaccattacctagaacatcctaatcaaaaagagacgcgaatccctccctcgccccacgtccgaggtcgctcgccaattcgatccgcctcatcgtcgcccgcccgcccgtccgccggtcgaccttgactgctccgtcgcacgtggcgtttcgcagcgcggaatctacccctgggttgggttgggagatccggggaaacccttgttcccgggcgctccgggctcgaatctcgctgcagacgggcaatgtgagcgctctccatcggagagggacgatctgcggggcggttgttggccgggtgaatcgtgcggtgcggggttgcgggaatggagcacgtgatcggagggaagtttaagcttgggaagaagatcgggagcggatctttcggggagctctatctcggtgtgaacgtacagagcggcgaagaggtggctatcaagttggaatctgtaaaatcaaggcatcctcagcttcattatgagtcaaaactatacatgcttctccaagggggaactggaattcctcatttgaaatggtttggagtggatggggagtacaatgtcatggtcattgatcttcttggtccaagcctcgaagacttgttcaactactgtaacagaaagttttctcttaaaacagtacttatgctagctgatcagatgatatctagggtagagtacatgcacacgagggggtttcttcatcgtgatatcaagccagacaacttcctcatgggcttaggccgtaaaacaagtcaggtttatgtcattgactatggccttgcgaagaagtatcgggacctccaaactcatagacacattccatacagggagaacaaaaacctcacaggaacagcacgatatgctagtgtaaacacccatcttggagtagaacaaagcaggagagatgacttagagtctcttggttatgtgctgatgtacttcttaagaggaagccttccttggcaaggcctgaaagctggaacgaaaaaacaaaagtatgacaaaattagtgagaagaaaatgctaacctcaattgaggccctgtgtaaatcttatccatcagaattcgttacatatttccattattgccgctctttgcaatttgaagataagccagactacagctatttgaagaaaaattttcgggatttattcatccgtgaaggttaccagcctgattatgtatttgattggactgtatcaaggcaagctgcggacaataacagattgcgactgagtgggaagacaggtgggttggtgggaccatctgtggatcgggctgaacgagctgcatcaaaacaggatgttccacatagattcactggtccagctgatgcattggctaaaagaactggctctggttctggtcattatggagaacacacaaagcacagaactctgttggattcccttatggcatccaatatgggtgttgactcggataaaagaaggcattcatcatctcgcaatggaagcacatcaaggaaggctcttctgtcaagcaaccgaggttctggagaccccagtgaaccaaatcgcagcagccacctagttccgaccaccaccagcagcagccgtccatcgaccaatcaaaggcttcaccactcaactggacttgagggcaggacctcatcatttccaaaacctggaagaatcggctatgatgatcccacaatgaggagttttgaacgccttactattagcgcagagaggaggaaatgaatctttggaagagcaaacgatctgagctgctcccggcgagtatactgattcactgaatggattctgtgctgtgcatggtgctgagctctgcacatagcggtgctcattgattcttggcacagatgatttgagttatgtacattcgtttaactcttccaaaaggttagcgaagcattttacaccccgctatgagggaccggggatcggctgcaatgtttaagccgtggtgatttaagatgatgttgactctaatacttatataatgac

SEQ ID NO: 11724 - protein, 465 aa, Zea mays subsp. mays
  peptide (1)..(465): Ceres Seq. ID no. 12423834
MEHVIGGKFKLGKKIGSGSFGELYLGVNVQSGEEVAIKLESVKSRHPQLHYESKLYMLLQGGTGIPHLKWFGVDGEYNVMVIDLLGPSLEDLFNYCNRKFSLKTVLMLADQMISRVEYMHTRGFLHRDIKPDNFLMGLGRKTSQVYVIDYGLAKKYRDLQTHRHIPYRENKNLTGTARYASVNTHLGVEQSRRDDLESLGYVLMYFLRGSLPWQGLKAGTKKQKYDKISEKKMLTSIEALCKSYPSEFVTYFHYCRSLQFEDKPDYSYLKKNFRDLFIREGYQPDYVFDWTVSRQAADNNRLRLSGKTGGLVGPSVDRAERAASKQDVPHRFTGPADALAKRTGSGSGHYGEHTKHRTLLDSLMASNMGVDSDKRRHSSSRNGSTSRKALLSSNRGSGDPSEPNRSSHLVPTTTSSSRPSTNQRLHHSTGLEGRTSSFPKPGRIGYDDPTMRSFERLTISAERRK

SEQ ID NO: 11725 - protein, 409 aa, Zea mays subsp. mays
  peptide (1)..(409): Ceres Seq. ID no. 12423835
MLLQGGTGIPHLKWFGVDGEYNVMVIDLLGPSLEDLFNYCNRKFSLKTVLMLADQMISRVEYMHTRGFLHRDIKPDNFLMGLGRKTSQVYVIDYGLAKKYRDLQTHRHIPYRENKNLTGTARYASVNTHLGVEQSRRDDLESLGYVLMYFLRGSLPWQGLKAGTKKQKYDKISEKKMLTSIEALCKSYPSEFVTYFHYCRSLQFEDKPDYSYLKKNFRDLFIREGYQPDYVFDWTVSRQAADNNRLRLSGKTGGLVGPSVDRAERAASKQDVPHRFTGPADALAKRTGSGSGHYGEHTKHRTLLDSLMASNMGVDSDKRRHSSSRNGSTSRKALLSSNRGSGDPSEPNRSSHLVPTTTSSSRPSTNQRLHHSTGLEGRTSSFPKPGRIGYDDPTMRSFERLTISAERRK

SEQ ID NO: 11726 - protein, 386 aa, Zea mays subsp. mays
  peptide (1)..(386): Ceres Seq. ID no. 12423836
MVIDLLGPSLEDLFNYCNRKFSLKTVLMLADQMISRVEYMHTRGFLHRDIKPDNFLMGLGRKTSQVYVIDYGLAKKYRDLQTHRHIPYRENKNLTGTARYASVNTHLGVEQSRRDDLESLGYVLMYFLRGSLPWQGLKAGTKKQKYDKISEKKMLTSIEALCKSYPSEFVTYFHYCRSLQFEDKPDYSYLKKNFRDLFIREGYQPDYVFDWTVSRQAADNNRLRLSGKTGGLVGPSVDRAERAASKQDVPHRFTGPADALAKRTGSGSGHYGEHTKHRTLLDSLMASNMGVDSDKRRHSSSRNGSTSRKALLSSNRGSGDPSEPNRSSHLVPTTTSSSRPSTNQRLHHSTGLEGRTSSFPKPGRIGYDDPTMRSFERLTISAERRK

SEQ ID NO: 11727 - DNA, 1289 bp, Zea mays subsp. mays
  misc_feature (1)..(1289): Ceres Seq. ID no. 12351725
  misc_feature (1)..(1289): Ortholog of  Ceres SEQ ID NO 14315892 as cited in SEQ ID NO 57776
  misc_feature (1)..(1289): Ortholog of  Ceres SEQ ID NO 13662173 as cited in SEQ ID NO 62002
gacctgatcctgacccgtgcgggcgtgcggctcctcgcggacagctccagactccagagccgcctcttcgccctctcgccatcggcaggctacggtggctgcttccccgagcctgcaggtagaccaccttgtgttgattcctcgagtcttcacctggtgcttccgtttgcagcttcatttttaactaagatgtcacaagccaaggaagtgaggtacactgcacggtctattacacctcctgctgatagaaatggcacttcaaggtcgcctcctccaaagagacgcagcccttcaaggtcacctccaccaaagagtgcttcacggtccccacgtccaaggagtccaaagagacgcagcacttcaaggtctcctcctaggagacgtggtagatcaaggtcaagggataggagtcggtccaggagcccagatgatagaaatccagggaataacctttatgtaactggattgtctactcgtgtaacggaagatgatcttgagaagttctttagtaaagaaggaaaggttaagaactgtcatgttgttcttgatcctaggacaaaagaatcccgtggctttgccttcgtgactatggatactcttgaaggtgcaagacgctccatcaagtatctgcaccgcactgtacttgaaggtcgcctggtcactgtagagaaggctaaaagaactcgtgaaaggacccctactcctggaaaatactgtggtcgaagaggaggatctcaaaggagcccatcaccttaccgccctcgtagaagggagcgttcgcgctcaagggaacgcagaagggagcgttcgcgttcaagggatcgaagggagcggtctcgctcaagggatcgaagggagcggtctcgctcaagggaacgccgaagggagcggtctcgttcaagggaccgcagggagaggtctcgctcaagggaccgccggagggagcgctcacgctcaagggaccgcagaagggagcgctcacgctcaagggaccggaggggcagttcaccccatggcagaaggcatagagatcggtccaggtcacccaccagcaatgggaaccataaggcagactaggaagcgcttttatggacttgtcgttgattgcgtgaacaaaggaacttgtaacactacctataaactggtcagactgagacggttagcatggatttttagtagtgttgctgtattttgttgtttcatacaagtactctattctgttagctttcggatcgaaatgtcggatgatgatggttgttattgttctggaaatcgtagacatgtcctcc

SEQ ID NO: 11728 - protein, 358 aa, Zea mays subsp. mays
  peptide (1)..(358): Ceres Seq. ID no. 12351726
DLILTRAGVRLLADSSRLQSRLFALSPSAGYGGCFPEPAGRPPCVDSSSLHLVLPFAASFLTKMSQAKEVRYTARSITPPADRNGTSRSPPPKRRSPSRSPPPKSASRSPRPRSPKRRSTSRSPPRRRGRSRSRDRSRSRSPDDRNPGNNLYVTGLSTRVTEDDLEKFFSKEGKVKNCHVVLDPRTKESRGFAFVTMDTLEGARRSIKYLHRTVLEGRLVTVEKAKRTRERTPTPGKYCGRRGGSQRSPSPYRPRRRERSRSRERRRERSRSRDRRERSRSRDRRERSRSRERRRERSRSRDRRERSRSRDRRRERSRSRDRRRERSRSRDRRGSSPHGRRHRDRSRSPTSNGNHKAD

SEQ ID NO: 11729 - protein, 295 aa, Zea mays subsp. mays
  peptide (1)..(295): Ceres Seq. ID no. 12351727
MSQAKEVRYTARSITPPADRNGTSRSPPPKRRSPSRSPPPKSASRSPRPRSPKRRSTSRSPPRRRGRSRSRDRSRSRSPDDRNPGNNLYVTGLSTRVTEDDLEKFFSKEGKVKNCHVVLDPRTKESRGFAFVTMDTLEGARRSIKYLHRTVLEGRLVTVEKAKRTRERTPTPGKYCGRRGGSQRSPSPYRPRRRERSRSRERRRERSRSRDRRERSRSRDRRERSRSRERRRERSRSRDRRERSRSRDRRRERSRSRDRRRERSRSRDRRGSSPHGRRHRDRSRSPTSNGNHKAD

SEQ ID NO: 11730 - DNA, 657 bp, Zea mays subsp. mays
  misc_feature (1)..(657): Ceres Seq. ID no. 12341116
  misc_feature (1)..(657): Ortholog of  Ceres SEQ ID NO 13596110 as cited in SEQ ID NO 68647
actagaaaagaggatcttgagagtgttgttggcatggcttcgtcagcaacagcaagcggtgggaagtttgacgagaagttgcctggcgagaaacctccaaagcaccctggcaaacatagaaagttcctcccagttgctgaggggaagggaatgggcagcctggagaaacagcagaatgacaaaatcctgagctctctacttgccagaaactctgatgaaccgcttgatgtcagcaaggcaattacaatgtacaaggtgaaaaaggaaaagcagagaaggaaagagaaaaatatgccatcaaaatctgataagcttaagccccagaagaaaccccacaagaaatcatcgaagaaaagggcttaggtccacgtctttcagttgaccacagttttgaaagctgaagcaaggaggcctgtcacatattggattgtatttgtgagctttgaatctctgggagaaatattgttattccgtctaatggttatgatacaaaaacctgaatgctttgccatggtatgcgcccatcttgtacttttcaaattatgtttgggatgtggtttgtagcttggtaagagtccctccctttggttctgaaacctgttcaaaggagctgtcctggaaacagtaccaatgaagctactgtctagtgtcgatggt

SEQ ID NO: 11731 - protein, 120 aa, Zea mays subsp. mays
  peptide (1)..(120): Ceres Seq. ID no. 12341117
TRKEDLESVVGMASSATASGGKFDEKLPGEKPPKHPGKHRKFLPVAEGKGMGSLEKQQNDKILSSLLARNSDEPLDVSKAITMYKVKKEKQRRKEKNMPSKSDKLKPQKKPHKKSSKKRA

SEQ ID NO: 11732 - protein, 109 aa, Zea mays subsp. mays
  peptide (1)..(109): Ceres Seq. ID no. 12341118
MASSATASGGKFDEKLPGEKPPKHPGKHRKFLPVAEGKGMGSLEKQQNDKILSSLLARNSDEPLDVSKAITMYKVKKEKQRRKEKNMPSKSDKLKPQKKPHKKSSKKRA

SEQ ID NO: 11733 - protein, 70 aa, Zea mays subsp. mays
  peptide (1)..(70): Ceres Seq. ID no. 12341119
MGSLEKQQNDKILSSLLARNSDEPLDVSKAITMYKVKKEKQRRKEKNMPSKSDKLKPQKKPHKKSSKKRA

SEQ ID NO: 11734 - DNA, 1365 bp, Zea mays subsp. mays
  misc_feature (1)..(1365): Ceres Seq. ID no. 12367526
  misc_feature (1)..(1365): Ortholog of  Ceres SEQ ID NO 12583469 as cited in SEQ ID NO 51031
  misc_feature (1)..(1365): Ortholog of  Ceres SEQ ID NO 13596527 as cited in SEQ ID NO 62582
  misc_feature (1)..(1365): Ortholog of  Ceres SEQ ID NO 15226378 as cited in SEQ ID NO 62741
  misc_feature (1)..(1365): Ortholog of  Ceres SEQ ID NO 15169639 as cited in SEQ ID NO 64624
  misc_feature (1)..(1365): Ortholog of  Ceres SEQ ID NO 13595998 as cited in SEQ ID NO 68161
  misc_feature (1)..(1365): Ortholog of  Ceres SEQ ID NO 14303635 as cited in SEQ ID NO 68503
agttccattcaagcgcactgctggactccaactcgactgctctgcgtagcggagtaggctgatcagaggcgagatatgaggagcggccggcggatggcggcagctctggtggcgctggcgtgggcgctcgcggctgtggctgtggcggcggcgcagaagtacaatgccatcttcaacttcggcgactccatcaccgacacggggaacctctgcaccagcgggaggccgtcgcagatcaccttcacgcagccgccctacggcgagacctacttcggcacgccgacgtgccgctgctgcgacggccgcgtgatcccggacttcctctgctccaagttcgggctgccgttcctgccgccgtccaagtcgacgacggccgacttcaaggagggcgccaacatggccatcaccggcgcgactgccatggacgcgcccttcttccgctcgctggggctctccgacaagatctggaacaacgggcccatcagcttccagctggagtggttccagcaggtcgcgtccgccgtgtgcggcggggggcaggcgcagcaggccgactgcaagagctacctggccaactccctgttcgtgttcggcgagttcggcggcaacgactacaacgccatgctgttcggcaactacagcgcggaccaggccagcacgtacacgccgcagggtcgtggccgccgtcgccagcggcgtcgagaagctggtggccatgggcgccaccgacatcgtggtgcccggcgtcctccccatcggctgcttccccatctacctcaccttctacggcacctccagcagcgccgactacgacagcctcggctgcctcaggaagttcaacgacctgtccaccaaccacaacaaccagctgcaggcccagatctccggcctccaggccaagtacaagtcggcgcgcatcatgtacgccgacttctactccgccgtctacgacatggtcaagaatccaggcagctacgggttcagcacggccgttccagacgtgctgcgggtccggaggcggcaagtacaactaccagaacatcgcgcggtgcggcatgccgggcgcctccgcgtgctccaacccggcggcgcacctcagctgggacggcatccacctcaccgaggccgcgtacaagcagatcaccgacggctggctcaacgggccctactgccacccggccattctccacagctaaagcgacagggggggccgattaattattaattattattatttgttgtttacgttgccgggaaagaaagaaagaaaagtgtctcagcaactgcatgcatgtgttcctggtccctcactgctgtgacttacagagtattatatatatattagtactatgtatactggtcctt

SEQ ID NO: 11735 - protein, 380 aa, Zea mays subsp. mays
  peptide (1)..(380): Ceres Seq. ID no. 12367527
MRSGRRMAAALVALAWALAAVAVAAAQKYNAIFNFGDSITDTGNLCTSGRPSQITFTQPPYGETYFGTPTCRCCDGRVIPDFLCSKFGLPFLPPSKSTTADFKEGANMAITGATAMDAPFFRSLGLSDKIWNNGPISFQLEWFQQVASAVCGGGQAQQADCKSYLANSLFVFGEFGGNDYNAMLFGNYSADQASTYTPQGRGRRRQRRREAGGHGRHRHRGARRPPHRLLPHLPHLLRHLQQRRLRQPRLPQEVQRPVHQPQQPAAGPDLRPPGQVQVGAHHVRRLLLRRLRHGQESRQLRVQHGRSRRAAGPEAASTTTRTSRGAACRAPPRAPTRRRTSAGTASTSPRPRTSRSPTAGSTGPTATRPFSTAKATGGAD

SEQ ID NO: 11736 - protein, 374 aa, Zea mays subsp. mays
  peptide (1)..(374): Ceres Seq. ID no. 12367528
MAAALVALAWALAAVAVAAAQKYNAIFNFGDSITDTGNLCTSGRPSQITFTQPPYGETYFGTPTCRCCDGRVIPDFLCSKFGLPFLPPSKSTTADFKEGANMAITGATAMDAPFFRSLGLSDKIWNNGPISFQLEWFQQVASAVCGGGQAQQADCKSYLANSLFVFGEFGGNDYNAMLFGNYSADQASTYTPQGRGRRRQRRREAGGHGRHRHRGARRPPHRLLPHLPHLLRHLQQRRLRQPRLPQEVQRPVHQPQQPAAGPDLRPPGQVQVGAHHVRRLLLRRLRHGQESRQLRVQHGRSRRAAGPEAASTTTRTSRGAACRAPPRAPTRRRTSAGTASTSPRPRTSRSPTAGSTGPTATRPFSTAKATGGAD

SEQ ID NO: 11737 - protein, 273 aa, Zea mays subsp. mays
  peptide (1)..(273): Ceres Seq. ID no. 12367529
MAITGATAMDAPFFRSLGLSDKIWNNGPISFQLEWFQQVASAVCGGGQAQQADCKSYLANSLFVFGEFGGNDYNAMLFGNYSADQASTYTPQGRGRRRQRRREAGGHGRHRHRGARRPPHRLLPHLPHLLRHLQQRRLRQPRLPQEVQRPVHQPQQPAAGPDLRPPGQVQVGAHHVRRLLLRRLRHGQESRQLRVQHGRSRRAAGPEAASTTTRTSRGAACRAPPRAPTRRRTSAGTASTSPRPRTSRSPTAGSTGPTATRPFSTAKATGGAD

SEQ ID NO: 11738 - DNA, 1061 bp, Zea mays subsp. mays
  misc_feature (1)..(1061): Ceres Seq. ID no. 12367225
  misc_feature (1)..(1061): Ortholog of  Ceres SEQ ID NO 12558659 as cited in SEQ ID NO 20727
  misc_feature (1)..(1061): Ortholog of  Ceres SEQ ID NO 14314534 as cited in SEQ ID NO 52434
  misc_feature (1)..(1061): Ortholog of  Ceres SEQ ID NO 14308640 as cited in SEQ ID NO 60489
  misc_feature (1)..(1061): Ortholog of  Ceres SEQ ID NO 15175034 as cited in SEQ ID NO 62432
  misc_feature (1)..(1061): Ortholog of  Ceres SEQ ID NO 14301475 as cited in SEQ ID NO 62936
  misc_feature (1)..(1061): Ortholog of  Ceres SEQ ID NO 13656436 as cited in SEQ ID NO 69154
acgaatcccgtcttcttcctttcttggccttctccacctcatcgccgagacgagatctctcccacacgaggaagggagagatgggcgggcgggtggatcacgagtactcctacctgttcaagatggtcctcatcggagacagcggcgtcggcaagtccaatatcctctctcgcttcacgcgcaaccacttctccctcgactccaagtccaccatcggcgtcgagttcgccaccaagtccctgcagatggacggcaaaacaataaaggctcagatctgggacacagctgggcaggaaaggtaccgtgcaattacaagtgcctactaccgtggagccgtgggagccctccttgtgtacgacatcacaaagaggcagagcttcgacaatgttcacaggtggcttcgtgaactccgcgaccatgctgactccagtattgtgatcatgatggtcggtaacaaatctgacctaatccacctgagagctatctctgaggatgaaggcaaagcgttggctgagaaggaggggttgttcttcctcgagacatcagctatggaggctataaacgtggagcaagccttccagactatcatgacggaggtctatggcattgtcaacaggaaagcgctggctgccaaagaagcagcagctgcaactgcttcgttgccctcccagggtaaaattatcagcattgacagcactgcaggaaacacaaagagggcatgctgctctacctaaaaatgttcaaacaccacattatacagaaccttggagacaattgttggtagaaaatggagcatagtgatcacaaatgatgtcgtggcaatatctactcttattctattctattctattcttttcttttctttattgtgtggacaaaatgggggtacatgcagtttagtttgttcagtgtgtgttagtcaaaagttagatattttcgttaggatccataccatttatcttctcaagttaaatgatactgcagtataactcagaatcatatagtcccaagttgctacagaattcaactgcgaatttgtgatttcatcatgcttacattct

SEQ ID NO: 11739 - protein, 243 aa, Zea mays subsp. mays
  peptide (1)..(243): Ceres Seq. ID no. 12367226
ESRLLPFLAFSTSSPRRDLSHTRKGEMGGRVDHEYSYLFKMVLIGDSGVGKSNILSRFTRNHFSLDSKSTIGVEFATKSLQMDGKTIKAQIWDTAGQERYRAITSAYYRGAVGALLVYDITKRQSFDNVHRWLRELRDHADSSIVIMMVGNKSDLIHLRAISEDEGKALAEKEGLFFLETSAMEAINVEQAFQTIMTEVYGIVNRKALAAKEAAAATASLPSQGKIISIDSTAGNTKRACCST

SEQ ID NO: 11740 - protein, 217 aa, Zea mays subsp. mays
  peptide (1)..(217): Ceres Seq. ID no. 12367227
MGGRVDHEYSYLFKMVLIGDSGVGKSNILSRFTRNHFSLDSKSTIGVEFATKSLQMDGKTIKAQIWDTAGQERYRAITSAYYRGAVGALLVYDITKRQSFDNVHRWLRELRDHADSSIVIMMVGNKSDLIHLRAISEDEGKALAEKEGLFFLETSAMEAINVEQAFQTIMTEVYGIVNRKALAAKEAAAATASLPSQGKIISIDSTAGNTKRACCST

SEQ ID NO: 11741 - protein, 203 aa, Zea mays subsp. mays
  peptide (1)..(203): Ceres Seq. ID no. 12367228
MVLIGDSGVGKSNILSRFTRNHFSLDSKSTIGVEFATKSLQMDGKTIKAQIWDTAGQERYRAITSAYYRGAVGALLVYDITKRQSFDNVHRWLRELRDHADSSIVIMMVGNKSDLIHLRAISEDEGKALAEKEGLFFLETSAMEAINVEQAFQTIMTEVYGIVNRKALAAKEAAAATASLPSQGKIISIDSTAGNTKRACCST

SEQ ID NO: 11742 - DNA, 904 bp, Zea mays subsp. mays
  misc_feature (1)..(904): Ceres Seq. ID no. 12376350
  misc_feature (1)..(904): Ortholog of  Ceres SEQ ID NO 13638769 as cited in SEQ ID NO 51773
  misc_feature (1)..(904): Ortholog of  Ceres SEQ ID NO 12583723 as cited in SEQ ID NO 58297
  misc_feature (1)..(904): Ortholog of  Ceres SEQ ID NO 15225568 as cited in SEQ ID NO 61512
  misc_feature (1)..(904): Ortholog of  Ceres SEQ ID NO 13664236 as cited in SEQ ID NO 66530
  misc_feature (1)..(904): Ortholog of  Ceres SEQ ID NO 13590249 as cited in SEQ ID NO 68385
  misc_feature (1)..(904): Ortholog of  Ceres SEQ ID NO 15179245 as cited in SEQ ID NO 0
atacgaattttcgatttccatccgcaattttctgtgccttactaatagcactcggtagtagtagtagtgatccgaaagttgacaccattccccttgtgctttcttgccagtaacccatccatcggggatcaccaggggagcaagatgtcgactgccgccgccccaagattgcccgctcccagatccggggcaagctatcactatcagacgaccgcggctccggtggccaacaccctctccttcgccggccacgcgaggcaggcggcccgcgcgtccgggccacggctgtccagcaggttcgtggcgtccgcggcggccgtgctgcacaaggtgaagctggtcggcccggacgggacggagcacgagttcgaggcccccgacgacacctacatcctcgaggcggccgagaccgccggggtggagctgcccttctcctgccgcgccgggtcctgctccacctgcgccgggaggatgtcggccggcgaggtcgaccagtcggaggggtccttcctcgacgacggccagatggccgaggggtacctcctcacctgcatctcctaccccaaggcagactgcgtcatccacacccacaaggaggaggacctgtactagagattgggttgctttatgcatcagtggttgttccaaaggtggtggtgactggtgcgttcgttgctattccgtgccaccagcggaaggggggtttcgttgttgagatgggctagttcttgtcatcaatttcggtcattcgatgagatcatgtcatatgagttgtggcaataatgctggcaatatggttttgcaattcaaactgcaaatgtgaccagcaatgtcaaaaactgcacactgtgtctgtgtgcgaacttgtgaaattgacattgagttcaattagctagttggctcg

SEQ ID NO: 11743 - protein, 155 aa, Zea mays subsp. mays
  peptide (1)..(155): Ceres Seq. ID no. 12376351
MSTAAAPRLPAPRSGASYHYQTTAAPVANTLSFAGHARQAARASGPRLSSRFVASAAAVLHKVKLVGPDGTEHEFEAPDDTYILEAAETAGVELPFSCRAGSCSTCAGRMSAGEVDQSEGSFLDDGQMAEGYLLTCISYPKADCVIHTHKEEDLY

SEQ ID NO: 11744 - DNA, 789 bp, Zea mays subsp. mays; identical to SEQ ID NO: 1699
  misc_feature (1)..(789): Ceres Seq. ID no. 12355957
  misc_feature (1)..(789): Ortholog of  Ceres SEQ ID NO 13587131 as cited in SEQ ID NO 331
  misc_feature (1)..(789): Ortholog of  Ceres SEQ ID NO 13661176 as cited in SEQ ID NO 61114

SEQ ID NO: 11745 - protein, 161 aa, Zea mays subsp. mays; identical to SEQ ID NO: 1700
  peptide (1)..(161): Ceres Seq. ID no. 12355958

SEQ ID NO: 11746 - protein, 106 aa, Zea mays subsp. mays; identical to SEQ ID NO: 1701
  peptide (1)..(106): Ceres Seq. ID no. 12355959

SEQ ID NO: 11747 - DNA, 991 bp, Zea mays subsp. mays
  misc_feature (1)..(991): Ceres Seq. ID no. 12351117
  misc_feature (1)..(991): Ortholog of  Ceres SEQ ID NO 12608620 as cited in SEQ ID NO 60192
  misc_feature (1)..(991): Ortholog of  Ceres SEQ ID NO 13654314 as cited in SEQ ID NO 67914
agctagcaaatgaaccagccacaataatcctgatcctcgatcttgcgttgtcgtcgtcaaagagacgactcgatcatcatctcatctcagagcacgcaagcaacaatggttactagcatccgcgtcatagttggaatcataggatctgtagtctgtgtgctcctctacgcggttccagtgctgacgtttaagagagtggtgaaggaggccagcgttggggagttctcgtgcgtgccatacatcctcgcccttttcagcgccttcacctggggctggtacggcttccccatcgtcagtgacgggtgggagaacctgtcgctcttcggcacgtgcgccgtcggagtgctcttcgaagcttcgttcgtcgtcatatacgtatggtttgcgccgagagacaaaaagaaatctgtcgtcctaatggtgtctctggttgtggcaacgctctgcgtcatcgtatccttgtcaagcttcgtgttccacacgcaccatacgcgcaagctatttgttggtagcattggtatagtcacctccatatccatgtacagcgctccgcttgtagccgtgaagcaagtcatcctgaccaagagcgtggagttcatgcctttctacctgtcgttgttctccttgctgaccagttttacatggatgctgtacggcatcctaggaagggatccctatcttacggcaccaaacggcgccgggtgtttaactggacttcttcagatcgctgtgtactgcatttacagcagaagcaatcggccgccgaaagcagtcaatggtgcgacaacaactagccgtgaagatgcaaatgattgcaaggtttgacttcgagagccttaagaaactgcctctctccgacgctagtaggaggttgatactaaagtggcgctattcgcgtgtgcagttattattattatctaattgtaaactgctccagtgttctttctttttgttatctaatcaatgggcatagcacctgcaaccagtaatt

SEQ ID NO: 11748 - protein, 239 aa, Zea mays subsp. mays
  peptide (1)..(239): Ceres Seq. ID no. 12351118
MVTSIRVIVGIIGSVVCVLLYAVPVLTFKRVVKEASVGEFSCVPYILALFSAFTWGWYGFPIVSDGWENLSLFGTCAVGVLFEASFVVIYVWFAPRDKKKSVVLMVSLVVATLCVIVSLSSFVFHTHHTRKLFVGSIGIVTSISMYSAPLVAVKQVILTKSVEFMPFYLSLFSLLTSFTWMLYGILGRDPYLTAPNGAGCLTGLLQIAVYCIYSRSNRPPKAVNGATTTSREDANDCKV

SEQ ID NO: 11749 - protein, 135 aa, Zea mays subsp. mays
  peptide (1)..(135): Ceres Seq. ID no. 12351119
MVSLVVATLCVIVSLSSFVFHTHHTRKLFVGSIGIVTSISMYSAPLVAVKQVILTKSVEFMPFYLSLFSLLTSFTWMLYGILGRDPYLTAPNGAGCLTGLLQIAVYCIYSRSNRPPKAVNGATTTSREDANDCKV

SEQ ID NO: 11750 - DNA, 1246 bp, Zea mays subsp. mays
  misc_feature (1)..(1246): Ceres Seq. ID no. 12366640
  misc_feature (1)..(1246): Ortholog of  Ceres SEQ ID NO 14314068 as cited in SEQ ID NO 52242
  misc_feature (1)..(1246): Ortholog of  Ceres SEQ ID NO 14314999 as cited in SEQ ID NO 52342
  misc_feature (1)..(1246): Ortholog of  Ceres SEQ ID NO 15177057 as cited in SEQ ID NO 55817
  misc_feature (1)..(1246): Ortholog of  Ceres SEQ ID NO 13585458 as cited in SEQ ID NO 60907
  misc_feature (1)..(1246): Ortholog of  Ceres SEQ ID NO 13598678 as cited in SEQ ID NO 61508
  misc_feature (1)..(1246): Ortholog of  Ceres SEQ ID NO 12625392 as cited in SEQ ID NO 63315
  misc_feature (1)..(1246): Ortholog of  Ceres SEQ ID NO 13598319 as cited in SEQ ID NO 68758
  misc_feature (1)..(1246): Ortholog of  Ceres SEQ ID NO 12589816 as cited in SEQ ID NO 0
gcacgagaccattacctagaacatcctaatcgaaaatcgacacacagatcgaacttctcctgtcgtctgcctaccagtagctagctctaatacatagcagccctcgctcgcaaggtactgcactacgatggccgccacctcctcctcctcctcctccacggtagttgcacttgcggcgcttctcttcttgctccttgtaacgtgtggctcgtgcgcgagaccggcgagctttaacgcctccgactttaccgccgaccccaactgggaggctgcccgggccacctggtacggtgcgcccaccggcgccggccctgatgacgacggtggtgcctgtggattcaagaacgtgaacctgccgccgttctcggcgatgacatcgtgcggcaacgagcccctcttcaaggacggcaagggctgcggctcctgctaccagatacgatgccaaaaccacccagcctgctccggcaatccggagacggtgatcatcaccgacatgaactactaccccgtggccaagtaccacttcgacctcagcggcacggcgttcggcgccatggccaagcccggccgcaccgacgagctccgccacgccggcatcatcgacatccagttcaagagggtgccctgcaactaccccgggcagaaggtgacgttccacatcgaggaggggtccaacccggtgtacctggcggtgctcgtcgagttcgaggacggcgacggcgacgtggtgcaggtggacctcatggaggccaactccgggtcgtggacgccgatgcgcgagtcgtgggggtccatctggcggctggactccggccaccgcctcgccgcgcccttctccctgcgcatcaccaacgagtccggcaagacgctggtggccaaccaggtcatcccggccaactgggttcccaacacctactaccgttccatcatccagtactagctctcggcggccgccgcgcaccacgatagctctgcgtccttgtgcttgattagtttggtagtgctattgtattgctgcatatgcagcatgggactgatgagcactgtgcgaggtgcctcagtcgattattactggtagatggtggtggcgtgcgcgcggccttcacggcggagttggagactgggaacgaaatggaggaaggccaagttaatttgcagatgctttcccgcccattgtccatgcatgtaatgtaccagggcgattgaaattataaattattaatggtgtgtttgttttgtggagtcg

SEQ ID NO: 11751 - protein, 270 aa, Zea mays subsp. mays
  peptide (1)..(270): Ceres Seq. ID no. 12366641
MAATSSSSSSTVVALAALLFLLLVTCGSCARPASFNASDFTADPNWEAARATWYGAPTGAGPDDDGGACGFKNVNLPPFSAMTSCGNEPLFKDGKGCGSCYQIRCQNHPACSGNPETVIITDMNYYPVAKYHFDLSGTAFGAMAKPGRTDELRHAGIIDIQFKRVPCNYPGQKVTFHIEEGSNPVYLAVLVEFEDGDGDVVQVDLMEANSGSWTPMRESWGSIWRLDSGHRLAAPFSLRITNESGKTLVANQVIPANWVPNTYYRSIIQY

SEQ ID NO: 11752 - protein, 189 aa, Zea mays subsp. mays
  peptide (1)..(189): Ceres Seq. ID no. 12366642
MTSCGNEPLFKDGKGCGSCYQIRCQNHPACSGNPETVIITDMNYYPVAKYHFDLSGTAFGAMAKPGRTDELRHAGIIDIQFKRVPCNYPGQKVTFHIEEGSNPVYLAVLVEFEDGDGDVVQVDLMEANSGSWTPMRESWGSIWRLDSGHRLAAPFSLRITNESGKTLVANQVIPANWVPNTYYRSIIQY

SEQ ID NO: 11753 - protein, 176 aa, Zea mays subsp. mays
  peptide (1)..(176): Ceres Seq. ID no. 12366643
MPKPPSLLRQSGDGDHHRHELLPRGQVPLRPQRHGVRRHGQARPHRRAPPRRHHRHPVQEGALQLPRAEGDVPHRGGVQPGVPGGARRVRGRRRRRGAGGPHGGQLRVVDADARVVGVHLAAGLRPPPRRALLPAHHQRVRQDAGGQPGHPGQLGSQHLLPFHHPVLALGGRRAPR

SEQ ID NO: 11754 - DNA, 1434 bp, Zea mays subsp. mays
  misc_feature (1)..(1434): Ceres Seq. ID no. 12345709
  misc_feature (1)..(1434): Ortholog of  Ceres SEQ ID NO 13598272 as cited in SEQ ID NO 69297
gatccccgttctcgctacgcccctgtctctccccgccgccaccctgccccggcgccgtagagcacggcgctggcccttgtttccctcccccggccggacctcggaagtatgtctcgggccatcgaatcgacaatgaggcaatctcggcagtttgtgaatctgatcatgaccaatctttacaacggcgccaagtccctgcacttcgtggacctgaagcggcagccactatttaagacaccactgccacctacggcatctacagacggagacagatttgaaacacaagacgctttctctcagacacagccaactgaatccttggtgttggagagacttcgccttccccgtccgagcttccaattcgaaacttccactgcacaagatcgcagctggtacattaactgcttaccgctttccgatcgcgtggtgttctgctcggatcagtgtggacacaactttgtggttgatggtatcgcacgttgtcttgtaaccatgcccagcctccacaaacgtaagatgatgcccctctccatcttcatccccagcactgatgtcgaaggcggtggcagcctcttccttgtggataggtcacccggcatcactgctacaagggtggaatttgagtccttagtgtaccgcaaggcaagcttcagcaacacctactcctggcaggctcaactcctcccaccagcaccgtaccccctttacacctcctactcctggcaggctcaactcctcccaccagcaccgtaccccctttacaccaagattagctcctatgctgtgatcggtggtggttcccacatctgcttatcagtcaagaatgaaggcacctattgcctggacacaaccagacacacatggagcaaagtcggcacgtggacactacccttcgacggcaaggttgagtatgtaccggagctgaagctctggtttggcgcctctgccgatcggcagaagttggctgccactgacctctcttatttgagcagcactgttgactcagccacgggtttccaaccagaggtcctgggctcttggatggagctgaccctgccagagggatgggagcagaaaggaagaactcagcttgtcaacctgggctcaggcaggttctgcgtcgcaaggttcttgaatgagatgtttgatccatacgggagtggatatgttttattgaccggtgtggagatcgttcctcattttgacaatctcactggtaatgacgttagtagtggcagtggagatggcagcaaagggaaacttaaactccaaataattcctcataaatcaagggtgtatatgcccaccaccgccttagcgttgattcaagatgtgttctgaataagtttggggctttgcactcaacaccctgttataatgattatgtattgtgttaattattttatccattgctgttgtggacttggttaatcc

SEQ ID NO: 11755 - protein, 410 aa, Zea mays subsp. mays
  peptide (1)..(410): Ceres Seq. ID no. 12345710
MSRAIESTMRQSRQFVNLIMTNLYNGAKSLHFVDLKRQPLFKTPLPPTASTDGDRFETQDAFSQTQPTESLVLERLRLPRPSFQFETSTAQDRSWYINCLPLSDRVVFCSDQCGHNFVVDGIARCLVTMPSLHKRKMMPLSIFIPSTDVEGGGSLFLVDRSPGITATRVEFESLVYRKASFSNTYSWQAQLLPPAPYPLYTSYSWQAQLLPPAPYPLYTKISSYAVIGGGSHICLSVKNEGTYCLDTTRHTWSKVGTWTLPFDGKVEYVPELKLWFGASADRQKLAATDLSYLSSTVDSATGFQPEVLGSWMELTLPEGWEQKGRTQLVNLGSGRFCVARFLNEMFDPYGSGYVLLTGVEIVPHFDNLTGNDVSSGSGDGSKGKLKLQIIPHKSRVYMPTTALALIQDVF

SEQ ID NO: 11756 - protein, 402 aa, Zea mays subsp. mays
  peptide (1)..(402): Ceres Seq. ID no. 12345711
MRQSRQFVNLIMTNLYNGAKSLHFVDLKRQPLFKTPLPPTASTDGDRFETQDAFSQTQPTESLVLERLRLPRPSFQFETSTAQDRSWYINCLPLSDRVVFCSDQCGHNFVVDGIARCLVTMPSLHKRKMMPLSIFIPSTDVEGGGSLFLVDRSPGITATRVEFESLVYRKASFSNTYSWQAQLLPPAPYPLYTSYSWQAQLLPPAPYPLYTKISSYAVIGGGSHICLSVKNEGTYCLDTTRHTWSKVGTWTLPFDGKVEYVPELKLWFGASADRQKLAATDLSYLSSTVDSATGFQPEVLGSWMELTLPEGWEQKGRTQLVNLGSGRFCVARFLNEMFDPYGSGYVLLTGVEIVPHFDNLTGNDVSSGSGDGSKGKLKLQIIPHKSRVYMPTTALALIQDVF

SEQ ID NO: 11757 - protein, 391 aa, Zea mays subsp. mays
  peptide (1)..(391): Ceres Seq. ID no. 12345712
MTNLYNGAKSLHFVDLKRQPLFKTPLPPTASTDGDRFETQDAFSQTQPTESLVLERLRLPRPSFQFETSTAQDRSWYINCLPLSDRVVFCSDQCGHNFVVDGIARCLVTMPSLHKRKMMPLSIFIPSTDVEGGGSLFLVDRSPGITATRVEFESLVYRKASFSNTYSWQAQLLPPAPYPLYTSYSWQAQLLPPAPYPLYTKISSYAVIGGGSHICLSVKNEGTYCLDTTRHTWSKVGTWTLPFDGKVEYVPELKLWFGASADRQKLAATDLSYLSSTVDSATGFQPEVLGSWMELTLPEGWEQKGRTQLVNLGSGRFCVARFLNEMFDPYGSGYVLLTGVEIVPHFDNLTGNDVSSGSGDGSKGKLKLQIIPHKSRVYMPTTALALIQDVF

SEQ ID NO: 11758 - DNA, 1283 bp, Zea mays subsp. mays
  misc_feature (1)..(1283): Ceres Seq. ID no. 12413628
  misc_feature (1)..(1283): Ortholog of  Ceres SEQ ID NO 15170760 as cited in SEQ ID NO 52747
  misc_feature (1)..(1283): Ortholog of  Ceres SEQ ID NO 15168549 as cited in SEQ ID NO 56976
  misc_feature (1)..(1283): Ortholog of  Ceres SEQ ID NO 14314335 as cited in SEQ ID NO 57305
  misc_feature (1)..(1283): Ortholog of  Ceres SEQ ID NO 15177588 as cited in SEQ ID NO 60367
aagcactcatccattccatcatcccctttgcaagtatagtctctctgctaagcgaagcgaagcttcaagctagtctcggcggctctagaagacgatgggcaaggacgacgtgatcgagagcggcgctggcggcggcgagttcgctgccaaggactacacggaccctcccccggcgccgctgatcgacgcggcggagctggggtcctggtcgctgtaccgcgccgtgatcgccgagttcatcgccacgctgctgttcctgtacatcacggtggccaccgtgatcgggtacaagcaccagacggacgcgtcggcgtcgggcgccgacgcggcgtgcggcggcgtgggcgtgctgggcatcgcctgggccttcggcggcatgatcttcgtcctcgtctactgcaccgccggcatctcggggggccacatcaaccccgccgtcaccttcggcctcttcctggcgcgcaaggtctccctggtgcgcgcgctgctctacatcgtggcgcagtgcctcggcgccatctgcggcgtcggcctcgtcaaggcgttccagagcgcctacttcgacaggtacggcggcggcgccaactcgctcgcctccggctactcccgcggcaccggcctcggcgccgagatcatcggcaccttcgtgctcgtctacaccgtcttctccgccaccgaccccaagcgcaacgcccgcgactcccacgtcccggttctggctcccctccccatcggcttcgccgtgttcatggtgcacctggccaccatccccgtcaccggcaccggcatcaacccggccaggagcctgggcgccgccgtcatctacaacaaggacaagccctgggacgaccactggatcttctgggtgggccctctcgtgggcgctgccatcgcggccttctaccaccagtacatcctccgggctggcgccatcaaggcccctcggctccttcaggagcaacgcgtgatgagcggggcttggctgtggagcaatggcgggcgacctacgggcggggggccgtgagcgaggagaatgccatcattcatcgatcgacttgggtgccggtggttggttcgggtcgcctttttttttgtttcagcagctgctgcgttgcgcgcgtgcgtgagatttggtttggtttcgttcccctgcaatgtaatcatgtcgtgactctcaagggattattccgctctgctcttatggtctctgttttctatttaatgattgttattaccatgtagcagtaaccatcgtcatcagtgagaaccttgttgcttctgtc

SEQ ID NO: 11759 - protein, 309 aa, Zea mays subsp. mays
  peptide (1)..(309): Ceres Seq. ID no. 12413629
MGKDDVIESGAGGGEFAAKDYTDPPPAPLIDAAELGSWSLYRAVIAEFIATLLFLYITVATVIGYKHQTDASASGADAACGGVGVLGIAWAFGGMIFVLVYCTAGISGGHINPAVTFGLFLARKVSLVRALLYIVAQCLGAICGVGLVKAFQSAYFDRYGGGANSLASGYSRGTGLGAEIIGTFVLVYTVFSATDPKRNARDSHVPVLAPLPIGFAVFMVHLATIPVTGTGINPARSLGAAVIYNKDKPWDDHWIFWVGPLVGAAIAAFYHQYILRAGAIKAPRLLQEQRVMSGAWLWSNGGRPTGGGP

SEQ ID NO: 11760 - protein, 215 aa, Zea mays subsp. mays
  peptide (1)..(215): Ceres Seq. ID no. 12413630
MIFVLVYCTAGISGGHINPAVTFGLFLARKVSLVRALLYIVAQCLGAICGVGLVKAFQSAYFDRYGGGANSLASGYSRGTGLGAEIIGTFVLVYTVFSATDPKRNARDSHVPVLAPLPIGFAVFMVHLATIPVTGTGINPARSLGAAVIYNKDKPWDDHWIFWVGPLVGAAIAAFYHQYILRAGAIKAPRLLQEQRVMSGAWLWSNGGRPTGGGP

SEQ ID NO: 11761 - DNA, 1299 bp, Zea mays subsp. mays
  misc_feature (1)..(1299): Ceres Seq. ID no. 12341243
  misc_feature (1)..(1299): Ortholog of  Ceres SEQ ID NO 14313599 as cited in SEQ ID NO 54989
  misc_feature (1)..(1299): Ortholog of  Ceres SEQ ID NO 15176204 as cited in SEQ ID NO 55608
  misc_feature (1)..(1299): Ortholog of  Ceres SEQ ID NO 15225111 as cited in SEQ ID NO 58444
  misc_feature (1)..(1299): Ortholog of  Ceres SEQ ID NO 14313064 as cited in SEQ ID NO 59543
  misc_feature (1)..(1299): Ortholog of  Ceres SEQ ID NO 13661001 as cited in SEQ ID NO 67531
  misc_feature (1)..(1299): Ortholog of  Ceres SEQ ID NO 15178920 as cited in SEQ ID NO 0
aatacaagccgggaaccagaccccaccagcagcactccatatactgcatgcatagagatagatagatatatatagagcttaattactatagtcgtcgtcgtcgatcgtaactgcaatagctttagtttttgcagtcatcagataaatatagggtccataaatatatccatcagctagctgtaactgcaactgcagtcgcaatagctatagttttcagttgattagctagctactaactacaacaagctaggcaaatcgatcaaactaaggctcggcagcggcagcggcatggacgcgatcagcagcctgttgctgcagcagggatggaggaagggcccctggacggcgctggaggacaggctgctcaccgagtacgtgcagcagcacggcgagggctgctggaactccgtcgccaagctcacagggctgcggcggagcgggaagagctgccggctgcggtgggtgaactacctccggccggacctcaagcggggcaagatcacccccgacgaggagaccgtcatcctccacctgcacgccatgctcggcaacaggtggtcggcgatcgcgcggtgcctgccggggaggacggacaacgagatcaagaactactggcggacgcacttcaagaaggcccggccgtcgcggcgcgcccgggcgcagctgctgcaccagtaccagctgcagcagcaggagcagcgccgccagtacctgcagctcctgcagccgcagcagctgcagcagcagcagctgggggtggtgaaacaacagcagctggagcagcagagcccgccggagcctcatcaccaggccatgatggacagcctgcaaagcacggcggcgtgctactgcagcccggtgccggaggaatgctgcccgctcccggccgacgacgacgcggtgctgtgggatagcctgtggaggctggtggacggggatggatgcggcgacggcgacggcgatggctccagcggaggcgactactagccggctagcacgtacgtgtgcgtgtgtatgccaggctgccagccagccagtgtaaagaaataaagcggaagaggaggttctcttcaggtttcagctgctgcaagccaaggatcctgctagtggtagtagagacatgctaattttcctacgagaatagacgatcatgcttcatgcttttttcccctttatccatgaaccatgagcaagtgacattgtgtatcgaagggccctctgtttatgttattatggcctgattacaaggttggaataccttcatgttccttttggtttcaagaatcaagatcatgtttt

SEQ ID NO: 11762 - protein, 232 aa, Zea mays subsp. mays
  peptide (1)..(232): Ceres Seq. ID no. 12341244
MDAISSLLLQQGWRKGPWTALEDRLLTEYVQQHGEGCWNSVAKLTGLRRSGKSCRLRWVNYLRPDLKRGKITPDEETVILHLHAMLGNRWSAIARCLPGRTDNEIKNYWRTHFKKARPSRRARAQLLHQYQLQQQEQRRQYLQLLQPQQLQQQQLGVVKQQQLEQQSPPEPHHQAMMDSLQSTAACYCSPVPEECCPLPADDDAVLWDSLWRLVDGDGCGDGDGDGSSGGDY

SEQ ID NO: 11763 - protein, 196 aa, Zea mays subsp. mays
  peptide (1)..(196): Ceres Seq. ID no. 12341245
MEEGPLDGAGGQAAHRVRAAARRGLLELRRQAHRAAAEREELPAAVGELPPAGPQAGQDHPRRGDRHPPPARHARQQVVGDRAVPAGEDGQRDQELLADALQEGPAVAARPGAAAAPVPAAAAGAAPPVPAAPAAAAAAAAAAGGGETTAAGAAEPAGASSPGHDGQPAKHGGVLLQPGAGGMLPAPGRRRRGAVG

SEQ ID NO: 11764 - protein, 148 aa, Zea mays subsp. mays
  peptide (1)..(148): Ceres Seq. ID no. 12341246
MLGNRWSAIARCLPGRTDNEIKNYWRTHFKKARPSRRARAQLLHQYQLQQQEQRRQYLQLLQPQQLQQQQLGVVKQQQLEQQSPPEPHHQAMMDSLQSTAACYCSPVPEECCPLPADDDAVLWDSLWRLVDGDGCGDGDGDGSSGGDY

SEQ ID NO: 11765 - DNA, 860 bp, Zea mays subsp. mays
  misc_feature (1)..(860): Ceres Seq. ID no. 12404667
  misc_feature (1)..(860): Ortholog of  Ceres SEQ ID NO 14306110 as cited in SEQ ID NO 1363
  misc_feature (1)..(860): Ortholog of  Ceres SEQ ID NO 12609333 as cited in SEQ ID NO 51833
attacccaccataccaaccccgcgttgcggttatatagggccgtatttcccccgcgtctccgcgtcagtggaagcgatcgacaccattcaagctaaagctgctttcttgggaaacgcttcatcgccacagctcgatcgatggcttcttcctggggttctcggttgccgctcgcagtagtgctgctgctcgtggcactgctcctcctccacggcagccgccacaagctacaccgtcggcgacgggtccggctggacaaccggcgtcgactacacatcttgggccgcctccaaaaacttcaaagtcggggacaatctcgtgttcaactacgcgaaagggctgcacacggtggtggaggtgagcgcggccgagtacatggcgtgcacggccgccaactcgctgggctccgacagcagcggcgcgaccaccgtggccctcaggacgccaggcacccactacttcgtgtgcagcatcacggggcactgcggcgccgggatgaagctggcggtgaccctcggcggctccaactcccctgctgccacgccgcggacgtcgtccccgacccctaccacgccgtacacgacgccggccaccaccacgccgtacacgacgccgacgtgctctggcggcggcggcaccacggcgaccccgggcatgactccgttcacgtcataccccagcgcggccggccttgggtcggcggcgttggctggatttagtctggtttggtgtgtgagtgtccggctagcgctgctctaggcaaagggcggccatggaccgtggtcgaccagggtatgtaacagtgtaacgtatgtgtttgttctttgttccggatcgagctagctggggtatagtatacttg

SEQ ID NO: 11766 - protein, 192 aa, Zea mays subsp. mays
  peptide (1)..(192): Ceres Seq. ID no. 12404668
MASSWGSRLPLAVVLLLVALLLLHGSRHKLHRRRRVRLDNRRRLHILGRLQKLQSRGQSRVQLRERAAHGGGGERGRVHGVHGRQLAGLRQQRRDHRGPQDARHPLLRVQHHGALRRRDEAGGDPRRLQLPCCHAADVVPDPYHAVHDAGHHHAVHDADVLWRRRHHGDPGHDSVHVIPQRGRPWVGGVGWI

SEQ ID NO: 11767 - protein, 127 aa, Zea mays subsp. mays
  peptide (1)..(127): Ceres Seq. ID no. 12404669
MACTAANSLGSDSSGATTVALRTPGTHYFVCSITGHCGAGMKLAVTLGGSNSPAATPRTSSPTPTTPYTTPATTTPYTTPTCSGGGGTTATPGMTPFTSYPSAAGLGSAALAGFSLVWCVSVRLALL

SEQ ID NO: 11768 - DNA, 1107 bp, Zea mays subsp. mays
  misc_feature (1)..(1107): Ceres Seq. ID no. 12376269
  misc_feature (1)..(1107): Ortholog of  Ceres SEQ ID NO 13661969 as cited in SEQ ID NO 61215
  misc_feature (1)..(1107): Ortholog of  Ceres SEQ ID NO 12614809 as cited in SEQ ID NO 68808
  misc_feature (1)..(1107): Ortholog of  Ceres SEQ ID NO 12634366 as cited in SEQ ID NO 0
  misc_feature (1)..(1107): Ortholog of  Ceres SEQ ID NO 14309113 as cited in SEQ ID NO 0
  misc_feature (1)..(1107): Ortholog of  Ceres SEQ ID NO 15175257 as cited in SEQ ID NO 0
gacgacggcgacgcttcagttgagtgcgggtgtagtgctcctgcgacttcggcctgtccactttttagggggcgccgaggggcgtgggggtacggccgtccgcacaataatctgcgctgcgcggaagaagggaaggggaaaagcagttaagcttgagcgcgcgcgacagggtcaagtcgagggccggggaatcgccggagaatggaggtgggcagggctccgcgacgacgggtgtccccagcagcggcggcggcggctgtgccttcgctgcttctgttcgccgttctattcgcgggccgggcggcggcgttcggccacctgcaagccgccggcgccggcgcgacggcgctgtacaagcacgcgtcgttcttcgaccgcgacggcgacggcgtcgtctccttctcggagacgtacggcgcgtttcgggcactcgggtttggattcggcctgtccagcgtcagcgctgcgctcatcaacggcgctcttggtagcaagtgcagacctcaaaatgcaacgtcatcgaagttggatatctacatagaggacatccagaaagggaaacatggaagcgattcagggtcatacgacgccgaaggaaggtttgttcctgacaagttcgaagagatattcgccaagcacgccaagactgtcccagacgccctgacgtcggacgagatcgaccagctgctccaggcgaacagagagcccggggactacagcggatgggctggcgcagaagcggagtggaagaccctctacagcctcggcaaggacaaggacggcctcctccgcaaggacgtcgcgagaagcgtctacgacgggacactgttccacatgctcgcgcccaactggaaatctcccgacgaggaggaggaacaggaactaagcgtgatccgggagagctgaaccgagaggtacaagcaaagtctggttgagagataaggactctgggaccctctgaacatgctgtcaagcaacatgtactactagctaagtttttacaatatatattcttattgtgtaattaaactttaaatgggttaatttcacaattaaaatcattgaaagggaaatagttttaaaactatttcttatattttggtgctc

SEQ ID NO: 11769 - protein, 234 aa, Zea mays subsp. mays
  peptide (1)..(234): Ceres Seq. ID no. 12376270
MEVGRAPRRRVSPAAAAAAVPSLLLFAVLFAGRAAAFGHLQAAGAGATALYKHASFFDRDGDGVVSFSETYGAFRALGFGFGLSSVSAALINGALGSKCRPQNATSSKLDIYIEDIQKGKHGSDSGSYDAEGRFVPDKFEEIFAKHAKTVPDALTSDEIDQLLQANREPGDYSGWAGAEAEWKTLYSLGKDKDGLLRKDVARSVYDGTLFHMLAPNWKSPDEEEEQELSVIRES

SEQ ID NO: 11770 - protein, 179 aa, Zea mays subsp. mays
  peptide (1)..(179): Ceres Seq. ID no. 12376271
TTATLQLSAGVVLLRLRPVHFLGGAEGRGGTAVRTIICAARKKGRGKAVKLERARQGQVEGRGIAGEWRWAGLRDDGCPQQRRRRLCLRCFCSPFYSRAGRRRSATCKPPAPARRRCTSTRRSSTATATASSPSRRRTARFGHSGLDSACPASALRSSTALLVASADLKMQRHRSWIST

SEQ ID NO: 11771 - DNA, 1048 bp, Zea mays subsp. mays
  misc_feature (1)..(1048): Ceres Seq. ID no. 13492045
  misc_feature (1)..(1048): Ortholog of  Ceres SEQ ID NO 12609335 as cited in SEQ ID NO 51835
  misc_feature (1)..(1048): Ortholog of  Ceres SEQ ID NO 12626248 as cited in SEQ ID NO 65768
aaccgcaaggatccaccacaacagcgaaggagaaagcagaccaacctagccacccagggagaaaggccaaaagggaggggagagtgtcgtcatggcttccattgtcgcttccaggagggccgttcctctagttcgctctctggagaagctcatcgcagcgtcctccgcgcccgggactggctccgccctcaggccggtggcagtcgccggcggcctccgtggctacaacaccggcgctccgctccgacgctacgagggggccgagtcggaagacgatagcgtccgcgagtacgatgggcggcacggcggccgggactacgccgtgcccagcctgttctcagatattttccgtgatccgcttagtgcgccgcacagcattggccgcctgctgaacctgatggacgacttggcggtggcggcgccaggtcgtgcggtgcgccgtggctggaacgcgaaggaggacgaggaggcgctgcacctgagggtggacatgccgggcctggggaaggagcacgtcaaggtgtgggcggagcagaacagcctggtgatcaagggcgagggcgagaaggaggatagcgaggacgaggccgccccgcctccgagatacagcggtcgcatcgagctcgcgccagaggtttacaggatggacaagatcaaggcggagatgaagaacggcgtgctcaaggtggtcgtgccgaaggtgaaggagcagcagcgcaaggacgtgttccaagtcaacgtcgagtagatgtttccaaatagaagcaagtgccggtacgggatggaggattggagcctggaggggcactgccaaactaggattcctctctctcaatctgatctggattctggaatcagatttctcttctttcatttttctcgtctatcttctatcagtatgaaataagcaacgtcgcttcagttttcgtgtcaaggccggtggagtcgcctatgtttattttattttctttgtatttcctacctggacacacgttctctatgccgtgtttggtttccgcagatttttaaaatatgcatgttcaaaccc

SEQ ID NO: 11772 - protein, 218 aa, Zea mays subsp. mays
  peptide (1)..(218): Ceres Seq. ID no. 13492046
MASIVASRRAVPLVRSLEKLIAASSAPGTGSALRPVAVAGGLRGYNTGAPLRRYEGAESEDDSVREYDGRHGGRDYAVPSLFSDIFRDPLSAPHSIGRLLNLMDDLAVAAPGRAVRRGWNAKEDEEALHLRVDMPGLGKEHVKVWAEQNSLVIKGEGEKEDSEDEAAPPPRYSGRIELAPEVYRMDKIKAEMKNGVLKVVVPKVKEQQRKDVFQVNVE

SEQ ID NO: 11773 - protein, 116 aa, Zea mays subsp. mays
  peptide (1)..(116): Ceres Seq. ID no. 13492047
MDDLAVAAPGRAVRRGWNAKEDEEALHLRVDMPGLGKEHVKVWAEQNSLVIKGEGEKEDSEDEAAPPPRYSGRIELAPEVYRMDKIKAEMKNGVLKVVVPKVKEQQRKDVFQVNVE

SEQ ID NO: 11774 - DNA, 876 bp, Zea mays subsp. mays
  misc_feature (1)..(876): Ceres Seq. ID no. 12403778
  misc_feature (1)..(876): Ortholog of  Ceres SEQ ID NO 13595022 as cited in SEQ ID NO 51963
  misc_feature (1)..(876): Ortholog of  Ceres SEQ ID NO 15178123 as cited in SEQ ID NO 52030
  misc_feature (1)..(876): Ortholog of  Ceres SEQ ID NO 14302532 as cited in SEQ ID NO 56531
  misc_feature (1)..(876): Ortholog of  Ceres SEQ ID NO 13598382 as cited in SEQ ID NO 62325
  misc_feature (1)..(876): Ortholog of  Ceres SEQ ID NO 15173967 as cited in SEQ ID NO 63578
  misc_feature (1)..(876): Ortholog of  Ceres SEQ ID NO 13591023 as cited in SEQ ID NO 67961
  misc_feature (1)..(876): Ortholog of  Ceres SEQ ID NO 12637935 as cited in SEQ ID NO 0
gcaccagcaccagcacggcgaccaaccctctcccaacccgactagtcggactcgcagctccgccccaagtccaggtccaagcatggaagtcgcggcggcgtcggcgaggcccgtcctgcgcgtggctgccatctgcggctccctccgcaaggcctccttcaaccgcggcctcctccgcgccgccgcggaggtgtgcgaggactccatcccggggctccgcatcgacgagctcgacatctccgacctgcccatcatcaacaccgaccttgagaccggcagcggcagcggcaccgtcttcccgcccgccgtcgaggccttccgcgccaaggtctgccaggccgactgcttcctcttcggcgcgcccgagtacaactactccatcgccacccccctgaagaacgtgcttgactgggcctctagaggaaagaactgttgggcagacaaacctgctgcgatcgtgagtgcaggcggcggctttggaggagggaggtcgcagtaccatctccgtcaggtcggggttttcctggatctccatttcatcaacaagccagaactgtgcgtccaagccttccagcagccacccaagtttgacagcgatggaaatctggtcgatgctgaaatcagagagcggctcaagaaagtgctcctatcccttcaggccttcacgctcaggcttcagaaggaggactgaatcaactcggtaccattgtagtacgtgcttccctgagaagcgtttattgctcttggaagtttgtaacgcgttgctgggtggcctggaagtttgtaataaatccaagaagtgttctcgctgaatatttaagatttgatcgcatctatatataataaagattgtgttctagcgtttttgcgtttccc

SEQ ID NO: 11775 - protein, 229 aa, Zea mays subsp. mays
  peptide (1)..(229): Ceres Seq. ID no. 12403779
HQHQHGDQPSPNPTSRTRSSAPSPGPSMEVAAASARPVLRVAAICGSLRKASFNRGLLRAAAEVCEDSIPGLRIDELDISDLPIINTDLETGSGSGTVFPPAVEAFRAKVCQADCFLFGAPEYNYSIATPLKNVLDWASRGKNCWADKPAAIVSAGGGFGGGRSQYHLRQVGVFLDLHFINKPELCVQAFQQPPKFDSDGNLVDAEIRERLKKVLLSLQAFTLRLQKED

SEQ ID NO: 11776 - protein, 202 aa, Zea mays subsp. mays
  peptide (1)..(202): Ceres Seq. ID no. 12403780
MEVAAASARPVLRVAAICGSLRKASFNRGLLRAAAEVCEDSIPGLRIDELDISDLPIINTDLETGSGSGTVFPPAVEAFRAKVCQADCFLFGAPEYNYSIATPLKNVLDWASRGKNCWADKPAAIVSAGGGFGGGRSQYHLRQVGVFLDLHFINKPELCVQAFQQPPKFDSDGNLVDAEIRERLKKVLLSLQAFTLRLQKED

SEQ ID NO: 11777 - protein, 130 aa, Zea mays subsp. mays
  peptide (1)..(130): Ceres Seq. ID no. 12403781
TSTSTATNPLPTRLVGLAAPPQVQVQAWKSRRRRRGPSCAWLPSAAPSARPPSTAASSAPPRRCARTPSRGSASTSSTSPTCPSSTPTLRPAAAAAPSSRPPSRPSAPRSARPTASSSARPSTTTPSPPP

SEQ ID NO: 11778 - DNA, 745 bp, Zea mays subsp. mays
  misc_feature (1)..(745): Ceres Seq. ID no. 12382779
  misc_feature (1)..(745): Ortholog of  Ceres SEQ ID NO 13638595 as cited in SEQ ID NO 52050
  misc_feature (1)..(745): Ortholog of  Ceres SEQ ID NO 13594254 as cited in SEQ ID NO 57534
aaaaattccaagagatgaacatcttgttgagtcacttgtgttgctgcattcttattctaggcatctacgctccgacatccgccacatcagacaatcctcctctgcaggatgtatgccccatggctccccagggcgagcggcgagagttgtccatgaacgggttcctctgcaagcatccgagcaccatcctggcgtccgacttcaagactctgatgctaaaccacgccggagacctggacagcatagcctcggtcgtcggtgagcatggtgaccgctgccgagttcccaggcctgaacaccctgggcctgtcgatggcgcgcaccgacatcgccccctacggggtggtgctcccgcactcccacccgcgggcgtcggagatgatgttcgtacacggtggcagcgtggtggccggcttcctggacaccgagggcaggctgttccagaagcgtctcggtgagggagaggtgttcgtcttcccccgcggcttgcttcactacgtcatgaactacggtttcggcctcgcgacggcgttctccgtgctgaacagccagaaccccggcgtggtcggtgtcgcccacgccatgttttttgcgagtgagtcggacgtagtcgaaggtctaatggccaggatgctcaagtttggagagatggaggtgactagtgacaacaacatcactgctggtttcccatgggcattctgatctgagtaggtgcaattcaagatcgttggtggtttaagttccc

SEQ ID NO: 11779 - protein, 151 aa, Zea mays subsp. mays
  peptide (1)..(151): Ceres Seq. ID no. 12382780
KFQEMNILLSHLCCCILILGIYAPTSATSDNPPLQDVCPMAPQGERRELSMNGFLCKHPSTILASDFKTLMLNHAGDLDSIASVVGEHGDRCRVPRPEHPGPVDGAHRHRPLRGGAPALPPAGVGDDVRTRWQRGGRLPGHRGQAVPEASR

SEQ ID NO: 11780 - protein, 147 aa, Zea mays subsp. mays
  peptide (1)..(147): Ceres Seq. ID no. 12382781
MNILLSHLCCCILILGIYAPTSATSDNPPLQDVCPMAPQGERRELSMNGFLCKHPSTILASDFKTLMLNHAGDLDSIASVVGEHGDRCRVPRPEHPGPVDGAHRHRPLRGGAPALPPAGVGDDVRTRWQRGGRLPGHRGQAVPEASR

SEQ ID NO: 11781 - protein, 145 aa, Zea mays subsp. mays
  peptide (1)..(145): Ceres Seq. ID no. 12382782
MVTAAEFPGLNTLGLSMARTDIAPYGVVLPHSHPRASEMMFVHGGSVVAGFLDTEGRLFQKRLGEGEVFVFPRGLLHYVMNYGFGLATAFSVLNSQNPGVVGVAHAMFFASESDVVEGLMARMLKFGEMEVTSDNNITAGFPWAF

SEQ ID NO: 11782 - DNA, 830 bp, Zea mays subsp. mays
  misc_feature (1)..(830): Ceres Seq. ID no. 12355697
  misc_feature (1)..(830): Ortholog of  Ceres SEQ ID NO 13587576 as cited in SEQ ID NO 0
gcacacgacgcaggcactcggcctgccgtctgtccctttcgaccttcataggcgcacttctccctcccgctctcgcgccgccgccctcgtgcgtttgagcgagatccatacatccccatcccattttgcacccggattggcttcttcttctactactgtacagcacttcttttgtgtggctgcaaagttctgtaattctagaggagcaagatggagattattatcatcatctcacttgtcattcttttggcactaggagctctctttgtgatcccaaagtcacaaaataaaggtaaatcaaagagaaacgacttaggagctggaacgacatctaggagctttacgacagaagagatctctaaacattccacaagggaggactgttggatcattatcaaggacaaggtctatgatgtcactccttatgtagaggaacatccaggcggagatgccattctaaataatgctgggggtgattccacggagggcttttttgggccacagcatggcactagggtcttcgatatcatcgaggatttctgcatcggtcagttgaaggcttcatgatgatgacaggatagtttgtattgaatttgttacgggacataaatttgtgagaagctacattttatctatgtttgagcattgcgaccatgagcatatgaatgccagtataattgttccacaactgttattaggcctgccctgagctgtgatgtaggagctcgtttttttttctctgctgggggcaatgtgagcatcagttcgaccactggttgttgtgcttgcacatttctgttgttggacaagactgaaacgtttttttcccg

SEQ ID NO: 11783 - protein, 118 aa, Zea mays subsp. mays
  peptide (1)..(118): Ceres Seq. ID no. 12355698
MEIIIIISLVILLALGALFVIPKSQNKGKSKRNDLGAGTTSRSFTTEEISKHSTREDCWIIIKDKVYDVTPYVEEHPGGDAILNNAGGDSTEGFFGPQHGTRVFDIIEDFCIGQLKAS

SEQ ID NO: 11784 - protein, 84 aa, Zea mays subsp. mays
  peptide (1)..(84): Ceres Seq. ID no. 12355699
HTTQALGLPSVPFDLHRRTSPSRSRAAALVRLSEIHTSPSHFAPGLASSSTTVQHFFCVAAKFCNSRGARWRLLSSSHLSFFWH

SEQ ID NO: 11785 - DNA, 1095 bp, Zea mays subsp. mays
  misc_feature (1)..(1095): Ceres Seq. ID no. 12403775
  misc_feature (1)..(1095): Ortholog of  Ceres SEQ ID NO 13596601 as cited in SEQ ID NO 62486
aacaaattgaccgccattgtgcaaaccagaaccccttcgccattttcaccaactccctccgatcccggccatggcgggggaggactgccgctccggcgcggaaatggacgcgctcgtacgacgcttgaagctccaccggccgtccccatccccctacgaccccgatccggccgcggcccccgtccccgccaccgccggcgacggcgagctgttccggccgcggagagctgccgtgcttgtctgcctcttccggggagacggcggcgagctccgcgtcatcctcactaagcgctcgtcctccctctccacccactccggtgaagtttcattgccaggaggaaaagtcgaggagggtgatgctgatgatgtagcaacagcgttaagagagtcaaaagaggagattggacttgatccagctctggtaactgtggttgcctctcttgaacacttcttgtccaagcatcttctggtagttgttcctgttgttggcatactgttagacagacaagcatttaaacctgctcttaatattgctgaggtagacgaaatatttgatgtacccctggagatgttcctcaaggatgagaacaggacatcggaggagcgagaaaagatgggccagacattcacagttcattacttcacttatgagaacggaatccagaagtacttaatctggggtctgaccgcccgcatcttgatccatgctgcttcagttgtatacgagcgaccgccagactttacagagcgaagagcacattttaaattgccaatgttcacaaaggactgctcttcaatgctagcaggacctgctaaacattagtgcacactgcctacgctgctatctcagctacatgctatttggagtacgggatgttgcaccaacatagtttatagaatcgaagaggcgtccaaatcacttgatgtcatatgaatttagattctttcgacaaaacactatagtggcatttatgttcagaacaatgttcgtatatgatgcaccacaaatcatccatgttgatgctgttaatgacatggagcacttgctcggatgcaattggctcgtatatacacataagattgttctactgaatc

SEQ ID NO: 11786 - protein, 250 aa, Zea mays subsp. mays
  peptide (1)..(250): Ceres Seq. ID no. 12403776
MAGEDCRSGAEMDALVRRLKLHRPSPSPYDPDPAAAPVPATAGDGELFRPRRAAVLVCLFRGDGGELRVILTKRSSSLSTHSGEVSLPGGKVEEGDADDVATALRESKEEIGLDPALVTVVASLEHFLSKHLLVVVPVVGILLDRQAFKPALNIAEVDEIFDVPLEMFLKDENRTSEEREKMGQTFTVHYFTYENGIQKYLIWGLTARILIHAASVVYERPPDFTERRAHFKLPMFTKDCSSMLAGPAKH

SEQ ID NO: 11787 - protein, 239 aa, Zea mays subsp. mays
  peptide (1)..(239): Ceres Seq. ID no. 12403777
MDALVRRLKLHRPSPSPYDPDPAAAPVPATAGDGELFRPRRAAVLVCLFRGDGGELRVILTKRSSSLSTHSGEVSLPGGKVEEGDADDVATALRESKEEIGLDPALVTVVASLEHFLSKHLLVVVPVVGILLDRQAFKPALNIAEVDEIFDVPLEMFLKDENRTSEEREKMGQTFTVHYFTYENGIQKYLIWGLTARILIHAASVVYERPPDFTERRAHFKLPMFTKDCSSMLAGPAKH

SEQ ID NO: 11788 - DNA, 1688 bp, Zea mays subsp. mays
  misc_feature (1)..(1688): Ceres Seq. ID no. 12347726
  misc_feature (1)..(1688): Ortholog of  Ceres SEQ ID NO 14314559 as cited in SEQ ID NO 52317
  misc_feature (1)..(1688): Ortholog of  Ceres SEQ ID NO 15174571 as cited in SEQ ID NO 53570
  misc_feature (1)..(1688): Ortholog of  Ceres SEQ ID NO 14314367 as cited in SEQ ID NO 57446
cgtgccacacatccatccccgttcgcctcttctcctccctcctgccgggtccttaataaagagcagcagcgcaagaggttggtagagcgagcgagaagaaggcaatggcggcggagagcttcctgttcacctcggagtccgtgaacgaggggcacccagacaagctgtgcgaccaggtgtcggacgcggtgctggacgcctgcctggcgcaggaccccgacagcaaggtggcctgcgagacctgcaccaagacgaacatggtgatggtgttcggcgagatcaccaccaaggcgagcgtggactacgagaagatcgtgcgcgacacctgccgcgagatcgggttcacctccgacgacgtggggctcgacgccgaccgctgcaaggtgctggtgaacatcgagcagcagtcccccgacatcgcgcagggcgtgcacgggcacttcacgaagcggcccgaggagatcggcgccggcgaccagggccacatgttcgggtacgccaccgacgagacccccgagctgatgccgctgagccacgtgctggccaccaagctcggcgcgcgcctgacggaggtccgcaaggacggcacctgcgcctggctcaggcccgacagcaagacccaggtgacggtggagtacgtgaacgagggcggcgccatggtgcccgtccgcgtgcacaccgtgctcatctccacccagcacgacgagaccgtcaccaacgacgagatcgccgccgacctcaaggagcacgtcatcaagcccgtcatcccggagaggtacctggacgagaagaccatcttccacctcaacccgtcggggcgcttcgtcatcggcgggccccacggggacgccggcctcaccggccgcaagatcatcatcgacacctacggcggctggggagcccacggcgggggcgccttctccggcaaggaccccaccaaggtggaccgcagcggggcctacgtcgccaggcaggccgccaagagcatcgtggccagcggcctcgcccgccgctgcctcgtgcaggtgtcctacgccatcggcgtgccggagcccctgtccgtgttcgtcgactcctacggcaccgggaccatccccgacaaggagatcctaaagatcgtcaaggagaacttcgacttcaggccagggatggtcaccatcaacctcgacctcaagaagggcggcaacaggttcatcaagaccgccgcatacggccactttggccgtgacgacgccgacttcacctgggaggtggtcaagcccctaaagaaggcatccgcttaagaatgtattgggaagttcactggacatgaggttcatcttcgtctggctctgctgatacctgcaaggattgctgctgctgctgccgcccctggatgtgtgtttgatcagtgactggctgctctgctccatagaagatgaatgaagagagagatggtgaagaaggctttggcaaatggcaattgccgcagcaagccatgtcggcgccaccgaccgccttagtgattggtataatttggtgtggcagcagccaggattaatgcgctggtcttttatctttactactagtttggtctcgtccggtatcttatttttctttccccttttcgagtctgtactgaaactgctgagagatttgcagttttgatctatcataccctttggtaatactgttcatctcgagtgcgc

SEQ ID NO: 11789 - protein, 392 aa, Zea mays subsp. mays
  peptide (1)..(392): Ceres Seq. ID no. 12347727
MAAESFLFTSESVNEGHPDKLCDQVSDAVLDACLAQDPDSKVACETCTKTNMVMVFGEITTKASVDYEKIVRDTCREIGFTSDDVGLDADRCKVLVNIEQQSPDIAQGVHGHFTKRPEEIGAGDQGHMFGYATDETPELMPLSHVLATKLGARLTEVRKDGTCAWLRPDSKTQVTVEYVNEGGAMVPVRVHTVLISTQHDETVTNDEIAADLKEHVIKPVIPERYLDEKTIFHLNPSGRFVIGGPHGDAGLTGRKIIIDTYGGWGAHGGGAFSGKDPTKVDRSGAYVARQAAKSIVASGLARRCLVQVSYAIGVPEPLSVFVDSYGTGTIPDKEILKIVKENFDFRPGMVTINLDLKKGGNRFIKTAAYGHFGRDDADFTWEVVKPLKKASA

SEQ ID NO: 11790 - protein, 341 aa, Zea mays subsp. mays
  peptide (1)..(341): Ceres Seq. ID no. 12347728
MVMVFGEITTKASVDYEKIVRDTCREIGFTSDDVGLDADRCKVLVNIEQQSPDIAQGVHGHFTKRPEEIGAGDQGHMFGYATDETPELMPLSHVLATKLGARLTEVRKDGTCAWLRPDSKTQVTVEYVNEGGAMVPVRVHTVLISTQHDETVTNDEIAADLKEHVIKPVIPERYLDEKTIFHLNPSGRFVIGGPHGDAGLTGRKIIIDTYGGWGAHGGGAFSGKDPTKVDRSGAYVARQAAKSIVASGLARRCLVQVSYAIGVPEPLSVFVDSYGTGTIPDKEILKIVKENFDFRPGMVTINLDLKKGGNRFIKTAAYGHFGRDDADFTWEVVKPLKKASA

SEQ ID NO: 11791 - protein, 339 aa, Zea mays subsp. mays
  peptide (1)..(339): Ceres Seq. ID no. 12347729
MVFGEITTKASVDYEKIVRDTCREIGFTSDDVGLDADRCKVLVNIEQQSPDIAQGVHGHFTKRPEEIGAGDQGHMFGYATDETPELMPLSHVLATKLGARLTEVRKDGTCAWLRPDSKTQVTVEYVNEGGAMVPVRVHTVLISTQHDETVTNDEIAADLKEHVIKPVIPERYLDEKTIFHLNPSGRFVIGGPHGDAGLTGRKIIIDTYGGWGAHGGGAFSGKDPTKVDRSGAYVARQAAKSIVASGLARRCLVQVSYAIGVPEPLSVFVDSYGTGTIPDKEILKIVKENFDFRPGMVTINLDLKKGGNRFIKTAAYGHFGRDDADFTWEVVKPLKKASA

SEQ ID NO: 11792 - DNA, 1066 bp, Zea mays subsp. mays
  misc_feature (1)..(1066): Ceres Seq. ID no. 12411760
  misc_feature (1)..(1066): Ortholog of  Ceres SEQ ID NO 15175666 as cited in SEQ ID NO 54985
  misc_feature (1)..(1066): Ortholog of  Ceres SEQ ID NO 14310460 as cited in SEQ ID NO 55105
  misc_feature (1)..(1066): Ortholog of  Ceres SEQ ID NO 13597740 as cited in SEQ ID NO 64482
  misc_feature (1)..(1066): Ortholog of  Ceres SEQ ID NO 15179888 as cited in SEQ ID NO 66879
  misc_feature (1)..(1066): Ortholog of  Ceres SEQ ID NO 13596056 as cited in SEQ ID NO 68307
  misc_feature (1)..(1066): Ortholog of  Ceres SEQ ID NO 12388689 as cited in SEQ ID NO 0
aaaagaaagcccagaccaaagcagagctgcttgcttctccacgccttgtgcttccacagagcaaccagttctcagaagcaatgtccgcacccctggtggacgccgagtacatggccgagatcgagagggcacggcgggacctccgcgctctcgtcgccagcaagaactgcgcgccgatcatgctccgcctcgcgtggcacgacgccggcacttacgacgccaagaccaacacaggaggccccaacggctccataaggttcccacaggagtacagccactcttcaaacgcagggatcaagatcgccattgacctcttagagcctgtgaagcagaagcaccccaagatcacatacgcagacctgtatcagctcgccggagttgtcgccgtcgaagtcactggtggaccgaccgttgacttcgtccctgggaggaaggattcttcgatttgtccagaggaaggacgcttgccggatgctagaagaggtgcttcgcatctcagacaagtattctaccggatgggtttatcagacagggacattgtggcgctctccggcggccatactctggggagagcgcatcgagagaggacagggtttgatggcccatggactagggatcctctgaaatttgacaactcttatttccttgagcttctgaaaggcgactctgaagggctcttgaaactccctactgacaaggttcttgtggaagatcctgaattccgtcagcatgtccaactatatgccaaggatgaagatgcatttttcagggactacgcggagtcacacaagaagctgtcagagctaggcttcaccccccctcgctcttgtctctcatccagatctgcgaataaacacaagtcgttgctggtgcaagctgcagctgggctcgcagttgctaccgcagttgtcgcatgggcgtacctgtgcgaatccaacaacaagttcatctaacttacgcttaccgttagtacaaatacaaattggagtcgccaaaatatttcagttctgtgcacatgtatttgcatctacatattgatataataccaagcatgttatgtgttgtg

SEQ ID NO: 11793 - protein, 316 aa, Zea mays subsp. mays
  peptide (1)..(316): Ceres Seq. ID no. 12411761
KKAQTKAELLASPRLVLPQSNQFSEAMSAPLVDAEYMAEIERARRDLRALVASKNCAPIMLRLAWHDAGTYDAKTNTGGPNGSIRFPQEYSHSSNAGIKIAIDLLEPVKQKHPKITYADLYQLAGVVAVEVTGGPTVDFVPGRKDSSICPEEGRLPDARRGASHLRQVFYRMGLSDRDIVALSGGHTLGRAHRERTGFDGPWTRDPLKFDNSYFLELLKGDSEGLLKLPTDKVLVEDPEFRQHVQLYAKDEDAFFRDYAESHKKLSELGFTPPRSCLSSRSANKHKSLLVQAAAGLAVATAVVAWAYLCESNNKFI

SEQ ID NO: 11794 - protein, 290 aa, Zea mays subsp. mays
  peptide (1)..(290): Ceres Seq. ID no. 12411762
MSAPLVDAEYMAEIERARRDLRALVASKNCAPIMLRLAWHDAGTYDAKTNTGGPNGSIRFPQEYSHSSNAGIKIAIDLLEPVKQKHPKITYADLYQLAGVVAVEVTGGPTVDFVPGRKDSSICPEEGRLPDARRGASHLRQVFYRMGLSDRDIVALSGGHTLGRAHRERTGFDGPWTRDPLKFDNSYFLELLKGDSEGLLKLPTDKVLVEDPEFRQHVQLYAKDEDAFFRDYAESHKKLSELGFTPPRSCLSSRSANKHKSLLVQAAAGLAVATAVVAWAYLCESNNKFI

SEQ ID NO: 11795 - protein, 280 aa, Zea mays subsp. mays
  peptide (1)..(280): Ceres Seq. ID no. 12411763
MAEIERARRDLRALVASKNCAPIMLRLAWHDAGTYDAKTNTGGPNGSIRFPQEYSHSSNAGIKIAIDLLEPVKQKHPKITYADLYQLAGVVAVEVTGGPTVDFVPGRKDSSICPEEGRLPDARRGASHLRQVFYRMGLSDRDIVALSGGHTLGRAHRERTGFDGPWTRDPLKFDNSYFLELLKGDSEGLLKLPTDKVLVEDPEFRQHVQLYAKDEDAFFRDYAESHKKLSELGFTPPRSCLSSRSANKHKSLLVQAAAGLAVATAVVAWAYLCESNNKFI

SEQ ID NO: 11796 - DNA, 1479 bp, Zea mays subsp. mays
  misc_feature (1)..(1479): Ceres Seq. ID no. 12364992
  misc_feature (1)..(1479): Ortholog of  Ceres SEQ ID NO 13638160 as cited in SEQ ID NO 58847
atccgccgcccgcgcacttcttccttcgggcacacaggacaccaccgtcgacggattcatcgcgacgatggggctcgacgtcatggagatcgggatgggcgccgatttgagcctggatctgaggcacttcgcctccaaggccgtgaggcagagcaaggacgacacgccggcgccggacatggacgcatgcatccgccgcctcgaggaggagcggggtaagatcgagatgttcaagcgggacctcccgctctgcgcgcgcctcctcgccgacgtaattgatgtcatgaaggaggaggcggggaagaagaagacgacgacaaggaggagtgaccgcaggctggcgtctgcggcagctgatgaggaggaggaggaggaggacggcgccaccgcggacaagagcaagtggatgagcacggcgcagctctggacgggcgattccgggcgggaggacggggaatcagagaagcaagacaaggggcggtgctcgccggaggccaggtcccgcggcgctctcttaccgttcaaggctgatgtgggttctggcgcgccggcgttggcgccgctctgcttgagaacggacgacaaggctgcggctgcgcgcgtcggggtgccggatctgtcgtccttgctgtcgccgccggcgaccatgcctcctgcggacgccggcgccgaggagagccgtcgccaggttgtgggatttgcgcaagctgcggccagggcggctgccatggccccgtgtgcccctgcgcttgggctccagtcccagtcgcagcagcagcagcagcagcagcagcaggcaaggaaggctcggcgttgctggtcgacggagctgcatcgcaagttcgtcgccgccttggatcagctcggtggcccccaagttgccacgccgaagcaaatcagggagctgatgaaggtggatgggctgacaaacgacgaagtgaaaagccatcttcagaaataccggctgcacaaccggagggcgcctggatccggcgtggtgcgccagccgatcgtgctcgtgggagggctgtggattccccaggagcaaggcagccctcagtctggatctccccacggccccctccaccacctgtccacctcggtggccgccgtctcgtccgccgccaccgccagctgcgaggaggaagacggccggtccgagagctatggctggcaatgatgtctggctgctgctgctgctgcaccaccaatgtgtgttcactgttcagagaggggaggtttcttggcatggtggggatcgccatgggccatggcggaggccaccagttgcagcttcaggaatcgggaggggaattgagtgtagtgtagctgtctgtacacatacatacatacatacagtgagatgggatgagatgagagcgggccttgagcgctcgagatcagaactgatggtgcttcgtcgtcgggtttgtacatcccaaagagaaagagatactagctacagttttgcggcttgct

SEQ ID NO: 11797 - protein, 392 aa, Zea mays subsp. mays
  peptide (1)..(392): Ceres Seq. ID no. 12364993
SAARALLPSGTQDTTVDGFIATMGLDVMEIGMGADLSLDLRHFASKAVRQSKDDTPAPDMDACIRRLEEERGKIEMFKRDLPLCARLLADVIDVMKEEAGKKKTTTRRSDRRLASAAADEEEEEEDGATADKSKWMSTAQLWTGDSGREDGESEKQDKGRCSPEARSRGALLPFKADVGSGAPALAPLCLRTDDKAAAARVGVPDLSSLLSPPATMPPADAGAEESRRQVVGFAQAAARAAAMAPCAPALGLQSQSQQQQQQQQQARKARRCWSTELHRKFVAALDQLGGPQVATPKQIRELMKVDGLTNDEVKSHLQKYRLHNRRAPGSGVVRQPIVLVGGLWIPQEQGSPQSGSPHGPLHHLSTSVAAVSSAATASCEEEDGRSESYGWQ

SEQ ID NO: 11798 - protein, 370 aa, Zea mays subsp. mays
  peptide (1)..(370): Ceres Seq. ID no. 12364994
MGLDVMEIGMGADLSLDLRHFASKAVRQSKDDTPAPDMDACIRRLEEERGKIEMFKRDLPLCARLLADVIDVMKEEAGKKKTTTRRSDRRLASAAADEEEEEEDGATADKSKWMSTAQLWTGDSGREDGESEKQDKGRCSPEARSRGALLPFKADVGSGAPALAPLCLRTDDKAAAARVGVPDLSSLLSPPATMPPADAGAEESRRQVVGFAQAAARAAAMAPCAPALGLQSQSQQQQQQQQQARKARRCWSTELHRKFVAALDQLGGPQVATPKQIRELMKVDGLTNDEVKSHLQKYRLHNRRAPGSGVVRQPIVLVGGLWIPQEQGSPQSGSPHGPLHHLSTSVAAVSSAATASCEEEDGRSESYGWQ

SEQ ID NO: 11799 - protein, 365 aa, Zea mays subsp. mays
  peptide (1)..(365): Ceres Seq. ID no. 12364995
MEIGMGADLSLDLRHFASKAVRQSKDDTPAPDMDACIRRLEEERGKIEMFKRDLPLCARLLADVIDVMKEEAGKKKTTTRRSDRRLASAAADEEEEEEDGATADKSKWMSTAQLWTGDSGREDGESEKQDKGRCSPEARSRGALLPFKADVGSGAPALAPLCLRTDDKAAAARVGVPDLSSLLSPPATMPPADAGAEESRRQVVGFAQAAARAAAMAPCAPALGLQSQSQQQQQQQQQARKARRCWSTELHRKFVAALDQLGGPQVATPKQIRELMKVDGLTNDEVKSHLQKYRLHNRRAPGSGVVRQPIVLVGGLWIPQEQGSPQSGSPHGPLHHLSTSVAAVSSAATASCEEEDGRSESYGWQ

SEQ ID NO: 11800 - DNA, 1921 bp, Zea mays subsp. mays
  misc_feature (1)..(1921): Ceres Seq. ID no. 12404929
  misc_feature (1)..(1921): Ortholog of  Ceres SEQ ID NO 14314363 as cited in SEQ ID NO 52272
gacccacttactaatccagccagccaatgagtcccccgtttcatcacgcaacgccaacccacaccaacgccacccggacccacccacccctcccgtccgtcgcataccatcccatcccatccccgtgcgccgagttcacggccgccgccaccaccaccaccacaaccgattacacaaggccacgcggcttctggaagcttcccttgccttgcctctcaacccaaatcgccacggctcctccgcccgcagcgccctcggcacgaccgccggattcgcctctgggtggggttngttttgtctcccccaccaccctacccacccctctcctctcctccaaggcttggcttgcctcgtgtcgtgtgtccctccaccgcccgctatgccgacgaggcttgccccccaccgccgatcgnacacggtcatatgattgcaatgaatcctgacatcgtactactgtcttggaaacaacttccaccaacggtcgatcctgtgaaacactaagacacccgttgccactggaaaggagagagcaaagtgatttgctgtctcctggcgatcgttgctcgtgaggcctagtgatggcagatgctagctcaaggactgacacctcaattgttttagacgacaacgacaagaatcataggatggagaatggaagtggtgcggttgtaccttctaattcttcagataggtccgacaggtctgataaacctttggaccaaaagacaatgcgacggcttgcccaaaatcgtgaggcagcaagaaaaagtcggctgaggaaaaaggcatatgtgcagcagctggagagcagtaagctgaaacttgcacaactggaacaggaactccagaaagctcgccagcagggaatcttcatttctagctctggagaccaaacccatgccatgagtggaaatggagctttgacttttgacatagaatatgctagatggctagaggaccccaaaataagcagataaatgagttgaggactgcagtgaatgctcatgcaagtgacagcgatctacgacttattgtagatggcataatggcacactatgatgaaatattcaaggtcaaaggtgttgctgcaaaggctgatgtgtttcatatactttcaggcatgtggaagacacctgctgaaaggtgcttcctatggcttgggggttttcgtccatctgagcttttaaagctcctagcgaatcacctcgagcctctaactgagcagcaaatgctgggtttgaccaacctccagcaatcttcccaacaagcagaggatgcgttgtcacagggcatggaagcactgcagcaatctttggcagagactttggctggatctctcggtccagcaggttcttcaggaaatgtggcaaactacatgggtcagatggccatggccatgggcaaactcgggacgctagagaattttcttcgccaagccgacaacctgcgacagcagacgttgcatcaaatgcaacgtatcctaacgatccgacaggcttctcgtgctcttcttgcaatccacgactatttttcacgattgcgcgctttaagttctctgtggcttgctaggccacgtgaataacgaagggccgtcagtattttgagttccctctgccttacggtgctgctgcgtcgttcgcagcgatgcatcacagatctttggtggtactgtttttgttgtacaattacttttggccgctgcttggtccaaattgtactcaggtgggtgtacaagtaggtcaatataatcctgtaagttatggtgatttatgggtgtgttagcaatgcaataataattagagagggcaggatcagggtttctgttgtttgtactggttagagatttagtcctaatgtaacttcctgggacatggggggcggaatgggaagagagtaacaagaatcttcctttggttactgt

SEQ ID NO: 11801 - protein, 211 aa, Zea mays subsp. mays
  peptide (1)..(211): Ceres Seq. ID no. 12404930
MARGPQNKQINELRTAVNAHASDSDLRLIVDGIMAHYDEIFKVKGVAAKADVFHILSGMWKTPAERCFLWLGGFRPSELLKLLANHLEPLTEQQMLGLTNLQQSSQQAEDALSQGMEALQQSLAETLAGSLGPAGSSGNVANYMGQMAMAMGKLGTLENFLRQADNLRQQTLHQMQRILTIRQASRALLAIHDYFSRLRALSSLWLARPRE

SEQ ID NO: 11802 - protein, 178 aa, Zea mays subsp. mays
  peptide (1)..(178): Ceres Seq. ID no. 12404931
MAHYDEIFKVKGVAAKADVFHILSGMWKTPAERCFLWLGGFRPSELLKLLANHLEPLTEQQMLGLTNLQQSSQQAEDALSQGMEALQQSLAETLAGSLGPAGSSGNVANYMGQMAMAMGKLGTLENFLRQADNLRQQTLHQMQRILTIRQASRALLAIHDYFSRLRALSSLWLARPRE

SEQ ID NO: 11803 - protein, 153 aa, Zea mays subsp. mays
  peptide (1)..(153): Ceres Seq. ID no. 12404932
MWKTPAERCFLWLGGFRPSELLKLLANHLEPLTEQQMLGLTNLQQSSQQAEDALSQGMEALQQSLAETLAGSLGPAGSSGNVANYMGQMAMAMGKLGTLENFLRQADNLRQQTLHQMQRILTIRQASRALLAIHDYFSRLRALSSLWLARPRE

SEQ ID NO: 11804 - DNA, 1099 bp, Zea mays subsp. mays
  misc_feature (1)..(1099): Ceres Seq. ID no. 13493423
  misc_feature (1)..(1099): Ortholog of  Ceres SEQ ID NO 13583408 as cited in SEQ ID NO 62616
  misc_feature (1)..(1099): Ortholog of  Ceres SEQ ID NO 15179752 as cited in SEQ ID NO 63074
aactgcagccgtcggatactcccacaggagcgttccgaagccctaatgctcgcccttcccataagtactctcctctgaccacgccgccgccatttccttcctcctcccacctcggcggccggcctcctcttctcttcacccacacgctggtcatagagatgtcggctgcagaggcgaaggcggcggcggtcccggagtctgtgctgcggaagcgcaagcgggaggagcaatgggcagcggacaagaaggagaaggcgctcgcggacaggaagaaggcgctcgagagccgcaagatcatcttcgcccgcgccaagcagtacgccgaggagtaccacgcccaggagaaggagcttgtgcagctcaagcgtgaggcccggttgaagggtgggttctatgtgagcccagaggccaagcttctgtttgtggttcgcatccgtggtatcaatgccatgcaccccaagacccgcaagatcttgcagctcctgcgattgaggcagatcttcaacggtgtcttcctcaaggttaacaaggcaaccattaacatgctgcgcagggtggagccatatgttgcgtacggataccccaacctgaagagcgttagggagttgatctacaagagaggttacgggaagctgaacaagcagaggattccacttagcaacaacagtgtcatcgaggagggcctcgggaagcacaatatcatctgcattgaggaccttgtccacgagatcatgacggtgggcccgcacttcaaggaggccaacaacttcctctggccgttcaagctgaaggcacccctcggcggcctcaagaagaagaggaaccactacgtggagggcggtgacgccggaaaccgtgagaactacatcaacgagctcatcaagaggatgaactaggttctctcttgtatcctgtgagaatgcttttctgtgtcagcgtggttgtttttgctctagtaagttgacggataatgatggatatgcaattttttttggtgttcattggctctaatacagccagacttcactaggaactgtgtcgctgtttatgttggcagtagcttctggaggtttttgtgtacttttgttatttttattct

SEQ ID NO: 11805 - protein, 297 aa, Zea mays subsp. mays
  peptide (1)..(297): Ceres Seq. ID no. 13493424
LQPSDTPTGAFRSPNARPSHKYSPLTTPPPFPSSSHLGGRPPLLFTHTLVIEMSAAEAKAAAVPESVLRKRKREEQWAADKKEKALADRKKALESRKIIFARAKQYAEEYHAQEKELVQLKREARLKGGFYVSPEAKLLFVVRIRGINAMHPKTRKILQLLRLRQIFNGVFLKVNKATINMLRRVEPYVAYGYPNLKSVRELIYKRGYGKLNKQRIPLSNNSVIEEGLGKHNIICIEDLVHEIMTVGPHFKEANNFLWPFKLKAPLGGLKKKRNHYVEGGDAGNRENYINELIKRMN

SEQ ID NO: 11806 - protein, 245 aa, Zea mays subsp. mays
  peptide (1)..(245): Ceres Seq. ID no. 13493425
MSAAEAKAAAVPESVLRKRKREEQWAADKKEKALADRKKALESRKIIFARAKQYAEEYHAQEKELVQLKREARLKGGFYVSPEAKLLFVVRIRGINAMHPKTRKILQLLRLRQIFNGVFLKVNKATINMLRRVEPYVAYGYPNLKSVRELIYKRGYGKLNKQRIPLSNNSVIEEGLGKHNIICIEDLVHEIMTVGPHFKEANNFLWPFKLKAPLGGLKKKRNHYVEGGDAGNRENYINELIKRMN

SEQ ID NO: 11807 - protein, 148 aa, Zea mays subsp. mays
  peptide (1)..(148): Ceres Seq. ID no. 13493426
MHPKTRKILQLLRLRQIFNGVFLKVNKATINMLRRVEPYVAYGYPNLKSVRELIYKRGYGKLNKQRIPLSNNSVIEEGLGKHNIICIEDLVHEIMTVGPHFKEANNFLWPFKLKAPLGGLKKKRNHYVEGGDAGNRENYINELIKRMN

SEQ ID NO: 11808 - DNA, 938 bp, Zea mays subsp. mays
  misc_feature (1)..(938): Ceres Seq. ID no. 13580171
  misc_feature (1)..(938): Ortholog of  Ceres SEQ ID NO 13638567 as cited in SEQ ID NO 51303
  misc_feature (1)..(938): Ortholog of  Ceres SEQ ID NO 12610031 as cited in SEQ ID NO 55811
  misc_feature (1)..(938): Ortholog of  Ceres SEQ ID NO 12610896 as cited in SEQ ID NO 55861
  misc_feature (1)..(938): Ortholog of  Ceres SEQ ID NO 12619664 as cited in SEQ ID NO 66048
  misc_feature (1)..(938): Ortholog of  Ceres SEQ ID NO 12635952 as cited in SEQ ID NO 0
cccactttactcctatccactgcggcctggacgcgtgcgagaggcttgaccaagcagcagcagcagcagcagcgatggcgcctctgaagctgtacgggatgccgctgtcccccaacgtggtgcgcgtggccaccgtgctcaacgagaagggcctcgacttcgagatcgtccccgtcgacctcaccaccggcgcccacaagcagcccgacttcctcgccctcaaccctttcggccagatcccggctctcgtcgacggagacgaagtcctcttcgagtcccgtgcgatcaaccggtacatcgccagcaagtacgcgtcggagggcacggacctgctccccgcgacggcgtcggcggcgaagctggaggtgtggctggaggtggagtcgcaccacttccacccgaacgcgtcgccgctggtgttccagctgctcgtgaggccgctcctgggcggcgcccccgacgcggcggtggtggagaagcacgcggagcagctcgccaaggtgctcgacgtgtacgaggcgcacctggcccgcaacaagtacctcgccggggacgagttcacgctcgccgacgccaaccacgcgctcctacctgctctcacctcagcaagacccccaaggccgggctgcgtcgccgcccgcccccacgtcaaggcctggtgggaggccatcgccgcccgccccgcgttccagaagaccgtcgccgccatccccttgcccccgccgccctcctcctcggcttgacctcgccttgcgttgcctgggtcgcggatgcgtcggagccctgagtcgaataaaagaggccgcatcctgtcttgcatttgctcgtgcgccatgtgctataacagcctgtgtaataaacactgttgcctttcgtgtgtgttcattgccttttggttggttggtccttgcatatcctactagtgctgatctttttgt

SEQ ID NO: 11809 - protein, 246 aa, Zea mays subsp. mays
  peptide (1)..(246): Ceres Seq. ID no. 13580172
HFTPIHCGLDACERLDQAAAAAAAMAPLKLYGMPLSPNVVRVATVLNEKGLDFEIVPVDLTTGAHKQPDFLALNPFGQIPALVDGDEVLFESRAINRYIASKYASEGTDLLPATASAAKLEVWLEVESHHFHPNASPLVFQLLVRPLLGGAPDAAVVEKHAEQLAKVLDVYEAHLARNKYLAGDEFTLADANHALLPALTSARPPRPGCVAARPHVKAWWEAIAARPAFQKTVAAIPLPPPPSSSA

SEQ ID NO: 11810 - protein, 222 aa, Zea mays subsp. mays
  peptide (1)..(222): Ceres Seq. ID no. 13580173
MAPLKLYGMPLSPNVVRVATVLNEKGLDFEIVPVDLTTGAHKQPDFLALNPFGQIPALVDGDEVLFESRAINRYIASKYASEGTDLLPATASAAKLEVWLEVESHHFHPNASPLVFQLLVRPLLGGAPDAAVVEKHAEQLAKVLDVYEAHLARNKYLAGDEFTLADANHALLPALTSARPPRPGCVAARPHVKAWWEAIAARPAFQKTVAAIPLPPPPSSSA

SEQ ID NO: 11811 - protein, 214 aa, Zea mays subsp. mays
  peptide (1)..(214): Ceres Seq. ID no. 13580174
MPLSPNVVRVATVLNEKGLDFEIVPVDLTTGAHKQPDFLALNPFGQIPALVDGDEVLFESRAINRYIASKYASEGTDLLPATASAAKLEVWLEVESHHFHPNASPLVFQLLVRPLLGGAPDAAVVEKHAEQLAKVLDVYEAHLARNKYLAGDEFTLADANHALLPALTSARPPRPGCVAARPHVKAWWEAIAARPAFQKTVAAIPLPPPPSSSA

SEQ ID NO: 11812 - DNA, 880 bp, Zea mays subsp. mays
  misc_feature (1)..(880): Ceres Seq. ID no. 12343712
  misc_feature (1)..(880): Ortholog of  Ceres SEQ ID NO 13596185 as cited in SEQ ID NO 67997
aaaaaaccccgaaggttcggactgaatgaagcgaaagcccaaatccccttccccttcccctcttcgtctccgtcggcggcgtcggaccgaacccgatcccgcagccctaactaaccctaggaggcaggcggcggcggggatggtgtactacgcgctgttggtgggcgcggagctggatggcctcaccaacctgcagccccgccacggctgcgacgaccccagcttcccctactacctcaagctcaagtgcgagaactgcggggaggtcaccgccaagtccacctacgtcaccctcagcgagcaagtcgacctgcccagaggacacggtgccgctcacctcgtccagaagtgcaagctttgtgggagagatggaacaattgtgatgattcctggtcaggggacaccacttactattgagcagagccagaaagaggagaagacttgtttgatggtgtttgactgcagaggctatgaacctgttgagttttcctttggcactggctggaaggctgaatctgtgcatgggactccttttgaaattgactgctctgaaggtgaattttctgagtatgatgagaagggagaatgccccgttgagctaggcaagctgcagtcaacattcaaagtggtgaagaagcatgagaagggtgggaagactagatttgtctagatcgagtgacttggaatctggcagatattggagttggcggtgtgtataaatggtagatttgggctgaaggtcatgcgtgatccgacctcctttttcttctatctgttgattctgtggatgcagtgaaccatgcgaagctttcggtgatagtgtccacaggggcattaccctgtaccgaaactgatctttataacttaccaccaatgctcg

SEQ ID NO: 11813 - protein, 214 aa, Zea mays subsp. mays
  peptide (1)..(214): Ceres Seq. ID no. 12343713
MKRKPKSPSPSPLRLRRRRRTEPDPAALTNPRRQAAAGMVYYALLVGAELDGLTNLQPRHGCDDPSFPYYLKLKCENCGEVTAKSTYVTLSEQVDLPRGHGAAHLVQKCKLCGRDGTIVMIPGQGTPLTIEQSQKEEKTCLMVFDCRGYEPVEFSFGTGWKAESVHGTPFEIDCSEGEFSEYDEKGECPVELGKLQSTFKVVKKHEKGGKTRFV

SEQ ID NO: 11814 - protein, 176 aa, Zea mays subsp. mays
  peptide (1)..(176): Ceres Seq. ID no. 12343714
MVYYALLVGAELDGLTNLQPRHGCDDPSFPYYLKLKCENCGEVTAKSTYVTLSEQVDLPRGHGAAHLVQKCKLCGRDGTIVMIPGQGTPLTIEQSQKEEKTCLMVFDCRGYEPVEFSFGTGWKAESVHGTPFEIDCSEGEFSEYDEKGECPVELGKLQSTFKVVKKHEKGGKTRFV

SEQ ID NO: 11815 - DNA, 711 bp, Zea mays subsp. mays; identical to SEQ ID NO: 2360
  misc_feature (1)..(711): Ceres Seq. ID no. 12588472
  misc_feature (1)..(711): Ortholog of  Ceres SEQ ID NO 12783998 as cited in SEQ ID NO 61535
  misc_feature (1)..(711): Ortholog of  Ceres SEQ ID NO 15174264 as cited in SEQ ID NO 61877
  misc_feature (1)..(711): Ortholog of  Ceres SEQ ID NO 12616383 as cited in SEQ ID NO 63582

SEQ ID NO: 11816 - protein, 149 aa, Zea mays subsp. mays; identical to SEQ ID NO: 2361
  peptide (1)..(149): Ceres Seq. ID no. 12588473

SEQ ID NO: 11817 - protein, 99 aa, Zea mays subsp. mays; identical to SEQ ID NO: 2362
  peptide (1)..(99): Ceres Seq. ID no. 12588474

SEQ ID NO: 11818 - DNA, 761 bp, Zea mays subsp. mays
  misc_feature (1)..(761): Ceres Seq. ID no. 12345679
  misc_feature (1)..(761): Ortholog of  Ceres SEQ ID NO 12610243 as cited in SEQ ID NO 56206
  misc_feature (1)..(761): Ortholog of  Ceres SEQ ID NO 13661089 as cited in SEQ ID NO 61053
  misc_feature (1)..(761): Ortholog of  Ceres SEQ ID NO 15173496 as cited in SEQ ID NO 68918
  misc_feature (1)..(761): Ortholog of  Ceres SEQ ID NO 13599645 as cited in SEQ ID NO 0
aattgccttaccttgccttgccttcccctccattccacctccacctcgccgcccgaatccccccacccaacaatcccccatggggtcgcaggccatcgaggcgcaccgcgcgggcgcggaggtgtaccgcggcgcggcgctgtgcgcggagaagtcgacggagctgctggcagaggcgcacctcccgctgggcctgctgccgctggccgacatggaggaggtcggctacaaccgcgccacgggcttcgtgtggctgcgccagaggaaggcgctcacgcacacgttccgcccgatcgcgcgccaggtctcgtacgccgccgaggtcaccgcgttcgtggaggaccggcggatgaagcgcatgaccggggtcaagaccaaggagctcctcatctgggtcaccctctccgacatgttcgtcgacagggacgacccgtccaagatcaccttcaagacgcccaccgggctcggcaggacctaccccgtctccgccttcgccaaggaaggcgccggtgacgacggcgcggcggccaagcacaaggatgatgcccccgccccgaccgccgccggtaaggctgctgccagcaagtgaggtggcggcgtccggagctttttaccttgccgtagtcgccatacttgcctcctcaataatggcgtttgtaccccctctacctgcttcaaattagtgtgttttatgaatggaaacgaccatccaactttccatccgtccttgcaatgccaatgtgtcacggggtgtttttact

SEQ ID NO: 11819 - protein, 195 aa, Zea mays subsp. mays
  peptide (1)..(195): Ceres Seq. ID no. 12345680
IALPCLAFPSIPPPPRRPNPPTQQSPMGSQAIEAHRAGAEVYRGAALCAEKSTELLAEAHLPLGLLPLADMEEVGYNRATGFVWLRQRKALTHTFRPIARQVSYAAEVTAFVEDRRMKRMTGVKTKELLIWVTLSDMFVDRDDPSKITFKTPTGLGRTYPVSAFAKEGAGDDGAAAKHKDDAPAPTAAGKAAASK

SEQ ID NO: 11820 - protein, 170 aa, Zea mays subsp. mays
  peptide (1)..(170): Ceres Seq. ID no. 12345681
NCLTLPCLPLHSTSTSPPESPHPTIPHGVAGHRGAPRGRGGVPRRGAVRGEVDGAAGRGAPPAGPAAAGRHGGGRLQPRHGLRVAAPEEGAHAHVPPDRAPGLVRRRGHRVRGGPADEAHDRGQDQGAPHLGHPLRHVRRQGRPVQDHLQDAHRARQDLPRLRLRQGRRR

SEQ ID NO: 11821 - protein, 169 aa, Zea mays subsp. mays
  peptide (1)..(169): Ceres Seq. ID no. 12345682
MGSQAIEAHRAGAEVYRGAALCAEKSTELLAEAHLPLGLLPLADMEEVGYNRATGFVWLRQRKALTHTFRPIARQVSYAAEVTAFVEDRRMKRMTGVKTKELLIWVTLSDMFVDRDDPSKITFKTPTGLGRTYPVSAFAKEGAGDDGAAAKHKDDAPAPTAAGKAAASK

SEQ ID NO: 11822 - DNA, 929 bp, Zea mays subsp. mays
  misc_feature (1)..(929): Ceres Seq. ID no. 12361956
  misc_feature (1)..(929): Ortholog of  Ceres SEQ ID NO 15177343 as cited in SEQ ID NO 51182
aaggccattctttgtggaatttgataataacattttctcgtctagtcatcttcgtcgctcgagtactcgagctgaaaggggaagaccaagctccctttttgaagaaagtcctcgacaaatgttccatagtctcatgggggagagggacagacatagacacataaccatggaaggaattacagaggttttggctgcattggagaggattgaacagcaagcagagctgacctatgatcaattgctaatgctggaggctaatctattttttggcgcctttgcctcctatgatcggcatagagacatgcggatggatattgatgatatgtcctatgaggaattattggccctggaggagagaataggctctgtgagcacagctctttcagaggagcagttcacaaaatgcctcaaaagaagcatatatagtcaggtcgctctagaagtgaacaaatcaaccgttgatgacatgaaatgcagcatctgtcaggaagagtacgcggagggcgaagaggttgggaggctgccatgcgagcaccggtaccatgtgtgctgcataggccagtggcttgggcagaagaactggtgtccagtatgcaaagcgtctgccgtgccttccaagggctgaagcattggggatgctggaaaccccgntccggattacaaaccatccttgcttttgtctacgtacattgttcttttccctatatgcattagatatagatcatgtctagatgtatgacgctagaacagcttgcgatttgggaggaagctaagagagtaatagttagctggttaataatagttcatagctaatatttgctagataactattacttggctacctattagctgtgcctttcacattgtggtacaggacaaatgcttgtcagatcgtgaacaaccttataacttgatgaatggcctaagtc

SEQ ID NO: 11823 - protein, 207 aa, Zea mays subsp. mays
  peptide (1)..(207): Ceres Seq. ID no. 12361957
RPFFVEFDNNIFSSSHLRRSSTRAERGRPSSLFEESPRQMFHSLMGERDRHRHITMEGITEVLAALERIEQQAELTYDQLLMLEANLFFGAFASYDRHRDMRMDIDDMSYEELLALEERIGSVSTALSEEQFTKCLKRSIYSQVALEVNKSTVDDMKCSICQEEYAEGEEVGRLPCEHRYHVCCIGQWLGQKNWCPVCKASAVPSKG

SEQ ID NO: 11824 - protein, 168 aa, Zea mays subsp. mays
  peptide (1)..(168): Ceres Seq. ID no. 12361958
MFHSLMGERDRHRHITMEGITEVLAALERIEQQAELTYDQLLMLEANLFFGAFASYDRHRDMRMDIDDMSYEELLALEERIGSVSTALSEEQFTKCLKRSIYSQVALEVNKSTVDDMKCSICQEEYAEGEEVGRLPCEHRYHVCCIGQWLGQKNWCPVCKASAVPSKG

SEQ ID NO: 11825 - protein, 163 aa, Zea mays subsp. mays
  peptide (1)..(163): Ceres Seq. ID no. 12361959
MGERDRHRHITMEGITEVLAALERIEQQAELTYDQLLMLEANLFFGAFASYDRHRDMRMDIDDMSYEELLALEERIGSVSTALSEEQFTKCLKRSIYSQVALEVNKSTVDDMKCSICQEEYAEGEEVGRLPCEHRYHVCCIGQWLGQKNWCPVCKASAVPSKG

SEQ ID NO: 11826 - DNA, 1577 bp, Zea mays subsp. mays
  misc_feature (1)..(1577): Ceres Seq. ID no. 12413088
  misc_feature (1)..(1577): Ortholog of  Ceres SEQ ID NO 15170483 as cited in SEQ ID NO 52827
  misc_feature (1)..(1577): Ortholog of  Ceres SEQ ID NO 14303943 as cited in SEQ ID NO 53802
  misc_feature (1)..(1577): Ortholog of  Ceres SEQ ID NO 14311804 as cited in SEQ ID NO 59058
attgggggtgttaaaccgcatcgcatcgtcttctagggtttcctcctcccgccgccacttgctgccccacgagcccattcccctcagcccttcaccatctccggcggtcgcagtggcatcagcagctccggctcacgcgcagcaaaggaacgacaatatggcgaccatcgtaaacacgacggaggaggagccgatgctggccgtggtccgcttcaccgctgagctcgcctgggccgacgcgggcccggaagtcgccgaccccgaggtcgcccgcctatgtctcgaggcgcaggagcatatcctcgcggggcggtggctcgacatggcctcccttatgctcgcctccgccgacctcctcctcacctccccgtcgcgcgtctcggacaaagacctggagtgcgttctctccgtcatctgcagcctcgtcaccaaggccggatccgaggaccaggcgctgcagatcaccgaactcatctgcgctaagctcacccagcaacacggtgacaagccagcgctgcgcctcaaagttcttttcagcttgtacaatctgctcccgagcccgtacggcaaggcatttgtttacaagaaggctcttgagctcgccacggctggaaaggctgctgagtacatcatcccatctttcaagaacattgacagttttgtcagtgagtggggaattgacaatttggagaagagggagctataccttgctatcactaccatcctcaaagaccacaagggcatggctaaggagtactttaactttctcaataagtaccttgccacattcaaagggtcagatgatgaatcaggtataattggtgatgcgaaggaagaggctgttgcggcaatcatcgagtttgttaaatcgcctaatctctttcagtgtgatttgctcaacatgccagctgtttcacagcttgagaaggacggaaagtatcagttggtgtatgaactactaaagatattccttactaagaagcttgattcctacttggagtttcaaagtgcaaactctgacttgctgaaagattatggtctcgttcatgaggaatgtgtaaccaaaatgcgcctcatgtctttgctcgatctgagcagccgatgctctggtgaaatcccttattctgcaatcactgttgaactcaggatcaatgatgacgaggtggagcaatggattgtgaaggcaattgcatccaagatattggattgcaaggttgaccagcttaaccagactgtcattgtcagtcggcacacagagaggatctttgggatggaacattggcatgctctgcgcacaaagctcggagcttggaggggaaacattgccagagctatcaacacaatacaagctaacaaagtcaccgaagagggggcacaagggatgcaaggcttggcgatccactgattcggggcgggtcagcgggttcgtgaattgagattatagcgtgggagattagaagggcaaccttttttgtatgagacaagttgtaatggtttatttacttagatcccgtaaccatgcctggttattccttgtatttggtcagacacgccgcgcagtgcaaggcagttgttac

SEQ ID NO: 11827 - protein, 467 aa, Zea mays subsp. mays
  peptide (1)..(467): Ceres Seq. ID no. 12413089
LGVLNRIASSSRVSSSRRHLLPHEPIPLSPSPSPAVAVASAAPAHAQQRNDNMATIVNTTEEEPMLAVVRFTAELAWADAGPEVADPEVARLCLEAQEHILAGRWLDMASLMLASADLLLTSPSRVSDKDLECVLSVICSLVTKAGSEDQALQITELICAKLTQQHGDKPALRLKVLFSLYNLLPSPYGKAFVYKKALELATAGKAAEYIIPSFKNIDSFVSEWGIDNLEKRELYLAITTILKDHKGMAKEYFNFLNKYLATFKGSDDESGIIGDAKEEAVAAIIEFVKSPNLFQCDLLNMPAVSQLEKDGKYQLVYELLKIFLTKKLDSYLEFQSANSDLLKDYGLVHEECVTKMRLMSLLDLSSRCSGEIPYSAITVELRINDDEVEQWIVKAIASKILDCKVDQLNQTVIVSRHTERIFGMEHWHALRTKLGAWRGNIARAINTIQANKVTEEGAQGMQGLAIH

SEQ ID NO: 11828 - protein, 415 aa, Zea mays subsp. mays
  peptide (1)..(415): Ceres Seq. ID no. 12413090
MATIVNTTEEEPMLAVVRFTAELAWADAGPEVADPEVARLCLEAQEHILAGRWLDMASLMLASADLLLTSPSRVSDKDLECVLSVICSLVTKAGSEDQALQITELICAKLTQQHGDKPALRLKVLFSLYNLLPSPYGKAFVYKKALELATAGKAAEYIIPSFKNIDSFVSEWGIDNLEKRELYLAITTILKDHKGMAKEYFNFLNKYLATFKGSDDESGIIGDAKEEAVAAIIEFVKSPNLFQCDLLNMPAVSQLEKDGKYQLVYELLKIFLTKKLDSYLEFQSANSDLLKDYGLVHEECVTKMRLMSLLDLSSRCSGEIPYSAITVELRINDDEVEQWIVKAIASKILDCKVDQLNQTVIVSRHTERIFGMEHWHALRTKLGAWRGNIARAINTIQANKVTEEGAQGMQGLAIH

SEQ ID NO: 11829 - protein, 403 aa, Zea mays subsp. mays
  peptide (1)..(403): Ceres Seq. ID no. 12413091
MLAVVRFTAELAWADAGPEVADPEVARLCLEAQEHILAGRWLDMASLMLASADLLLTSPSRVSDKDLECVLSVICSLVTKAGSEDQALQITELICAKLTQQHGDKPALRLKVLFSLYNLLPSPYGKAFVYKKALELATAGKAAEYIIPSFKNIDSFVSEWGIDNLEKRELYLAITTILKDHKGMAKEYFNFLNKYLATFKGSDDESGIIGDAKEEAVAAIIEFVKSPNLFQCDLLNMPAVSQLEKDGKYQLVYELLKIFLTKKLDSYLEFQSANSDLLKDYGLVHEECVTKMRLMSLLDLSSRCSGEIPYSAITVELRINDDEVEQWIVKAIASKILDCKVDQLNQTVIVSRHTERIFGMEHWHALRTKLGAWRGNIARAINTIQANKVTEEGAQGMQGLAIH

SEQ ID NO: 11830 - DNA, 679 bp, Zea mays subsp. mays
  misc_feature (1)..(679): Ceres Seq. ID no. 12403782
  misc_feature (1)..(679): Ortholog of  Ceres SEQ ID NO 15172846 as cited in SEQ ID NO 51978
  misc_feature (1)..(679): Ortholog of  Ceres SEQ ID NO 13585156 as cited in SEQ ID NO 68122
aaatcgcaattcgcaattcccagccccattccccgtcgcccggtcggaagcaccaccagctaccagggatgtctggcgaggaggaggagaacgccgcggagctcaagatcggcgaagagttcctcaaggccaagtgcctgatgaactgcgaggtggcgatcatcctggagcacaagtacgagcagatccagcagcacgcgtcgtcggagtcggacccgtcgtcgcaggtgtcgcaggtgttcgagaagtcgctgcagtacgtgaagcgcttcagccgctacaagaaccccgacgccgtgcgccaggtccgcgagacgctgagccgctacggcctcgccgagttcgagctctgcacgctcggcaacctctgccccgacaccagcggcgaggccaccgcgctcgtcccctccctcaagtccggcggcaggttcgtcggcgaccccggggacgagaagatcgagaagatgctcaacgacctctccctcatcaagaagttcgagtagagcgggagcccccagggtccgtatctcccccctcttctcttcttttctcttggagtagcgagcatccagagaggaggggaattcaacatcaagacgatgtactgctaaaattttacttgccttactactatcgttgaggtttgcgtctgcgtattgattagaaccttgtttgatcg

SEQ ID NO: 11831 - protein, 212 aa, Zea mays subsp. mays
  peptide (1)..(212): Ceres Seq. ID no. 12403783
NRNSQFPAPFPVARSEAPPATRDVWRGGGERRGAQDRRRVPQGQVPDELRGGDHPGAQVRADPAARVVGVGPVVAGVAGVREVAAVREALQPLQEPRRRAPGPRDAEPLRPRRVRALHARQPLPRHQRRGHRARPLPQVRRQVRRRPRGREDREDAQRPLPHQEVRVEREPPGSVSPPSSLLFSWSSEHPERRGIQHQDDVLLKFYLPYYYR

SEQ ID NO: 11832 - protein, 166 aa, Zea mays subsp. mays
  peptide (1)..(166): Ceres Seq. ID no. 12403784
IAIRNSQPHSPSPGRKHHQLPGMSGEEEENAAELKIGEEFLKAKCLMNCEVAIILEHKYEQIQQHASSESDPSSQVSQVFEKSLQYVKRFSRYKNPDAVRQVRETLSRYGLAEFELCTLGNLCPDTSGEATALVPSLKSGGRFVGDPGDEKIEKMLNDLSLIKKFE

SEQ ID NO: 11833 - protein, 144 aa, Zea mays subsp. mays
  peptide (1)..(144): Ceres Seq. ID no. 12403785
MSGEEEENAAELKIGEEFLKAKCLMNCEVAIILEHKYEQIQQHASSESDPSSQVSQVFEKSLQYVKRFSRYKNPDAVRQVRETLSRYGLAEFELCTLGNLCPDTSGEATALVPSLKSGGRFVGDPGDEKIEKMLNDLSLIKKFE

SEQ ID NO: 11834 - DNA, 1439 bp, Zea mays subsp. mays
  misc_feature (1)..(1439): Ceres Seq. ID no. 12411752
  misc_feature (1)..(1439): Ortholog of  Ceres SEQ ID NO 15175700 as cited in SEQ ID NO 58584
  misc_feature (1)..(1439): Ortholog of  Ceres SEQ ID NO 13596474 as cited in SEQ ID NO 62169
  misc_feature (1)..(1439): Ortholog of  Ceres SEQ ID NO 13596969 as cited in SEQ ID NO 63375
  misc_feature (1)..(1439): Ortholog of  Ceres SEQ ID NO 13597870 as cited in SEQ ID NO 64982
  misc_feature (1)..(1439): Ortholog of  Ceres SEQ ID NO 13656123 as cited in SEQ ID NO 65212
  misc_feature (1)..(1439): Ortholog of  Ceres SEQ ID NO 13595926 as cited in SEQ ID NO 67778
gatcaagaactgctgctcatgtgcgcagcgcgaggctcgagccgccaaagcagggaagcagagagcaagctaataagcaaccgcgtttcccagattccttggcactgcagcagctgcgtccaagcttgctaggtggtggcggcagcagcagcctgcgcctatgtacactgcaatggcagcgcgaccgctgcttcttccccctccggtcctcctcctcctggtggtgctggctgcttcgtcggccgcccatggctatggcgcctacggctacggcgacgctgctgctgagctcagggtcgggttctacaaggactcgtgcccggacgccgaggccgtcgtccgcaggatcgtcgccaaggccgtccgcgaggaccccacggccaacgcgccgctgctcaggctccacttccacgactgcttcgtccggggctgcgacggctccgtgctcgtcaactccaccagggggaacacggcggagaaggacgccaagcccaaccacacgctggacgccttcgacgtcatcgacgacatcaaggaggcgctggagaagcgctgcccggggaccgtctcctgcgccgacatccttgccatcgccgccagggacgccgtctcgctggccaccaaggtggtgaccaagggcggctggagcagggacggcaacctctaccaggtggagaccggcaggcgggacggccgcgtgtccagagccaaggaggcggtcaagaacttgccggactccatggatggcatccgcaagctcatcaggaggttcgcttccaagaacctcagcgtcaaggatctcgctgttctctcaggcgcccacgcgatcggcaaatcgcactgcccgtcgatcgccaagcggctgcgcaacttcacggcgcaccgggacagcgacccgaccctggacgccgcgtacgcggcggagctgaggcggcagtgccggagccgcagggacaacacgacggagctggagatggtgccggggggctccaccgcgttcggcacggcctactacggcctggtcgcggagcggagggcgctcttccactccgacgaggcgctgctcaggaacggggagaccagggcgctcgtctaccgctacagggacgcgccgtcggaggcggcgttccttgcggacttcggagcgtccatgctcaacatgggcagggtgggcgtgctcaccggcgcccagggggagatcaggaagaggtgcgcctttgtcaactagctagcgatgctgtgttgtactttgtaccctctcgccttaattaaaatttaaatgctggagtttcacctagtctcgagagaatcttccatttttactcctacatagatttaggaacgtttctaggtttcatatgattgtgaaacgtttgggctgagctcatctgtaactgtaaactctgatggaatgcgataacgtgttccatattgtgtgc

SEQ ID NO: 11835 - protein, 355 aa, Zea mays subsp. mays
  peptide (1)..(355): Ceres Seq. ID no. 12411753
MYTAMAARPLLLPPPVLLLLVVLAASSAAHGYGAYGYGDAAAELRVGFYKDSCPDAEAVVRRIVAKAVREDPTANAPLLRLHFHDCFVRGCDGSVLVNSTRGNTAEKDAKPNHTLDAFDVIDDIKEALEKRCPGTVSCADILAIAARDAVSLATKVVTKGGWSRDGNLYQVETGRRDGRVSRAKEAVKNLPDSMDGIRKLIRRFASKNLSVKDLAVLSGAHAIGKSHCPSIAKRLRNFTAHRDSDPTLDAAYAAELRRQCRSRRDNTTELEMVPGGSTAFGTAYYGLVAERRALFHSDEALLRNGETRALVYRYRDAPSEAAFLADFGASMLNMGRVGVLTGAQGEIRKRCAFVN

SEQ ID NO: 11836 - protein, 351 aa, Zea mays subsp. mays
  peptide (1)..(351): Ceres Seq. ID no. 12411754
MAARPLLLPPPVLLLLVVLAASSAAHGYGAYGYGDAAAELRVGFYKDSCPDAEAVVRRIVAKAVREDPTANAPLLRLHFHDCFVRGCDGSVLVNSTRGNTAEKDAKPNHTLDAFDVIDDIKEALEKRCPGTVSCADILAIAARDAVSLATKVVTKGGWSRDGNLYQVETGRRDGRVSRAKEAVKNLPDSMDGIRKLIRRFASKNLSVKDLAVLSGAHAIGKSHCPSIAKRLRNFTAHRDSDPTLDAAYAAELRRQCRSRRDNTTELEMVPGGSTAFGTAYYGLVAERRALFHSDEALLRNGETRALVYRYRDAPSEAAFLADFGASMLNMGRVGVLTGAQGEIRKRCAFVN

SEQ ID NO: 11837 - protein, 209 aa, Zea mays subsp. mays
  peptide (1)..(209): Ceres Seq. ID no. 12411755
SRTAAHVRSARLEPPKQGSREQANKQPRFPDSLALQQLRPSLLGGGGSSSLRLCTLQWQRDRCFFPLRSSSSWWCWLLRRPPMAMAPTATATLLLSSGSGSTRTRARTPRPSSAGSSPRPSARTPRPTRRCSGSTSTTASSGAATAPCSSTPPGGTRRRRTPSPTTRWTPSTSSTTSRRRWRSAARGPSPAPTSLPSPPGTPSRWPPRW

SEQ ID NO: 11838 - DNA, 1400 bp, Zea mays subsp. mays
  misc_feature (1)..(1400): Ceres Seq. ID no. 12411748
  misc_feature (1)..(1400): Ortholog of  Ceres SEQ ID NO 15176227 as cited in SEQ ID NO 51448
  misc_feature (1)..(1400): Ortholog of  Ceres SEQ ID NO 14313947 as cited in SEQ ID NO 54525
atcctatgatatgagccaaagctccgaactccatcccagttcttctccacctcgtcctcctcctgctcctgcattctcgcccgtcccccaaattcacctcggccaccctccaccacctcgtcggcgcgggcagcagttcgcctcatcgtcctcccacctgacgacgtcgcggttcgcgctctcgcggcgtgccgcgcacccattcctcgcccacgtctccccgagttccacgccttctgtgccacgcgccacccggagccactgtttgccgcgccctccgcatctctgacctctacatctccatccgcggaagcagaccacctcgaatccttctctttcacgcagtcattgcttgcctccttagcccaactgttggtaccagaggttcatgtttcatcataaggaatgaacagtagtcgacaaatggaactccactacataaacactggatttccatacacaatcaccgagagcttcatggatttctttgagggtctcacttatgctcatgctgactttgctctcacggatggctttcaggatcagggtaatccatactgggcaatgatgcatacaaactcgtacaaatatggatactctggtcctgggaactattacagttatgctgatgtctatgacatagacgattacatgcatagagccaatggtgagcgcagaatatgggataacactacacctgtaaacaatgtcgattctgccaatgttgtcctgcagggtggtgaagctccccgcacaacggcaaatactattaacaaggaatgcatccaacaggtacaccaaagtccaggtagtcctcaggttgtttggcaagataacattgagcctgataatatgacatatgaggaactgttggatttgggtgaggcagttggaacccagagccgtggtctctcccaagaacgcatttcatcgcttcctgtcacgaagtataagtgtggttttttttcaaggaagaaaacatgccgtgagaggtgtgtgatttgccaaatggagtacaggagaggaaatttgcagatgacacttccatgcaagcatgtataccatgccagctgcgtgacaagatggcttggcataaacaaggtatgccctgtttgctttgctgaagttcctggcgaggatcctgaggcaatgagtcaacagttatgaggccactgggaagttgttgcactttgaagctgagtactgcccccaatgaacgcatgatgtttgcttgaaggcagcttattgtccccactttataattgtgtattagcaccgtattaccaaatataggttattgttagatcagatgtatttagtgtttggttcagcgttttgtaacgtaatcaaatcaggaacagagagataccgttacttgcgtttggttgaacgaggcccat

SEQ ID NO: 11839 - protein, 253 aa, Zea mays subsp. mays
  peptide (1)..(253): Ceres Seq. ID no. 12411749
MNSSRQMELHYINTGFPYTITESFMDFFEGLTYAHADFALTDGFQDQGNPYWAMMHTNSYKYGYSGPGNYYSYADVYDIDDYMHRANGERRIWDNTTPVNNVDSANVVLQGGEAPRTTANTINKECIQQVHQSPGSPQVVWQDNIEPDNMTYEELLDLGEAVGTQSRGLSQERISSLPVTKYKCGFFSRKKTCRERCVICQMEYRRGNLQMTLPCKHVYHASCVTRWLGINKVCPVCFAEVPGEDPEAMSQQL

SEQ ID NO: 11840 - protein, 247 aa, Zea mays subsp. mays
  peptide (1)..(247): Ceres Seq. ID no. 12411750
MELHYINTGFPYTITESFMDFFEGLTYAHADFALTDGFQDQGNPYWAMMHTNSYKYGYSGPGNYYSYADVYDIDDYMHRANGERRIWDNTTPVNNVDSANVVLQGGEAPRTTANTINKECIQQVHQSPGSPQVVWQDNIEPDNMTYEELLDLGEAVGTQSRGLSQERISSLPVTKYKCGFFSRKKTCRERCVICQMEYRRGNLQMTLPCKHVYHASCVTRWLGINKVCPVCFAEVPGEDPEAMSQQL

SEQ ID NO: 11841 - protein, 229 aa, Zea mays subsp. mays
  peptide (1)..(229): Ceres Seq. ID no. 12411751
MDFFEGLTYAHADFALTDGFQDQGNPYWAMMHTNSYKYGYSGPGNYYSYADVYDIDDYMHRANGERRIWDNTTPVNNVDSANVVLQGGEAPRTTANTINKECIQQVHQSPGSPQVVWQDNIEPDNMTYEELLDLGEAVGTQSRGLSQERISSLPVTKYKCGFFSRKKTCRERCVICQMEYRRGNLQMTLPCKHVYHASCVTRWLGINKVCPVCFAEVPGEDPEAMSQQL

SEQ ID NO: 11842 - DNA, 1558 bp, Zea mays subsp. mays
  misc_feature (1)..(1558): Ceres Seq. ID no. 12343899
  misc_feature (1)..(1558): Ortholog of  Ceres SEQ ID NO 12609146 as cited in SEQ ID NO 52118
  misc_feature (1)..(1558): Ortholog of  Ceres SEQ ID NO 14303397 as cited in SEQ ID NO 54614
  misc_feature (1)..(1558): Ortholog of  Ceres SEQ ID NO 13594056 as cited in SEQ ID NO 55691
  misc_feature (1)..(1558): Ortholog of  Ceres SEQ ID NO 14314186 as cited in SEQ ID NO 57457
  misc_feature (1)..(1558): Ortholog of  Ceres SEQ ID NO 13638136 as cited in SEQ ID NO 58644
  misc_feature (1)..(1558): Ortholog of  Ceres SEQ ID NO 13596868 as cited in SEQ ID NO 62806
  misc_feature (1)..(1558): Ortholog of  Ceres SEQ ID NO 14301886 as cited in SEQ ID NO 64201
  misc_feature (1)..(1558): Ortholog of  Ceres SEQ ID NO 13595885 as cited in SEQ ID NO 69265
  misc_feature (1)..(1558): Ortholog of  Ceres SEQ ID NO 12566239 as cited in SEQ ID NO 0
  misc_feature (1)..(1558): Ortholog of  Ceres SEQ ID NO 13599119 as cited in SEQ ID NO 0
  misc_feature (1)..(1558): Ortholog of  Ceres SEQ ID NO 14308987 as cited in SEQ ID NO 0
  misc_feature (1)..(1558): Ortholog of  Ceres SEQ ID NO 15179992 as cited in SEQ ID NO 0
aagcaaccggggccgagagagacgagatgaggcctgcctcttctccctccgtcacacgcgagacggagacgcgtctgaagctgaggcctgtataaaagcgctaaagatccctcgctctcttcccccccgtgcgctgtgtcccgtctctgcagcaagttctgtcttcgtccatccatccgtccccgtctcactgcctgtggcccgtgggtagcggttgtcgatcagcttacccacgccggcgtgttctccctgacatggtcggccggatggagcggcagaccgcgtcgtcgtcagcgtcatgctcccccgccgccgccgccaccacctcctcctcgtcctgcggcggcaagaagcggcctgatatcctcaacatgatccggaatgcatcctgtcttaattcgtcgtctgctgataccggcaagggaaggagtaaattgtcgaccaacaaagttacacatggattccacctggtggaaggcaagtccggccatgacatggaagactaccatgtggcagagtacaagtatgtgaagaatcatgagcttggtctctttgccatttttgatggccatttaggagataaggtgccaagttacttgaaagctaacctttttagcaacataatgaaagagcctctcttctggtctagccctcaagaagcaataaagaatgcatactgctctacaaacaagtatattctagaaaataccaaacaacttggaccaggtggttcgacagcagttactgctattgtagttgatggtaaggacatgtggatagcaaatgtaggcgactctagagctgttgtgtgtgaaagaggctctgctaagcagctcactgttgaccatgagccccatgaaactaatgaaagacagaggattgaaaagcacggtggctttgtgacgacatttcctggtgatgttcctcgggtgaatggtcagctcgctgttgctagggcatttggtgaccaaagcctcaaggcccacttgagctctgaacctgatattagtcatgtaccaataaactcaagtatagagtttgtcatacttgccagtgatggattgtggaaggtaatgaagaaccaggaagccgtcgatctcgtgaagtcaatcaaggatccacaggcagcagcgaaacgattgaccactgaagcgttggcaaggaagagcaaggatgatatctcttgcattgtcatccgtttccgctgctgagttaccctctctccacggcactgatatccagtcttcacctcatgatttagattgagacaatttgtctttgccgaattttctgatagaatatgctgtacctatcatagctgtcgacaggcctggaactaattagggtagtgaagacttgagagctggttggtgagtgtgtgcagggtgcctattcgcctgtgcatatgttgactctgcatccgttgatccggacttgggcgactgtcaggaccttagtgcttgtgtgcttgtgatggtaatggacctaatggctaatggtggtaagggaacttgttgataccaaatttggttaatttagttttttttcatggctcgcc

SEQ ID NO: 11843 - protein, 318 aa, Zea mays subsp. mays
  peptide (1)..(318): Ceres Seq. ID no. 12343900
MVGRMERQTASSSASCSPAAAATTSSSSCGGKKRPDILNMIRNASCLNSSSADTGKGRSKLSTNKVTHGFHLVEGKSGHDMEDYHVAEYKYVKNHELGLFAIFDGHLGDKVPSYLKANLFSNIMKEPLFWSSPQEAIKNAYCSTNKYILENTKQLGPGGSTAVTAIVVDGKDMWIANVGDSRAVVCERGSAKQLTVDHEPHETNERQRIEKHGGFVTTFPGDVPRVNGQLAVARAFGDQSLKAHLSSEPDISHVPINSSIEFVILASDGLWKVMKNQEAVDLVKSIKDPQAAAKRLTTEALARKSKDDISCIVIRFRC

SEQ ID NO: 11844 - protein, 314 aa, Zea mays subsp. mays
  peptide (1)..(314): Ceres Seq. ID no. 12343901
MERQTASSSASCSPAAAATTSSSSCGGKKRPDILNMIRNASCLNSSSADTGKGRSKLSTNKVTHGFHLVEGKSGHDMEDYHVAEYKYVKNHELGLFAIFDGHLGDKVPSYLKANLFSNIMKEPLFWSSPQEAIKNAYCSTNKYILENTKQLGPGGSTAVTAIVVDGKDMWIANVGDSRAVVCERGSAKQLTVDHEPHETNERQRIEKHGGFVTTFPGDVPRVNGQLAVARAFGDQSLKAHLSSEPDISHVPINSSIEFVILASDGLWKVMKNQEAVDLVKSIKDPQAAAKRLTTEALARKSKDDISCIVIRFRC

SEQ ID NO: 11845 - protein, 279 aa, Zea mays subsp. mays
  peptide (1)..(279): Ceres Seq. ID no. 12343902
MIRNASCLNSSSADTGKGRSKLSTNKVTHGFHLVEGKSGHDMEDYHVAEYKYVKNHELGLFAIFDGHLGDKVPSYLKANLFSNIMKEPLFWSSPQEAIKNAYCSTNKYILENTKQLGPGGSTAVTAIVVDGKDMWIANVGDSRAVVCERGSAKQLTVDHEPHETNERQRIEKHGGFVTTFPGDVPRVNGQLAVARAFGDQSLKAHLSSEPDISHVPINSSIEFVILASDGLWKVMKNQEAVDLVKSIKDPQAAAKRLTTEALARKSKDDISCIVIRFRC

SEQ ID NO: 11846 - DNA, 1164 bp, Zea mays subsp. mays
  misc_feature (1)..(1164): Ceres Seq. ID no. 12411745
  misc_feature (1)..(1164): Ortholog of  Ceres SEQ ID NO 13596131 as cited in SEQ ID NO 67838
tcatttcttaaatttaagatttagagagttgtttagagaactattgaagttgctcttagaggcccttgttgtcttgttgaagagttgaagacaccgcagttccggaaacttctgtagcagctgaaatagtacggacgtgtttgaacatgtacaggatctcgaggccacatctgtaaaacgaccacccctcacgcggaagcggagactggaaatcgggagggagaccggtagacgagaccgccggagatggagccgagatctgcaatctacagatccggcgccttccttctcctcgccgccatccttgcggaggtcgtcatccctgcatccgccatcggagacaagtgcgccgcctgcaaggccgttgctgcggagctagagattggaatttcgagtgagaagccgagaaatcacttggacttgcgcaaccgcttaaattctaaaggccagagggaggggaaggtcattgattatagggtcagtgagcttcgggttgtggaacttctggatggcctatgcgataagatgcaagattataccttaaagaagttggaatcaggcgaaaagggatgggttaaagtaacagactggaatagctttcaaactgaaaataaggcagcagcaagagctcactccaaaaaattgtccaccttctgtggaaggctactggaggaaacggaggatgagctctctgagtggatcaaaacaacctccacagaatcagaatatgtaagcaaggccctttgtgaagatattagcaaacactgccgatctacaagtgctaccatccagattgatgatgagctatgacatgccgggggcaggtcgttgtttcgcaaaaagcaaaacaggcgacaggttggaaaatgttaaagaacacagctctagtagtccctgacaccatttagagagacatgcagctgccaattctgattgtttgtgttgcactcatatttcctgtaaacaaaagcttagactgatctgtagagaaagcaactggacatcaatttttgcataccgatgaactacagtttaaaacggccggttgaattatcatgtcaggggctataggaaatttgaatgcttctattctaaggtcttgttgttgagtactgagtatagtttgatgactgcatgttggtcaatgacagcatcaaagattac

SEQ ID NO: 11847 - protein, 187 aa, Zea mays subsp. mays
  peptide (1)..(187): Ceres Seq. ID no. 12411746
MEPRSAIYRSGAFLLLAAILAEVVIPASAIGDKCAACKAVAAELEIGISSEKPRNHLDLRNRLNSKGQREGKVIDYRVSELRVVELLDGLCDKMQDYTLKKLESGEKGWVKVTDWNSFQTENKAAARAHSKKLSTFCGRLLEETEDELSEWIKTTSTESEYVSKALCEDISKHCRSTSATIQIDDEL

SEQ ID NO: 11848 - protein, 94 aa, Zea mays subsp. mays
  peptide (1)..(94): Ceres Seq. ID no. 12411747
MQDYTLKKLESGEKGWVKVTDWNSFQTENKAAARAHSKKLSTFCGRLLEETEDELSEWIKTTSTESEYVSKALCEDISKHCRSTSATIQIDDEL

SEQ ID NO: 11849 - DNA, 1085 bp, Zea mays subsp. mays
  misc_feature (1)..(1085): Ceres Seq. ID no. 12340630
  misc_feature (1)..(1085): Ortholog of  Ceres SEQ ID NO 12781196 as cited in SEQ ID NO 61049
aactctctctctctctctctctatctgtctgcccgtggcgtgctccactgattcttcttcttcttctacctcccggcctcctcccccttcttctttgcctgccttattagtatctcgcctcacaccacacagctagcagacagccagacacgcgctgctttctgatctctccccggatcggaggctcctcccaacataccaccctgccagccgcgccgccacgtccacgccggccggccaccaagcaagcatggatatggtttcgcagtccgagcacctgtgctacgtccgctgcacctactgcaacaccgtgctcgcggttggggttccatgcaagaggctgatggacacggtgactgtcaagtgcggccactgcaacaacctctcctacctcagtccacggccccccatggtgcagccgctctcgccgactgatcaccctttggggccattccagtgtcagggaccctgcaacgactgcaggaggaaccaaccgctgccgctggcttcgccgtcatcaactgagctaagcccgagaatgcccttcgtagtcaagcccccggagaagaaacaccgcctcccatctgcttataatcgcttcatgagggaggagattcagcgcatcaaagctgcgaagccagatatccctcacagggaggccttcagcatggctgccaagaattgggcaaagtgtgacccgcgctgctcgacggctgcctctaccgaaacttctaacagcgctcctgctgagcctagagttgtgcccactccccagttaactgagccacgctttgacctggaggatagggccaaggggcaagtcattgagagcttcgacatcttcaagcatattgagcgcagcatctagaggtcgttcgatgccgctgttgtagcccagtatcgatcgagtaccatcagctatatgtataacctatcccgtatcgccgtcgtcgcctcgcaatcatgcatccccatcctgtacttttacccccgtacgtgttactgttgctgttattctcgttatggttggattgtacgcaccatttaattatgaacagctgctacctatatatataatatttgcc

SEQ ID NO: 11850 - protein, 205 aa, Zea mays subsp. mays
  peptide (1)..(205): Ceres Seq. ID no. 12340631
MDMVSQSEHLCYVRCTYCNTVLAVGVPCKRLMDTVTVKCGHCNNLSYLSPRPPMVQPLSPTDHPLGPFQCQGPCNDCRRNQPLPLASPSSTELSPRMPFVVKPPEKKHRLPSAYNRFMREEIQRIKAAKPDIPHREAFSMAAKNWAKCDPRCSTAASTETSNSAPAEPRVVPTPQLTEPRFDLEDRAKGQVIESFDIFKHIERSI

SEQ ID NO: 11851 - protein, 203 aa, Zea mays subsp. mays
  peptide (1)..(203): Ceres Seq. ID no. 12340632
MVSQSEHLCYVRCTYCNTVLAVGVPCKRLMDTVTVKCGHCNNLSYLSPRPPMVQPLSPTDHPLGPFQCQGPCNDCRRNQPLPLASPSSTELSPRMPFVVKPPEKKHRLPSAYNRFMREEIQRIKAAKPDIPHREAFSMAAKNWAKCDPRCSTAASTETSNSAPAEPRVVPTPQLTEPRFDLEDRAKGQVIESFDIFKHIERSI

SEQ ID NO: 11852 - protein, 174 aa, Zea mays subsp. mays
  peptide (1)..(174): Ceres Seq. ID no. 12340633
MDTVTVKCGHCNNLSYLSPRPPMVQPLSPTDHPLGPFQCQGPCNDCRRNQPLPLASPSSTELSPRMPFVVKPPEKKHRLPSAYNRFMREEIQRIKAAKPDIPHREAFSMAAKNWAKCDPRCSTAASTETSNSAPAEPRVVPTPQLTEPRFDLEDRAKGQVIESFDIFKHIERSI

SEQ ID NO: 11853 - DNA, 832 bp, Zea mays subsp. mays; identical to SEQ ID NO: 4008
  misc_feature (1)..(832): Ceres Seq. ID no. 12366950
  misc_feature (1)..(832): Ortholog of  Ceres SEQ ID NO 13587131 as cited in SEQ ID NO 331
  misc_feature (1)..(832): Ortholog of  Ceres SEQ ID NO 13661176 as cited in SEQ ID NO 61114

SEQ ID NO: 11854 - protein, 161 aa, Zea mays subsp. mays; identical to SEQ ID NO: 1700
  peptide (1)..(161): Ceres Seq. ID no. 12366951

SEQ ID NO: 11855 - protein, 106 aa, Zea mays subsp. mays; identical to SEQ ID NO: 1701
  peptide (1)..(106): Ceres Seq. ID no. 12366952

SEQ ID NO: 11856 - DNA, 834 bp, Zea mays subsp. mays
  misc_feature (1)..(834): Ceres Seq. ID no. 12341141
  misc_feature (1)..(834): Ortholog of  Ceres SEQ ID NO 13590650 as cited in SEQ ID NO 61042
  misc_feature (1)..(834): Ortholog of  Ceres SEQ ID NO 13596897 as cited in SEQ ID NO 63160
ataacattataacccacgcaactccggggtccgggttctggctcgccaaaccctagccgccgagtgccgcccaccgcccgcccgccctccgccgcgcgtcggacggtgccgagggaagaggcaccatgaggttggagaagtgctggttctgctcctctaccatctaccccggccatggaatccagttcgtccgcaacgacgccaaggtcttccgcttttgccggtcaaagtgccataaaaacttcaagatgaagaggaaccctcgtaaggttaagtggacaaaagcatacaggcatttgcatggcaaggacatgacccaggatacaacctttgagtttgagaggaagaggaacaggcccgagcgctacgaccgcaatttgacggagcagactctgaaggctatcccgcttattgcaaagattaggcatgaccgtatgggaaaacacatctcaaacagacataaacctggtaaacgcaaggagatggaaaaggactccaaggagctggagcaggacatcggcatgctcccgaagaagcttattatcaaccatctcgcggctgagaaaacgaaggtcaaggttgaagttgttcagcagcagacagaagataacgctatggaagagtagtgcgtggcattttgtgtgcttgtgttttcatgtctgatgcagatccttttgtatttgcgtaagaagctatgtagttgatgaaagatgtttatttgatatatatattaatggatggattcgtggactgagtatcagcaagtttgttgttctggaatgtaagcttgctctgcttatgctataattgtcttgtcaggaaagtctcaatcct

SEQ ID NO: 11857 - protein, 166 aa, Zea mays subsp. mays
  peptide (1)..(166): Ceres Seq. ID no. 12341142
MRLEKCWFCSSTIYPGHGIQFVRNDAKVFRFCRSKCHKNFKMKRNPRKVKWTKAYRHLHGKDMTQDTTFEFERKRNRPERYDRNLTEQTLKAIPLIAKIRHDRMGKHISNRHKPGKRKEMEKDSKELEQDIGMLPKKLIINHLAAEKTKVKVEVVQQQTEDNAMEE

SEQ ID NO: 11858 - protein, 125 aa, Zea mays subsp. mays
  peptide (1)..(125): Ceres Seq. ID no. 12341143
MKRNPRKVKWTKAYRHLHGKDMTQDTTFEFERKRNRPERYDRNLTEQTLKAIPLIAKIRHDRMGKHISNRHKPGKRKEMEKDSKELEQDIGMLPKKLIINHLAAEKTKVKVEVVQQQTEDNAMEE

SEQ ID NO: 11859 - protein, 104 aa, Zea mays subsp. mays
  peptide (1)..(104): Ceres Seq. ID no. 12341144
MTQDTTFEFERKRNRPERYDRNLTEQTLKAIPLIAKIRHDRMGKHISNRHKPGKRKEMEKDSKELEQDIGMLPKKLIINHLAAEKTKVKVEVVQQQTEDNAMEE

SEQ ID NO: 11860 - DNA, 811 bp, Zea mays subsp. mays
  misc_feature (1)..(811): Ceres Seq. ID no. 12383720
  misc_feature (1)..(811): Ortholog of  Ceres SEQ ID NO 15227150 as cited in SEQ ID NO 59837
gcacgagaccattacctagaacatcctaatcaaaaaaaaccctaggccgccgccgccagtcctcactcctcaccatttcccaaaccctacccgtacccccgccgccgccgccaccgccatgccgcccaagctcgacccgtcgcaggtggtggaggtcttcgtccgggtgacgggcggcgaggtcggcgcggcgtcgtccctggcgcccaagatcggcccgctcgggctctccccgaagaagatcggcgaggacatcgccaaggagacggccaaggactggaagggcctgcgcgtcaccgtcaagctcaccgtccagaaccgccaggccaaggtctccgtcgtcccctccgccgccgcgctcgtcatcaaggcgctcaaggagcccgagagggaccggaagaaggtcaagaacatcaagcacagcggcaacatcggcctcgacgacgtcgtcgagatcgccaggaccatgaggaacaggtccatggccaaggagttggccggcaccgtcaaggagatcctcggcacctgcgtcagcgtcgggtgcaccgtcgacggcaaggaccccaaggacctgcagcaggagattgatgacggagaggtcgagatcccgtccgcttgaagactagccatccaaggggacttccattggtgctgctgaagtgttgttgttctgcatgctatcgatgtacctttttcaagcaacgcgagccatctattttttttgtctagctatgttagtgatatcttgtgagagacctcaatgttaccatcgtatctttgtctttgttggatggagagatttaagcacctc

SEQ ID NO: 11861 - protein, 166 aa, Zea mays subsp. mays
  peptide (1)..(166): Ceres Seq. ID no. 12383721
MPPKLDPSQVVEVFVRVTGGEVGAASSLAPKIGPLGLSPKKIGEDIAKETAKDWKGLRVTVKLTVQNRQAKVSVVPSAAALVIKALKEPERDRKKVKNIKHSGNIGLDDVVEIARTMRNRSMAKELAGTVKEILGTCVSVGCTVDGKDPKDLQQEIDDGEVEIPSA

SEQ ID NO: 11862 - DNA, 761 bp, Zea mays subsp. mays
  misc_feature (1)..(761): Ceres Seq. ID no. 12402751
  misc_feature (1)..(761): Ortholog of  Ceres SEQ ID NO 13595067 as cited in SEQ ID NO 55857
  misc_feature (1)..(761): Ortholog of  Ceres SEQ ID NO 12635516 as cited in SEQ ID NO 0
  misc_feature (1)..(761): Ortholog of  Ceres SEQ ID NO 15179376 as cited in SEQ ID NO 0
aatccgcagtccatacagtgacccccacgaggtcaagaacctgtacgaggagaggaaagaacctggaagagaggagcttgaggagatggcgagcgccgagggcgagaggtgggtgggactggcgacggacttctcgcaggggagccgagaggcgctgcagtgggcggcgaccaacctgctccgcgccggcgaccacctgctgctgctgcacgtcatcaaggagcccgactacgagccagagcgaggccatcctctgggaatccaccggctccccgttgattcccctctcggagttctctgaccctattatcgcgaagaaatatggagcaaaacccgacatggaaaccttggacctcctgaacactacagctacccagaaggaaattatggtggttgtgaaagtcctgtggggagatccgcgtgagaagctctgtcaagttatccatgacaccccgttgagctgcttggttataggaagcaggggccttggcaaactcaagagggtgctcttaggaagtgtcagcgattacgtcgtgaacaacgcaacctgccctgtcaccgttgtcaagtcatcaagcaccgaaggttgatctcatcaccaaaatgcctgaatattgctgttgttataataaaagatggttggcctcatgaagaacatgcactagtttctagctacctgaaacatgttgaaccgggcaatcctattgtaataatagacaaagtgccttatgaagggcatggttatgtaataggtctgttcc

SEQ ID NO: 11863 - protein, 195 aa, Zea mays subsp. mays
  peptide (1)..(195): Ceres Seq. ID no. 12402752
SAVHTVTPTRSRTCTRRGKNLEERSLRRWRAPRARGGWDWRRTSRRGAERRCSGRRPTCSAPATTCCCCTSSRSPTTSQSEAILWESTGSPLIPLSEFSDPIIAKKYGAKPDMETLDLLNTTATQKEIMVVVKVLWGDPREKLCQVIHDTPLSCLVIGSRGLGKLKRVLLGSVSDYVVNNATCPVTVVKSSSTEG

SEQ ID NO: 11864 - protein, 99 aa, Zea mays subsp. mays
  peptide (1)..(99): Ceres Seq. ID no. 12402753
IRSPYSDPHEVKNLYEERKEPGREELEEMASAEGERWVGLATDFSQGSREALQWAATNLLRAGDHLLLLHVIKEPDYEPERGHPLGIHRLPVDSPLGVL

SEQ ID NO: 11865 - DNA, 1669 bp, Zea mays subsp. mays
  misc_feature (1)..(1669): Ceres Seq. ID no. 12411741
  misc_feature (1)..(1669): Ortholog of  Ceres SEQ ID NO 14307370 as cited in SEQ ID NO 54127
  misc_feature (1)..(1669): Ortholog of  Ceres SEQ ID NO 13596338 as cited in SEQ ID NO 68005
  misc_feature (1)..(1669): Ortholog of  Ceres SEQ ID NO 14302128 as cited in SEQ ID NO 0
agtagtcactgcctattcttggccatacggcttcccccacaccccaacacaaacaagagaaaaaacaaaaactagacgaaagagggaagaaaccaagaaattggcgaatccctggcgctccccactttcaactcccatccgcttgccgttgccgcgtttgtttatcgagccaatttgatcagggcgccacaccgaaccctagttcttgatttaatcacgggttatgtggtcatgccggccgggtcaccccgttcttcttctcttccacgagttcaggaggtagagtgagagagaaaatggaacgacaggggatggaaggcaacaatcttctgcattttcttgataccccgagcgcccattacagaaggacatgcgacggatttgaggcccaacacggcggcgatgaacactctgagacatcagatactgatccggctaatgcaagggaaatgctggaatatttgttgaaccaaccagcaaacaaaatctgtgcagactgtggctctccagatccaaaatgggtggccctgccttttggcacattcatctgcattaagtgctctggaactcatagaagtcttggtgtgcacatatcaaaggtgatttcagtgaatctggatgagtggacagatgatgaagtcaactgtttagctgaatcaggcggaaattctgttgtgaactcaagatatgaagcctttttacccgaaaacaaaaagctaaaacaagattgctcaacggaggagcgtaatgattttatcaggaaaaaataccagtttcaacagtttgtgtgtgatccacaattttcatgccctttaccacttaacagaaagcatgcaccaccagataaaaatcaccagcagcataatagcagcaagtatggttttggccatacttttaggaatagctggagaaaaaaggattcagatagcaaaagcctaaagaaaatgtcggatgtgggaatgatagaatttgttggattagtaaaggtcaatatcgtaaaaggcacagatttagctgttcgtgatgtgatgtcgagcgatccgtatgtcttgattcatctagggcaccagtccatgaaaacaaaggtgataaagaacacactgaatcctatctggaatgaaagactaatgctttcgatccctgacccaattccgcctcttaagctgcaagtatttgacaaggacacattcagctccgatgaccggatgggggaggccgaggtggacatccggccgctgattgcagcaacgaaggagcacgagaactcgaccatcaccgaatcgacagaactctacagatggtcagccagcgaagacagcaacggtgtgctcgccaaggacagcgtcatctctgttgcgagtggaaaggtcaagcaggagatcacactcaggctccagaatgtcgagcgcggtgaggtcgagatcgagatcgagtgtgtgccgctcagccagtagcagtcccatcgtgagcaggactggaagcagaaagagggaaggaatacatcatgctccattgttgtgacaaggacgctgctttgcaatgcagaaagacctcagcttcacttgtttgattgctccatgcctgtaattcgcgtgcatgtgtgagatgtgtaatgtgttgtacggtagataggcaaagggaaattatctacttatattactttgatgtt

SEQ ID NO: 11866 - protein, 385 aa, Zea mays subsp. mays
  peptide (1)..(385): Ceres Seq. ID no. 12411742
MERQGMEGNNLLHFLDTPSAHYRRTCDGFEAQHGGDEHSETSDTDPANAREMLEYLLNQPANKICADCGSPDPKWVALPFGTFICIKCSGTHRSLGVHISKVISVNLDEWTDDEVNCLAESGGNSVVNSRYEAFLPENKKLKQDCSTEERNDFIRKKYQFQQFVCDPQFSCPLPLNRKHAPPDKNHQQHNSSKYGFGHTFRNSWRKKDSDSKSLKKMSDVGMIEFVGLVKVNIVKGTDLAVRDVMSSDPYVLIHLGHQSMKTKVIKNTLNPIWNERLMLSIPDPIPPLKLQVFDKDTFSSDDRMGEAEVDIRPLIAATKEHENSTITESTELYRWSASEDSNGVLAKDSVISVASGKVKQEITLRLQNVERGEVEIEIECVPLSQ

SEQ ID NO: 11867 - protein, 380 aa, Zea mays subsp. mays
  peptide (1)..(380): Ceres Seq. ID no. 12411743
MEGNNLLHFLDTPSAHYRRTCDGFEAQHGGDEHSETSDTDPANAREMLEYLLNQPANKICADCGSPDPKWVALPFGTFICIKCSGTHRSLGVHISKVISVNLDEWTDDEVNCLAESGGNSVVNSRYEAFLPENKKLKQDCSTEERNDFIRKKYQFQQFVCDPQFSCPLPLNRKHAPPDKNHQQHNSSKYGFGHTFRNSWRKKDSDSKSLKKMSDVGMIEFVGLVKVNIVKGTDLAVRDVMSSDPYVLIHLGHQSMKTKVIKNTLNPIWNERLMLSIPDPIPPLKLQVFDKDTFSSDDRMGEAEVDIRPLIAATKEHENSTITESTELYRWSASEDSNGVLAKDSVISVASGKVKQEITLRLQNVERGEVEIEIECVPLSQ

SEQ ID NO: 11868 - protein, 334 aa, Zea mays subsp. mays
  peptide (1)..(334): Ceres Seq. ID no. 12411744
MLEYLLNQPANKICADCGSPDPKWVALPFGTFICIKCSGTHRSLGVHISKVISVNLDEWTDDEVNCLAESGGNSVVNSRYEAFLPENKKLKQDCSTEERNDFIRKKYQFQQFVCDPQFSCPLPLNRKHAPPDKNHQQHNSSKYGFGHTFRNSWRKKDSDSKSLKKMSDVGMIEFVGLVKVNIVKGTDLAVRDVMSSDPYVLIHLGHQSMKTKVIKNTLNPIWNERLMLSIPDPIPPLKLQVFDKDTFSSDDRMGEAEVDIRPLIAATKEHENSTITESTELYRWSASEDSNGVLAKDSVISVASGKVKQEITLRLQNVERGEVEIEIECVPLSQ

SEQ ID NO: 11869 - DNA, 1509 bp, Zea mays subsp. mays
  misc_feature (1)..(1509): Ceres Seq. ID no. 12435069
  misc_feature (1)..(1509): Ortholog of  Ceres SEQ ID NO 13597805 as cited in SEQ ID NO 64186
agaactctgcaagtccgcatcaattcgcactcccagcttcctttaccttcgcaacaagcaagccggtagcagcaagctagatcgcggggaagcgactcgcctccaccatcggcgctgctccggcgcggagaagcgtcctctcgcggcggctgggaagaccagtctccgccagtcccggcgactgcttccgtgaggtgcccttggctcctgggcgacgggctcgtggcggccggcgagatgaacagccatgcggccggaacaagcaacgggggacccggggatgcggccgctgggggcgcagccaggaggaacaccaggatgcccaagtattccaagttcacacagcaggagttgccagcttgcaagccgattcttactccaaaatgggttgtctctgttttcttcatcgtcggggtcatctttgttcccattggtgttgttttcactgctagctgcgagagatgttgttgagattattgatcggtatgatgaggcatgtgtgccagggcaacatgactgagaacaagcttgcttacatccagaatgacaccttatccaaagagtgcataaggaatcttacggttacaaaggatatgaagcagcctatttttgtgtattatgaacttggtaacttctaccagaaccataggaggtatgtaaagagccgaaacgatgcacagctaagagatgctagtaaagctaaccagacatccgcttgtgaacctgagaagaccacagctaatgggcaaccaattgttccttgcggcctcattgcttggagcttgtttaatgatacatataatttcactcgtggtaatgagaacttgacagtggacaagaaagatatttcctggaagagcgatagggaacataaatttggtaaagatgtctatccgagcaacttccagaatggcgcacttaaaggtggagcaacacttgacccaaagatcccgttgagtgagcaagaggatctcatcgtttggatgcggactgcagcacttcctacattcagaaagttatatgggagaatatacattgacctcaaggagaatgacacaataacagtgacattgaataacaactacaatacatatagcttcggtggcaagaaaaagctggtcctctccactgcaacttggcttggggggaagaacgattttcttggctttgcataccttatagttggcgggctctgcattttcctggcatttgcattcaccttgctgtacttcgtaaaaccaaggaaactgggagaccacaactacttatcctggaacagacgccatgcaggacgctaagatgttttggaaccccaagtgtcctaactacttaagtgcaacttgtatgaaatgaaatgccctgaaccagaaatctcgttgggcagactggatcagactagaacttcatgtacattttttttacaaagggtctaggtggctacgtgattttgtttcttgtgttctatagagctgcatgtagcagtgattatgagaatacatattgatctcg

SEQ ID NO: 11870 - protein, 278 aa, Zea mays subsp. mays
  peptide (1)..(278): Ceres Seq. ID no. 12435070
MLLRLLIGMMRHVCQGNMTENKLAYIQNDTLSKECIRNLTVTKDMKQPIFVYYELGNFYQNHRRYVKSRNDAQLRDASKANQTSACEPEKTTANGQPIVPCGLIAWSLFNDTYNFTRGNENLTVDKKDISWKSDREHKFGKDVYPSNFQNGALKGGATLDPKIPLSEQEDLIVWMRTAALPTFRKLYGRIYIDLKENDTITVTLNNNYNTYSFGGKKKLVLSTATWLGGKNDFLGFAYLIVGGLCIFLAFAFTLLYFVKPRKLGDHNYLSWNRRHAGR

SEQ ID NO: 11871 - protein, 270 aa, Zea mays subsp. mays
  peptide (1)..(270): Ceres Seq. ID no. 12435071
MMRHVCQGNMTENKLAYIQNDTLSKECIRNLTVTKDMKQPIFVYYELGNFYQNHRRYVKSRNDAQLRDASKANQTSACEPEKTTANGQPIVPCGLIAWSLFNDTYNFTRGNENLTVDKKDISWKSDREHKFGKDVYPSNFQNGALKGGATLDPKIPLSEQEDLIVWMRTAALPTFRKLYGRIYIDLKENDTITVTLNNNYNTYSFGGKKKLVLSTATWLGGKNDFLGFAYLIVGGLCIFLAFAFTLLYFVKPRKLGDHNYLSWNRRHAGR

SEQ ID NO: 11872 - protein, 269 aa, Zea mays subsp. mays
  peptide (1)..(269): Ceres Seq. ID no. 12435072
MRHVCQGNMTENKLAYIQNDTLSKECIRNLTVTKDMKQPIFVYYELGNFYQNHRRYVKSRNDAQLRDASKANQTSACEPEKTTANGQPIVPCGLIAWSLFNDTYNFTRGNENLTVDKKDISWKSDREHKFGKDVYPSNFQNGALKGGATLDPKIPLSEQEDLIVWMRTAALPTFRKLYGRIYIDLKENDTITVTLNNNYNTYSFGGKKKLVLSTATWLGGKNDFLGFAYLIVGGLCIFLAFAFTLLYFVKPRKLGDHNYLSWNRRHAGR

SEQ ID NO: 11873 - DNA, 796 bp, Zea mays subsp. mays; identical to SEQ ID NO: 7882
  misc_feature (1)..(796): Ceres Seq. ID no. 12595084
  misc_feature (1)..(796): Ortholog of  Ceres SEQ ID NO 12606011 as cited in SEQ ID NO 20354

SEQ ID NO: 11874 - protein, 140 aa, Zea mays subsp. mays; identical to SEQ ID NO: 7883
  peptide (1)..(140): Ceres Seq. ID no. 12595085

SEQ ID NO: 11875 - protein, 128 aa, Zea mays subsp. mays; identical to SEQ ID NO: 7884
  peptide (1)..(128): Ceres Seq. ID no. 12595086

SEQ ID NO: 11876 - protein, 87 aa, Zea mays subsp. mays; identical to SEQ ID NO: 7885
  peptide (1)..(87): Ceres Seq. ID no. 12595087

SEQ ID NO: 11877 - DNA, 1803 bp, Zea mays subsp. mays
  misc_feature (1)..(1803): Ceres Seq. ID no. 12345120
  misc_feature (1)..(1803): Ortholog of  Ceres SEQ ID NO 15174513 as cited in SEQ ID NO 58979
  misc_feature (1)..(1803): Ortholog of  Ceres SEQ ID NO 13584616 as cited in SEQ ID NO 65234
  misc_feature (1)..(1803): Ortholog of  Ceres SEQ ID NO 15178939 as cited in SEQ ID NO 0
aatctcgataggggtgcgcgaggacgaggagaaaaaacagaggaggaaaaaatatcaccttctcttcctgcattcccctgctcgatccccggcgaggaattcgcccccgaatccatcgatttgctcagtccagtccgccgatccgtggatcgattcgtgcgtgggctctgtcctccccggggttccgatctggtcctcgcctcgccggaggaggagctggaggagatgaacggcaccgggggcagccaccaccagcagcagcacaggctccggcagcagcagcagcagcaggcgctcctgatgcagcaggcgctgcagcagcagcagcagcaacatcagtaccagtccggcgtcctcgccgccgcggcagccgcggccatgacccagatggaacctatttccaatggcaatcttccacctggctttgatccttccacttgtcgcagtgtgtatgttggaaacgtgaaccctaatgtcacggagagccttttgattgaagttttccagagtgctggccttgtggaaagatgcaagctcatacggaaagagaagtcatcctttgggtttgtggactactatgatagaaggtctgctgctctagcaatcatgacccttcatggccgtcacatatatggacaagcaatcaaggtgaactgggcatacgcaagtacacagagggaggatacgtcggggcatttccatatttttgttggtgatttaagttctgaagtgaatgatgcaactctttatgcctgtttctcagcatatccttcttgttctgatgctcgagtcatgtgggacaacaaaactggacgttccaggggttatggttttgtctccttccgtaatcaacaggaagctgaaactgctataactgaaatgactggaaaatggcttggaagcagacaaataaggtgcaattgggcaacaaagaccaattcagaagagaaaccagaaactgacaatcataatgcagttgtactaacaaatggtagctccaccaattcagcaacagatgcaagccaggatgcaggaagtaaagagaacccagagaacaatcctgattgtactactgtatatgttggcaaccttggacatgaggttaatcgggatgagcttcaccgccacttctataacttgggggtcggggcaatcgaggaaatccgtgttcaacaggataaggggtttggatttgtgagatatagcacccatggggaagcagcattagctattcagatggccaatggattggtagtccgtgggaaatcaattaagtgctcatggggaaacaagccaactccacctggcaccacctccaagcccctaccccctccagttgcttcataccagcctgctgtagcaatgtcaggtgtcccacaaggtttcacagcagccgaacttcttgcttaccagaggcagcttgccttaagccaggctgcagcagggcagattgctggccagcatggtctcgcgggtcaggtttctgcaggtcttcttgctgctgctggttctcaggccctctacgatggctacccgaaccagtcatcagcccagcagcttatgtactacaactagagttcaagaggacggcgttggccatcgtcgccctgttttttattttgtggttcatgtactatttgtgtgagagttcttgatctcttgtcgccgcggaattgtgttactatcttattactgtaccattgaccatttttcttgtgagattcatttgagtagtcactttaacagagtaagagatgtattctatgtgacttcgcgattgattaatgtaatgctcccctgtgc

SEQ ID NO: 11878 - protein, 524 aa, Zea mays subsp. mays
  peptide (1)..(524): Ceres Seq. ID no. 12345121
NLDRGARGRGEKTEEEKISPSLPAFPCSIPGEEFAPESIDLLSPVRRSVDRFVRGLCPPRGSDLVLASPEEELEEMNGTGGSHHQQQHRLRQQQQQQALLMQQALQQQQQQHQYQSGVLAAAAAAAMTQMEPISNGNLPPGFDPSTCRSVYVGNVNPNVTESLLIEVFQSAGLVERCKLIRKEKSSFGFVDYYDRRSAALAIMTLHGRHIYGQAIKVNWAYASTQREDTSGHFHIFVGDLSSEVNDATLYACFSAYPSCSDARVMWDNKTGRSRGYGFVSFRNQQEAETAITEMTGKWLGSRQIRCNWATKTNSEEKPETDNHNAVVLTNGSSTNSATDASQDAGSKENPENNPDCTTVYVGNLGHEVNRDELHRHFYNLGVGAIEEIRVQQDKGFGFVRYSTHGEAALAIQMANGLVVRGKSIKCSWGNKPTPPGTTSKPLPPPVASYQPAVAMSGVPQGFTAAELLAYQRQLALSQAAAGQIAGQHGLAGQVSAGLLAAAGSQALYDGYPNQSSAQQLMYYN

SEQ ID NO: 11879 - protein, 449 aa, Zea mays subsp. mays
  peptide (1)..(449): Ceres Seq. ID no. 12345122
MNGTGGSHHQQQHRLRQQQQQQALLMQQALQQQQQQHQYQSGVLAAAAAAAMTQMEPISNGNLPPGFDPSTCRSVYVGNVNPNVTESLLIEVFQSAGLVERCKLIRKEKSSFGFVDYYDRRSAALAIMTLHGRHIYGQAIKVNWAYASTQREDTSGHFHIFVGDLSSEVNDATLYACFSAYPSCSDARVMWDNKTGRSRGYGFVSFRNQQEAETAITEMTGKWLGSRQIRCNWATKTNSEEKPETDNHNAVVLTNGSSTNSATDASQDAGSKENPENNPDCTTVYVGNLGHEVNRDELHRHFYNLGVGAIEEIRVQQDKGFGFVRYSTHGEAALAIQMANGLVVRGKSIKCSWGNKPTPPGTTSKPLPPPVASYQPAVAMSGVPQGFTAAELLAYQRQLALSQAAAGQIAGQHGLAGQVSAGLLAAAGSQALYDGYPNQSSAQQLMYYN

SEQ ID NO: 11880 - protein, 424 aa, Zea mays subsp. mays
  peptide (1)..(424): Ceres Seq. ID no. 12345123
MQQALQQQQQQHQYQSGVLAAAAAAAMTQMEPISNGNLPPGFDPSTCRSVYVGNVNPNVTESLLIEVFQSAGLVERCKLIRKEKSSFGFVDYYDRRSAALAIMTLHGRHIYGQAIKVNWAYASTQREDTSGHFHIFVGDLSSEVNDATLYACFSAYPSCSDARVMWDNKTGRSRGYGFVSFRNQQEAETAITEMTGKWLGSRQIRCNWATKTNSEEKPETDNHNAVVLTNGSSTNSATDASQDAGSKENPENNPDCTTVYVGNLGHEVNRDELHRHFYNLGVGAIEEIRVQQDKGFGFVRYSTHGEAALAIQMANGLVVRGKSIKCSWGNKPTPPGTTSKPLPPPVASYQPAVAMSGVPQGFTAAELLAYQRQLALSQAAAGQIAGQHGLAGQVSAGLLAAAGSQALYDGYPNQSSAQQLMYYN

SEQ ID NO: 11881 - DNA, 1703 bp, Zea mays subsp. mays
  misc_feature (1)..(1703): Ceres Seq. ID no. 12343304
  misc_feature (1)..(1703): Ortholog of  Ceres SEQ ID NO 13597796 as cited in SEQ ID NO 64283
  misc_feature (1)..(1703): Ortholog of  Ceres SEQ ID NO 14303608 as cited in SEQ ID NO 68902
  misc_feature (1)..(1703): Ortholog of  Ceres SEQ ID NO 14303249 as cited in SEQ ID NO 0
  misc_feature (1)..(1703): Ortholog of  Ceres SEQ ID NO 14309629 as cited in SEQ ID NO 0
gcgtttagagagagagaagacagggagaaggaggaagagccgccgcggtggaccgggtgatttggcgtttccttgtcctcggcagggttgtcaggggattcgtcaggacacgggcaagctttgtacgctaccaattcagcgaataaccgacgggggtgcgtggaattgctcaccggagcaaaccctccgccgccgaaccaccatccgctgtgagcgaataaccggcatccccagggcgccgtcgatcccggtcggccatctcccggtgcctggtaactgatcgttaatttcatcgatgggtgccatggaggaccgcagctccaagcaggcaggcgcgggcttggtggcccacctccacgacgacctccttgtggagatcctctcccgcgtccccgccaagtccatctgccggttcaagtgcgtgtccaaggcctggctcgacctcattgccggtcccgaccaccgtaagaagctccgccaacccatgcagggactcatctacatgaatccagagaaggaccgccacagcttcagcttcctggacctgccactgacagtaggatccgtgcctcaggacgttgtcgaccctgcaggcttcatctccttcctgacggaacagcctgagatccatcgcctcgtcttactggattcctgcaatggtctgatcctattccagcaccttatggagctgccgcactacaacagtttgggctatgtcgtgtgcaacccgaccacgaagcaatggcgagccgtgcccgagcccgactgcagctcccatgtaccaatgaactacacatatttggcttttgatccgactgtatcctcccacttccacttggtccggttcaaaaagaatcgcgagtacatggagcccatgtcggtgcatgcttactcgtctaaaactgggatatggacctatagccaaactgagaaagaagaagaagaatggcagaatcaggtctacttatctataagtaatcgatgcgcctttgttaatggcttcctgcatttgctagtttggggctcgaacaaaatgcagatactcatcgtagatgtacaaggacgtccaagaaggatgatcagactgccagacgcggctgctggtaattgtgagggatgctactgtgtttactttggccaatcccaggggcatctgcactgcattactaaacaattattcgacttcaacgaagagaaatacgagctgtccatctgggctcttcaggattacgaagcacaagagtgggtgctgaaggacactgtgagctccctccagctctttggaggaaattgccccacaagtgtcgcattggagttgtacagcgaggtggccagcatgcatctggatcgcaatgtggtcttcttcttttcacactgtgaacgtagattcatagcatatgacatggacagcaaggaagtgagtgttttcagcagttccaaagctatacacaggtggaaggttggttgctatgttccttgtttctcaccggcgcctctcaaataagcactacaagcaattagtgcgtggtctaatacaagtatgagctgctagcaacttagttagactgtaataaggtcaagtgaagtatttcgtccatgagtgtttggtctaattagttccgcaagcctgttgaggcatttatatatatatgtagtctatatttatggatgctagttaaattaatggatacgttgtatgattt

SEQ ID NO: 11882 - protein, 402 aa, Zea mays subsp. mays
  peptide (1)..(402): Ceres Seq. ID no. 12343305
MGAMEDRSSKQAGAGLVAHLHDDLLVEILSRVPAKSICRFKCVSKAWLDLIAGPDHRKKLRQPMQGLIYMNPEKDRHSFSFLDLPLTVGSVPQDVVDPAGFISFLTEQPEIHRLVLLDSCNGLILFQHLMELPHYNSLGYVVCNPTTKQWRAVPEPDCSSHVPMNYTYLAFDPTVSSHFHLVRFKKNREYMEPMSVHAYSSKTGIWTYSQTEKEEEEWQNQVYLSISNRCAFVNGFLHLLVWGSNKMQILIVDVQGRPRRMIRLPDAAAGNCEGCYCVYFGQSQGHLHCITKQLFDFNEEKYELSIWALQDYEAQEWVLKDTVSSLQLFGGNCPTSVALELYSEVASMHLDRNVVFFFSHCERRFIAYDMDSKEVSVFSSSKAIHRWKVGCYVPCFSPAPLK

SEQ ID NO: 11883 - protein, 399 aa, Zea mays subsp. mays
  peptide (1)..(399): Ceres Seq. ID no. 12343306
MEDRSSKQAGAGLVAHLHDDLLVEILSRVPAKSICRFKCVSKAWLDLIAGPDHRKKLRQPMQGLIYMNPEKDRHSFSFLDLPLTVGSVPQDVVDPAGFISFLTEQPEIHRLVLLDSCNGLILFQHLMELPHYNSLGYVVCNPTTKQWRAVPEPDCSSHVPMNYTYLAFDPTVSSHFHLVRFKKNREYMEPMSVHAYSSKTGIWTYSQTEKEEEEWQNQVYLSISNRCAFVNGFLHLLVWGSNKMQILIVDVQGRPRRMIRLPDAAAGNCEGCYCVYFGQSQGHLHCITKQLFDFNEEKYELSIWALQDYEAQEWVLKDTVSSLQLFGGNCPTSVALELYSEVASMHLDRNVVFFFSHCERRFIAYDMDSKEVSVFSSSKAIHRWKVGCYVPCFSPAPLK

SEQ ID NO: 11884 - protein, 339 aa, Zea mays subsp. mays
  peptide (1)..(339): Ceres Seq. ID no. 12343307
MQGLIYMNPEKDRHSFSFLDLPLTVGSVPQDVVDPAGFISFLTEQPEIHRLVLLDSCNGLILFQHLMELPHYNSLGYVVCNPTTKQWRAVPEPDCSSHVPMNYTYLAFDPTVSSHFHLVRFKKNREYMEPMSVHAYSSKTGIWTYSQTEKEEEEWQNQVYLSISNRCAFVNGFLHLLVWGSNKMQILIVDVQGRPRRMIRLPDAAAGNCEGCYCVYFGQSQGHLHCITKQLFDFNEEKYELSIWALQDYEAQEWVLKDTVSSLQLFGGNCPTSVALELYSEVASMHLDRNVVFFFSHCERRFIAYDMDSKEVSVFSSSKAIHRWKVGCYVPCFSPAPLK

SEQ ID NO: 11885 - DNA, 1751 bp, Zea mays subsp. mays
  misc_feature (1)..(1751): Ceres Seq. ID no. 12345721
  misc_feature (1)..(1751): Ortholog of  Ceres SEQ ID NO 15176922 as cited in SEQ ID NO 55251
tccccttctggtcgaatcgttattatcagtgggctagaacatactaatgcgagtgctgtgctgctaaatctaatctgcgtgcgattggtcgatgggcaggttcggtggagatcgccgccgttggcgtttcgatcgccatatttaaccaagtctccaaggtctgcatctaccctctcgttagcgtcacaacgtcgttcgtcgcggaggaagacgcgatcatcagtaaggccgtccgaggaaacagcagccaggaggaggacgtggagaaagcctcccacgtgggctttgatccggagaccagcaatctgcatgcatctggccctgcaggtatggcagaatgcgtgaactcgtgtatccctacggagtgcgcagcagatccctctggcaggcaagggcggtgcgagaagaggtacgtgccgtcggtcacgtcggcgctaatagtcggttccattctcggcctgcttcaggccgtcttcctggtcctttcggccagattcgtgctcaacatcatgggtgttaagtccggatccccgatgcaagggcctgcggtgcgctacctaacgataaggtcccttggtgcccccgctgtgctgctgtctctggccatgcaaggggttttccgggggttcaaggacaccaagacaccgttatacgctactgtggttggcgacgcggcgaacatcatactggacccgattttgatgtttgtttgccatatgggcgtcactggtgcggctattgctcatgttgtttctcagtacatgataacgttgatactgctgtgccggctcgtccagcgagttcacgttatcccacccagcattaaatctctgaaatttgggaggtttcttggatgtggattcctgctgctcgcaagggttgtcgcggtgacgttctgcgtcacgctggcggcgtccctggccgctcgccatggacccaccgtcatggcaggcttccagatctgctgccagctctggctggccacgtctcttctcgccgatggattggccgtggcaggacaggcggtgcttgcaagcgcgttcgccaagaacgacagtaagaaggtcgctgccgcgacatcccgtgtgttgcagctgagcattgtcctgggcatgggtctcaccgtcgtgctgggacttgctatgaggttcggggctggcattttcacaagcgacgtgcccgtgatccaagtcattcacagaggcatcccgtttgtcgccgggacgcagaccatcaattccctggccttcgtgtttgatggcatcaactttgcagcgtcagactacagatactctgcttactccatggttgctgttgcgtctgtgtcgataccatgcctgctgtacctttctgcgcataacggattcatcggtatatggatcgcattgacgatctacatgagtctgaggaccatagctagcacctggaggatgggggcagcgaggggaccatggacgtttctccggaactgatgatggattggcttggaactgatgatctgcggcacactgctgacagataaggctgcgccgcgctgcgcatgcgcctctcatgtagcatcagcgaagtatagtacgtgttctgctggtgtttaaagcttcggatatcggaggtagatgtagctatgggactatcccctcctgatcgtctgacttgtggccttgcgtggagagtttacgttgctccgttgatttatgttgtatcatgccaggatgtcagtttaataccatacatcggtaaagtgtctctct

SEQ ID NO: 11886 - protein, 380 aa, Zea mays subsp. mays
  peptide (1)..(380): Ceres Seq. ID no. 12345722
MAECVNSCIPTECAADPSGRQGRCEKRYVPSVTSALIVGSILGLLQAVFLVLSARFVLNIMGVKSGSPMQGPAVRYLTIRSLGAPAVLLSLAMQGVFRGFKDTKTPLYATVVGDAANIILDPILMFVCHMGVTGAAIAHVVSQYMITLILLCRLVQRVHVIPPSIKSLKFGRFLGCGFLLLARVVAVTFCVTLAASLAARHGPTVMAGFQICCQLWLATSLLADGLAVAGQAVLASAFAKNDSKKVAAATSRVLQLSIVLGMGLTVVLGLAMRFGAGIFTSDVPVIQVIHRGIPFVAGTQTINSLAFVFDGINFAASDYRYSAYSMVAVASVSIPCLLYLSAHNGFIGIWIALTIYMSLRTIASTWRMGAARGPWTFLRN

SEQ ID NO: 11887 - protein, 320 aa, Zea mays subsp. mays
  peptide (1)..(320): Ceres Seq. ID no. 12345723
MGVKSGSPMQGPAVRYLTIRSLGAPAVLLSLAMQGVFRGFKDTKTPLYATVVGDAANIILDPILMFVCHMGVTGAAIAHVVSQYMITLILLCRLVQRVHVIPPSIKSLKFGRFLGCGFLLLARVVAVTFCVTLAASLAARHGPTVMAGFQICCQLWLATSLLADGLAVAGQAVLASAFAKNDSKKVAAATSRVLQLSIVLGMGLTVVLGLAMRFGAGIFTSDVPVIQVIHRGIPFVAGTQTINSLAFVFDGINFAASDYRYSAYSMVAVASVSIPCLLYLSAHNGFIGIWIALTIYMSLRTIASTWRMGAARGPWTFLRN

SEQ ID NO: 11888 - protein, 312 aa, Zea mays subsp. mays
  peptide (1)..(312): Ceres Seq. ID no. 12345724
MQGPAVRYLTIRSLGAPAVLLSLAMQGVFRGFKDTKTPLYATVVGDAANIILDPILMFVCHMGVTGAAIAHVVSQYMITLILLCRLVQRVHVIPPSIKSLKFGRFLGCGFLLLARVVAVTFCVTLAASLAARHGPTVMAGFQICCQLWLATSLLADGLAVAGQAVLASAFAKNDSKKVAAATSRVLQLSIVLGMGLTVVLGLAMRFGAGIFTSDVPVIQVIHRGIPFVAGTQTINSLAFVFDGINFAASDYRYSAYSMVAVASVSIPCLLYLSAHNGFIGIWIALTIYMSLRTIASTWRMGAARGPWTFLRN

SEQ ID NO: 11889 - DNA, 1389 bp, Zea mays subsp. mays
  misc_feature (1)..(1389): Ceres Seq. ID no. 12411729
  misc_feature (1)..(1389): Ortholog of  Ceres SEQ ID NO 13638292 as cited in SEQ ID NO 57738
acctcttaattaccctttcggtaccgcgatgccctaactcggtgcttttgcagcagccactcgctccacaagtacgcgccgctggactggtccgcctacttcgacgaggagcgccgcgtacgcatccccgacaccgacaacgttttcaatgcgtacacgaccggatcggaggggcccgtcgtgttctgcctgcacggaggcggttattcggggctttcatttgctctagcagcaagtcaaatgaaggacaaggctcgtgttgttgccatggatctaagggggcatggaaaatcaacaacgaatgatgatctggatttgtccattgaaactcttaccaatgatgtcatagctgttatacgtacaatgtatggagatttgccaccagcaattatacttgttgggcatagcatgggcggttcagtggctatacatgtggctgcaagaaaagaaattagaaatcttcatgggcttgttgtcgttgatgttgtcgagggaacagcaatggcttcattagttcatatgcagaagatcttagcaaaccgggcacagcattttcctagcattgaaaaagcaattgaatggagtgtcaaaggtgggccattaaggaacatcgagtctgctcgtgtgtccattccatctaccctgaaatacgatgaatcacgagaatgctatacatatcgcactcctcttgagcaaacagaaaagtactggaaaggatggtatgaaggtctttcagacaagttcctatcttgcccagtgcaaaagatcctgttgttagctggtaccgacagactggacagttggtttacaatttgcagagctttaacaatcggtcaaatgcaaggaaaatttcaaatggtggtgattcggcacactggacatgctatacaggaagatgtacctgaagaatttgcatcgcacatactgaagttcatatcccgcaacaaaatagggcctaacggtgttgagatacctgggctcattaaaaaatggcagcagtagacataatgtacaagttaccgttctggaaaatgttcaggaaaatgatgagtaggtctgcctatccgagttctcttcatatcgaattaaaaaaaggttcaagatgatcatgcgatcgttaacaatcagtcattggtttcgtcatctgttggcaactctcccatgtcgcttgagttgctttgtttctgacatcactctgcgacctgccggcgtcttttgtacgagggttcttgtatgtttttaggtagagctgagtgcagtgcgttgtaatgctttccgtgaggttattatactgctatcaagcaggatcagctcgttatgacagctctgtttcgaatttctgctggcctcggcaagtttgatgggaataaatcgaagaagccttctttg

SEQ ID NO: 11890 - protein, 253 aa, Zea mays subsp. mays
  peptide (1)..(253): Ceres Seq. ID no. 12411730
MKDKARVVAMDLRGHGKSTTNDDLDLSIETLTNDVIAVIRTMYGDLPPAIILVGHSMGGSVAIHVAARKEIRNLHGLVVVDVVEGTAMASLVHMQKILANRAQHFPSIEKAIEWSVKGGPLRNIESARVSIPSTLKYDESRECYTYRTPLEQTEKYWKGWYEGLSDKFLSCPVQKILLLAGTDRLDSWFTICRALTIGQMQGKFQMVVIRHTGHAIQEDVPEEFASHILKFISRNKIGPNGVEIPGLIKKWQQ

SEQ ID NO: 11891 - protein, 244 aa, Zea mays subsp. mays
  peptide (1)..(244): Ceres Seq. ID no. 12411731
MDLRGHGKSTTNDDLDLSIETLTNDVIAVIRTMYGDLPPAIILVGHSMGGSVAIHVAARKEIRNLHGLVVVDVVEGTAMASLVHMQKILANRAQHFPSIEKAIEWSVKGGPLRNIESARVSIPSTLKYDESRECYTYRTPLEQTEKYWKGWYEGLSDKFLSCPVQKILLLAGTDRLDSWFTICRALTIGQMQGKFQMVVIRHTGHAIQEDVPEEFASHILKFISRNKIGPNGVEIPGLIKKWQQ

SEQ ID NO: 11892 - protein, 212 aa, Zea mays subsp. mays
  peptide (1)..(212): Ceres Seq. ID no. 12411732
MYGDLPPAIILVGHSMGGSVAIHVAARKEIRNLHGLVVVDVVEGTAMASLVHMQKILANRAQHFPSIEKAIEWSVKGGPLRNIESARVSIPSTLKYDESRECYTYRTPLEQTEKYWKGWYEGLSDKFLSCPVQKILLLAGTDRLDSWFTICRALTIGQMQGKFQMVVIRHTGHAIQEDVPEEFASHILKFISRNKIGPNGVEIPGLIKKWQQ

SEQ ID NO: 11893 - DNA, 677 bp, Zea mays subsp. mays
  misc_feature (1)..(677): Ceres Seq. ID no. 12341262
  misc_feature (1)..(677): Ortholog of  Ceres SEQ ID NO 15179764 as cited in SEQ ID NO 69028
acgaacggtggaagagtacgcctcggaatcagaggagcagcgaggaagctgaaggaggggcgaatctaagcccaattgaagcatgagggcgtcgattaatcgtcccccgacgccgagcgcggaggaggatcgggacaagcagccttctctcggagagatcattaacatcaagttggtagagactggggagaaggagaagctaatggagctactccgcgagcgactcgctgagtgcggctggagggatgagatgaaggcactctgcagggcctatgcaaggaagaaaggaagaaataatgtgacagtagatgacctcattcatgttattactccgaaaggaagagcatccgtgcctgattcagtgaaggcagaactcctgcaacgcatccggtccttccttatgtctaccacacttcggtagtcatttgtcgcgacggttggagcctatatgtaccattgtaggatcattgggaagtcgatcttgttggggaccaaaggtgcaggaaagcagtgcgtaggggaatattgtgagcatgaaaagaaacagtgtgatcttcatgacactgtcgacatgttcctcgtcaggcgcaggcggttggcgtaatttcaggtgtaccaatagagttgtaagttgtaacccctgaatactgtattgttaaagcaaccttccaccttgt

SEQ ID NO: 11894 - protein, 112 aa, Zea mays subsp. mays
  peptide (1)..(112): Ceres Seq. ID no. 12341263
MRASINRPPTPSAEEDRDKQPSLGEIINIKLVETGEKEKLMELLRERLAECGWRDEMKALCRAYARKKGRNNVTVDDLIHVITPKGRASVPDSVKAELLQRIRSFLMSTTLR

SEQ ID NO: 11895 - protein, 72 aa, Zea mays subsp. mays
  peptide (1)..(72): Ceres Seq. ID no. 12341264
MELLRERLAECGWRDEMKALCRAYARKKGRNNVTVDDLIHVITPKGRASVPDSVKAELLQRIRSFLMSTTLR

SEQ ID NO: 11896 - protein, 56 aa, Zea mays subsp. mays
  peptide (1)..(56): Ceres Seq. ID no. 12341265
MKALCRAYARKKGRNNVTVDDLIHVITPKGRASVPDSVKAELLQRIRSFLMSTTLR

SEQ ID NO: 11897 - DNA, 1251 bp, Zea mays subsp. mays
  misc_feature (1)..(1251): Ceres Seq. ID no. 12403165
  misc_feature (1)..(1251): Ortholog of  Ceres SEQ ID NO 14302154 as cited in SEQ ID NO 0
gagatttggattgtcacgtaattcgtttccctgtcctccccctctcgctgagctgagcccacctactccctcccaccacttgcattcacacactcgattccgctgctctctccctcttcctctcccccgcggcggagccataaaccctaggcctcgccgtcgtcggaggcgccgccgcgatgtcgcactttggaaggacgggtccgccggacatccgcgacaccttctcgctgctcgtcctcaacatcagcttccgaaccacggccgacgaccttttcccgctcttcgagcgctgcggcaaggtcgtcgacgtcttcatcccgagggaccgcaggaccggggactcgaggggttttgcgttcgtgcggtacaagtacgccgacgaggcgcagaaggctatagatcggctcgatggccgtaatgtggatgggaggaacatcatggtgcagtttgcaaagtacggccccaatgctgtgccaatccacaaaggaagggtcaaagagggggttgagaaatcaagagacaggtcaaggagccgtagtccaaggccaaggcacagagacagagatgatagaaggcgaagtcgcagcaggagcaggagcaggagcagagaaagacatgtccatgatagagatagggactatcgtcgtcggagcagaagtagaagccgaagtatgagttcaagccctgaccacaaaagtcatcgcagagcaagagatgatgttaagcgcaagagcagaagcaagagtagaagcaagagcaggagcaggagtagaagccgctcataccacagttcttcacctgcccggcgcagtgctagccctcccaagagcccactgccacagaggagccccactcctgaaaagcatgccaatggaaaagattcacctctgtcacgcagtgtatctccatcaccgaagcgtgcaagctcccgcagcctaggcagcgatagcaaggaataaagcttgttgatctggtgatgcttaaagagcagtcttcccatgggattgcagaacgttgagaaggctgtttgaatatgatggcagtaccaatctgcaatcaaccgctatccaaggttgctagttgttcttttaatgacttctagaattgtgttttccagttgtcaaaatatgctgttggtttgtatttcgacctctattgtctttttatacccttgtactgcatcatctactttatgtgcatccgtttcttgactccatattaatttgttaaaacatttgtgcattttct

SEQ ID NO: 11898 - protein, 260 aa, Zea mays subsp. mays
  peptide (1)..(260): Ceres Seq. ID no. 12403166
MSHFGRTGPPDIRDTFSLLVLNISFRTTADDLFPLFERCGKVVDVFIPRDRRTGDSRGFAFVRYKYADEAQKAIDRLDGRNVDGRNIMVQFAKYGPNAVPIHKGRVKEGVEKSRDRSRSRSPRPRHRDRDDRRRSRSRSRSRSRERHVHDRDRDYRRRSRSRSRSMSSSPDHKSHRRARDDVKRKSRSKSRSKSRSRSRSRSYHSSSPARRSASPPKSPLPQRSPTPEKHANGKDSPLSRSVSPSPKRASSRSLGSDSKE

SEQ ID NO: 11899 - protein, 173 aa, Zea mays subsp. mays
  peptide (1)..(173): Ceres Seq. ID no. 12403167
MVQFAKYGPNAVPIHKGRVKEGVEKSRDRSRSRSPRPRHRDRDDRRRSRSRSRSRSRERHVHDRDRDYRRRSRSRSRSMSSSPDHKSHRRARDDVKRKSRSKSRSKSRSRSRSRSYHSSSPARRSASPPKSPLPQRSPTPEKHANGKDSPLSRSVSPSPKRASSRSLGSDSKE

SEQ ID NO: 11900 - protein, 139 aa, Zea mays subsp. mays
  peptide (1)..(139): Ceres Seq. ID no. 12403168
RFGLSRNSFPCPPPLAELSPPTPSHHLHSHTRFRCSLPLPLPRGGAINPRPRRRRRRRRDVALWKDGSAGHPRHLLAARPQHQLPNHGRRPFPALRALRQGRRRLHPEGPQDRGLEGFCVRAVQVRRRGAEGYRSARWP

SEQ ID NO: 11901 - DNA, 935 bp, Zea mays subsp. mays
  misc_feature (1)..(935): Ceres Seq. ID no. 12402277
  misc_feature (1)..(935): Ortholog of  Ceres SEQ ID NO 13638595 as cited in SEQ ID NO 52050
  misc_feature (1)..(935): Ortholog of  Ceres SEQ ID NO 14301870 as cited in SEQ ID NO 61501
  misc_feature (1)..(935): Ortholog of  Ceres SEQ ID NO 12583993 as cited in SEQ ID NO 68098
aagctcactcaagaacccgccacgaccaaacagtacgtagtgcgcgtcgagctagcccggcaggtagacatggcgcccagcaaggccgtggtggcacacctcgtggtgctattagtgccctgcttgctctccgtgctgcccttctcctccctcgctctgacccaggacttatgcgtcgcgaacatgctcctcccagatacgccgtccggctacccgtgcaagcccaaaggtctcgtcagctccgacgacttctactccgacgccttggccaggcctggcccggtcatcgcccccttcaacaccagcctggcctccgccgccgttaaacagctccccggcctgaatggcctcggcatcgccgccacgcgtgtcgatgtccaaccaggtggggtcgtgcccatgcacaaccacccggaagcctcggagctcatcttcctcctcgaaggaacccttttcgctggcttcatcagcgccgaaaccaataaggcctatgtcaagagcctaaagaagggcgacctctacgtgttcccgcagggcttgctgcacttccagttcaacaccggcaacacgaccgccaccgccatcgccgcgtacagcaaccagaaccccggcctacagatcgctgtctatgcactcttcggcaacaccctcacagtggaaacggtgaataagaccaccttcgtaacaaaggaggaggtcatgaggctcaaggacctcttcggccagtcttcagtgccatcctgattaacgctcgccaggattaattaatatgcatgctcctagatgtacgtttatatatggggtgtaataataaattgcgtgtgtgtgcacgtacgttcaacctatatcgtcatcgtcatgtagtatatatttctcgactatatatattgtaccctcgggaaggaccgatgtttaaggcatcagtggctctattt

SEQ ID NO: 11902 - protein, 247 aa, Zea mays subsp. mays
  peptide (1)..(247): Ceres Seq. ID no. 12402278
KLTQEPATTKQYVVRVELARQVDMAPSKAVVAHLVVLLVPCLLSVLPFSSLALTQDLCVANMLLPDTPSGYPCKPKGLVSSDDFYSDALARPGPVIAPFNTSLASAAVKQLPGLNGLGIAATRVDVQPGGVVPMHNHPEASELIFLLEGTLFAGFISAETNKAYVKSLKKGDLYVFPQGLLHFQFNTGNTTATAIAAYSNQNPGLQIAVYALFGNTLTVETVNKTTFVTKEEVMRLKDLFGQSSVPS

SEQ ID NO: 11903 - protein, 224 aa, Zea mays subsp. mays
  peptide (1)..(224): Ceres Seq. ID no. 12402279
MAPSKAVVAHLVVLLVPCLLSVLPFSSLALTQDLCVANMLLPDTPSGYPCKPKGLVSSDDFYSDALARPGPVIAPFNTSLASAAVKQLPGLNGLGIAATRVDVQPGGVVPMHNHPEASELIFLLEGTLFAGFISAETNKAYVKSLKKGDLYVFPQGLLHFQFNTGNTTATAIAAYSNQNPGLQIAVYALFGNTLTVETVNKTTFVTKEEVMRLKDLFGQSSVPS

SEQ ID NO: 11904 - protein, 186 aa, Zea mays subsp. mays
  peptide (1)..(186): Ceres Seq. ID no. 12402280
MLLPDTPSGYPCKPKGLVSSDDFYSDALARPGPVIAPFNTSLASAAVKQLPGLNGLGIAATRVDVQPGGVVPMHNHPEASELIFLLEGTLFAGFISAETNKAYVKSLKKGDLYVFPQGLLHFQFNTGNTTATAIAAYSNQNPGLQIAVYALFGNTLTVETVNKTTFVTKEEVMRLKDLFGQSSVPS

SEQ ID NO: 11905 - DNA, 802 bp, Zea mays subsp. mays
  misc_feature (1)..(802): Ceres Seq. ID no. 12404643
  misc_feature (1)..(802): Ortholog of  Ceres SEQ ID NO 13493393 as cited in SEQ ID NO 53713
acagggactgtgagatcaagtcaatagctccatatggtgcttttgttgaaattgctccagggcgtgagggtttatgtcatatcagtgagttaagttcgggctggttggccaaggctgaggatgcttttaaagttggagatcgcatagacgtcaagcttattgagataaacgataagggtcaacttcggctaagttctcgagctttgcttccagacgtggattccgaatccaacataggttcaacaaaagaaaaggtgccacaaaaagatgatgtcataaaaatgacaacaaagagaccaaggcgcaagaaacagtctgagccgtctggagctgaaaatgccacaacaaaggctcttgcgaaaagcgctgctgctccagctggttcaaagggcagtgaagcgtagtaggatgtggacagcttggtgccttaatcagacgattgactggccaagctagggatacatccttcaaccgactatatgatggtcataggcatgagaaagagttcagacatgagggcacaactgtctaaacaggaatataatggagaagaattggttgatcgacctcgatgttagacaggtagagtgtctggttgatgcgttacacaaggcgtgcgcctatccagcagtaatggtgcccaggactggatcgtcgccctggttagcagaacagatcgcgtaaccaccatggaaacttgattgtaatcgccagaatagtttgtttacctttacctttgtgttgtaccgttctgtactaactacatattcttgccaatccggccaatgcaaactactgcgtg

SEQ ID NO: 11906 - protein, 133 aa, Zea mays subsp. mays
  peptide (1)..(133): Ceres Seq. ID no. 12404644
RDCEIKSIAPYGAFVEIAPGREGLCHISELSSGWLAKAEDAFKVGDRIDVKLIEINDKGQLRLSSRALLPDVDSESNIGSTKEKVPQKDDVIKMTTKRPRRKKQSEPSGAENATTKALAKSAAAPAGSKGSEA

SEQ ID NO: 11907 - DNA, 1314 bp, Zea mays subsp. mays
  misc_feature (1)..(1314): Ceres Seq. ID no. 12341153
  misc_feature (1)..(1314): Ortholog of  Ceres SEQ ID NO 14310460 as cited in SEQ ID NO 55105
  misc_feature (1)..(1314): Ortholog of  Ceres SEQ ID NO 13597740 as cited in SEQ ID NO 64482
  misc_feature (1)..(1314): Ortholog of  Ceres SEQ ID NO 13596056 as cited in SEQ ID NO 68307
  misc_feature (1)..(1314): Ortholog of  Ceres SEQ ID NO 12388689 as cited in SEQ ID NO 0
atcaagtctcatgtgcacgcctccattagcctcgcattgacgcggtccgcaactcctctaaacccttcctctccctccggcgccggcgccgacatggccgtccactacctcctccgccgcggggtctccggtggctcactgctccaccctatccgcggtctcttcctcgcctccaaggagcttgggaggcgtccgttgggctctgcggcggcgggagacgcagcggccgagctgaggggcgcgcgggaggacgtcaggcagctgctcaaggccacctcctgccatcccatcctggttcgattaggttggcatgatgctggtacatatgacaagaacattaccgagtggcccaagtgtggtggagctaatggtagcttgagattcgaagtcgagttgaagcatggggccaatgctggtcttgtgaatgctctgaagctgatccaacctatcaaggacaagttttcaggtgttacctatgcagatctgtttcagcttgccagcgccacagccattgaggaagcaggtggccccaaaattcctatgatctatggaagggttgatgttattgcccccgaacaatgcccaccagaggggaggcttcctgctgctggcccaccttcacccgcggaacatttgcgtgaagtattctacagaatgggcctgaacgacaaggaaatcgttgcactgtcaggagctcatacacttggacgtgcaagaccagagcgtagtggctggggtaaatcagaaacaaagtacactaaagatgggcctggtgcacctgggggacaatcttggacatctcaatggctcaagtttgacaacagctatttcaaggcatcgaagaaaggcgagatgaagacctcctagttctgcctactgatgctgtgctgtttgaggattcctcattcaagatctatgctacaaaatatgccaaggatcaggacacatttttcgaggactacgctgaagctcatgccaaattgagcaatcttggggcaaagtttgacccgccaaagggtatctcactcgagtagttgtggatggaggtgactgaacaggaaggggtcatgtttctttgcgtgaccattttcgaaggttggcaaggaaaagttattgtagttgaatgatagctccacaaattggattcaccgattaaaggattttttttcttagcgtgccctgtttttttagtagtgtcctacactatgaataaagcaacacctgtcattttaagatttgttacactaactaactgaaagcttccgaatcctaagtggtttcggtgattaatgacgacataagaccgttataact

SEQ ID NO: 11908 - protein, 288 aa, Zea mays subsp. mays
  peptide (1)..(288): Ceres Seq. ID no. 12341154
IKSHVHASISLALTRSATPLNPSSPSGAGADMAVHYLLRRGVSGGSLLHPIRGLFLASKELGRRPLGSAAAGDAAAELRGAREDVRQLLKATSCHPILVRLGWHDAGTYDKNITEWPKCGGANGSLRFEVELKHGANAGLVNALKLIQPIKDKFSGVTYADLFQLASATAIEEAGGPKIPMIYGRVDVIAPEQCPPEGRLPAAGPPSPAEHLREVFYRMGLNDKEIVALSGAHTLGRARPERSGWGKSETKYTKDGPGAPGGQSWTSQWLKFDNSYFKASKKGEMKTS

SEQ ID NO: 11909 - protein, 257 aa, Zea mays subsp. mays
  peptide (1)..(257): Ceres Seq. ID no. 12341155
MAVHYLLRRGVSGGSLLHPIRGLFLASKELGRRPLGSAAAGDAAAELRGAREDVRQLLKATSCHPILVRLGWHDAGTYDKNITEWPKCGGANGSLRFEVELKHGANAGLVNALKLIQPIKDKFSGVTYADLFQLASATAIEEAGGPKIPMIYGRVDVIAPEQCPPEGRLPAAGPPSPAEHLREVFYRMGLNDKEIVALSGAHTLGRARPERSGWGKSETKYTKDGPGAPGGQSWTSQWLKFDNSYFKASKKGEMKTS

SEQ ID NO: 11910 - DNA, 1377 bp, Zea mays subsp. mays
  misc_feature (1)..(1377): Ceres Seq. ID no. 12435077
  misc_feature (1)..(1377): Ortholog of  Ceres SEQ ID NO 13595542 as cited in SEQ ID NO 59862
aacttcaaaggcataggagtaacagtcttcgcacaaatattccctcccccaaggcccgaagccccgaaactttccggatctttcttccgccgcttcatcttctttgcgcaaaactagttttgtttctcgttcttctcttcgatttcggccgaataaagatggcgtcggctgcgcgcctcctcgcgccgttctccaggcgcggcgtcgtctctgtggctctggcgggggtggagaggcggcggccggaggcggcgtcgctcatgggggcgcctgtgctggctacggtggaagcctgcgcttcgatcaaggtcattcctttgtcgaatcagctggctcgatactcgacaactgcatttcagaggtttgggttttcaacttcagccccccaacaagatgataaggagacaaacaagcacacagatgatggggttaatagaagtgttggagcaagtactggagcttcaagtgaagccaataatgtgcctggaaccgagaaggcacaggaagcagattcagaagacctagacctatcaaaggaggaccttgtgaagctgcttcttgagaaagacgaatcattgaagtctaaagatgaagagtttaaagatatgaaggataaggtcctacgcagctatgctgagatggagaatgtccttgccagaacaaagcgtgagtcagagaacaccaagaagtatgccatacagagcttctccaagagcttgttagatgttgcagacaatttgtctcgggcatcatctgttgtcaaggcaagtttctcaaagatagattcatctaacgattctgatgaagctgtaacactactgaaaaccctactagagggtgttgagatgactgagaagcaacttggagaggtcttcaagaagtttggagttgaaaagtttgatcctttgaatgagaagtttgatccaaataggcactatgccattttccaaattcctgatccttcaaaaccatcaggaactgttgctgctgttgtgaaggttggctacatgttacatgatcgtgttcttcgccccgctgaagttggtgtcactgaaggtggtccaactgaagaagagccagaggagtaatctagatcaaacggaggttgctggctgcacgtatatctatgactactgccctttattggttggataagcatacatatcataggttatgtttttaactagatctgtgaggcaaatcactatttttgtagcatgttcaacgaggcaatttgttcaagctagtccagaactctcctttttcttgctcggtaataaaaacgagattgtagaacatgtacatcaccgaaattgcttgccaaagacggattattgcagcctgcattaataggaatactgacaatgagcgtgccgc

SEQ ID NO: 11911 - protein, 361 aa, Zea mays subsp. mays
  peptide (1)..(361): Ceres Seq. ID no. 12435078
LQRHRSNSLRTNIPSPKARSPETFRIFLPPLHLLCAKLVLFLVLLFDFGRIKMASAARLLAPFSRRGVVSVALAGVERRRPEAASLMGAPVLATVEACASIKVIPLSNQLARYSTTAFQRFGFSTSAPQQDDKETNKHTDDGVNRSVGASTGASSEANNVPGTEKAQEADSEDLDLSKEDLVKLLLEKDESLKSKDEEFKDMKDKVLRSYAEMENVLARTKRESENTKKYAIQSFSKSLLDVADNLSRASSVVKASFSKIDSSNDSDEAVTLLKTLLEGVEMTEKQLGEVFKKFGVEKFDPLNEKFDPNRHYAIFQIPDPSKPSGTVAAVVKVGYMLHDRVLRPAEVGVTEGGPTEEEPEE

SEQ ID NO: 11912 - protein, 309 aa, Zea mays subsp. mays
  peptide (1)..(309): Ceres Seq. ID no. 12435079
MASAARLLAPFSRRGVVSVALAGVERRRPEAASLMGAPVLATVEACASIKVIPLSNQLARYSTTAFQRFGFSTSAPQQDDKETNKHTDDGVNRSVGASTGASSEANNVPGTEKAQEADSEDLDLSKEDLVKLLLEKDESLKSKDEEFKDMKDKVLRSYAEMENVLARTKRESENTKKYAIQSFSKSLLDVADNLSRASSVVKASFSKIDSSNDSDEAVTLLKTLLEGVEMTEKQLGEVFKKFGVEKFDPLNEKFDPNRHYAIFQIPDPSKPSGTVAAVVKVGYMLHDRVLRPAEVGVTEGGPTEEEPEE

SEQ ID NO: 11913 - protein, 275 aa, Zea mays subsp. mays
  peptide (1)..(275): Ceres Seq. ID no. 12435080
MGAPVLATVEACASIKVIPLSNQLARYSTTAFQRFGFSTSAPQQDDKETNKHTDDGVNRSVGASTGASSEANNVPGTEKAQEADSEDLDLSKEDLVKLLLEKDESLKSKDEEFKDMKDKVLRSYAEMENVLARTKRESENTKKYAIQSFSKSLLDVADNLSRASSVVKASFSKIDSSNDSDEAVTLLKTLLEGVEMTEKQLGEVFKKFGVEKFDPLNEKFDPNRHYAIFQIPDPSKPSGTVAAVVKVGYMLHDRVLRPAEVGVTEGGPTEEEPEE

SEQ ID NO: 11914 - DNA, 1288 bp, Zea mays subsp. mays
  misc_feature (1)..(1288): Ceres Seq. ID no. 12351736
  misc_feature (1)..(1288): Ortholog of  Ceres SEQ ID NO 12583469 as cited in SEQ ID NO 51031
  misc_feature (1)..(1288): Ortholog of  Ceres SEQ ID NO 13595998 as cited in SEQ ID NO 68161
acacacacccacacaccccgcttcacgttctcaataatggcgccgttcccacgtcgtcttccggccgccgtgccacttctcctcctcctcggcgccgcagtggccagcgccggcgcggaggacaccgatggcggcaactcccgccggcggcactcccgcttgctgttcgcgttcggcaactcgctcaccgacacgggaaacggggccatcttcccggtgactgcaggcgggccattcacccggccgccgtacggggagaccttcttcggtcgtcccagcggccgggcttgcaacggcaggctcgtcctcgacttcctcgtggaggagctgaaggtgccagagccgacgccgtacctggccggcagtacggccgccgactttgcgaagaacggggccaactttgcgctgggtggtgcaacggcgctcgaccaggcgttcttagcaagcaaggggataaagtcgttcgtgcccatctctctcatcaacgagacgagctggttccagaacgtttcgaagctactggacgcgtcacactacgatgagcgtaagatcatggcgaagtcgatcttctacgtcggggagatcggtgtcaacgactacttcgccgccctaagcaacaacgactccgtcgacgtcgcggtcagcctggtgccgcacatcatcgacaccatccgttcggccctgaccgtcatgatcgatgccggggcgaggacagtggtgatcacggggatgctaccgatcggctgcgagccgcagcagctggcccagttcgcaggcggccccggccggcgactacgaccctaccaccggctgcatcacgcggttcaaccagctcgccgagcaccacaaccacatgctgaggatgatgctgagggagctgcggaccaagtaccgcaggcgcaggcccctcaccctccactacgccgacatctaccgccccgtgatcgaggccgtcgcgtcccccgcctcgtacggcttcggcgacacgccgctggcagcgtgctgcgggggcggtggcggccccaacaacttcaacttcatcgccttctgcggcacgccggcgtcgaccacgtgcaccgacccgtccaagttcgtctcctgggacgggatccacttcaccgaggctaccaacaggcttctcgctcgtaaaatgcttcaggaactgctaagccgtggagcttacaatgttgcaatctgatttttctatgcccgcgagtcgtatcaacgtgtttcccatagcggatcggacctagcgtggaacctcttgtgtaataaaataataagtgtc

SEQ ID NO: 11915 - protein, 382 aa, Zea mays subsp. mays
  peptide (1)..(382): Ceres Seq. ID no. 12351737
THTHTPRFTFSIMAPFPRRLPAAVPLLLLLGAAVASAGAEDTDGGNSRRRHSRLLFAFGNSLTDTGNGAIFPVTAGGPFTRPPYGETFFGRPSGRACNGRLVLDFLVEELKVPEPTPYLAGSTAADFAKNGANFALGGATALDQAFLASKGIKSFVPISLINETSWFQNVSKLLDASHYDERKIMAKSIFYVGEIGVNDYFAALSNNDSVDVAVSLVPHIIDTIRSALTVMIDAGARTVVITGMLPIGCEPQQLAQFAGGPGRRLRPYHRLHHAVQPARRAPQPHAEDDAEGAADQVPQAQAPHPPLRRHLPPRDRGRRVPRLVRLRRHAAGSVLRGRWRPQQLQLHRLLRHAGVDHVHRPVQVRLLGRDPLHRGYQQASRS

SEQ ID NO: 11916 - protein, 370 aa, Zea mays subsp. mays
  peptide (1)..(370): Ceres Seq. ID no. 12351738
MAPFPRRLPAAVPLLLLLGAAVASAGAEDTDGGNSRRRHSRLLFAFGNSLTDTGNGAIFPVTAGGPFTRPPYGETFFGRPSGRACNGRLVLDFLVEELKVPEPTPYLAGSTAADFAKNGANFALGGATALDQAFLASKGIKSFVPISLINETSWFQNVSKLLDASHYDERKIMAKSIFYVGEIGVNDYFAALSNNDSVDVAVSLVPHIIDTIRSALTVMIDAGARTVVITGMLPIGCEPQQLAQFAGGPGRRLRPYHRLHHAVQPARRAPQPHAEDDAEGAADQVPQAQAPHPPLRRHLPPRDRGRRVPRLVRLRRHAAGSVLRGRWRPQQLQLHRLLRHAGVDHVHRPVQVRLLGRDPLHRGYQQASRS

SEQ ID NO: 11917 - protein, 198 aa, Zea mays subsp. mays
  peptide (1)..(198): Ceres Seq. ID no. 12351739
MAKSIFYVGEIGVNDYFAALSNNDSVDVAVSLVPHIIDTIRSALTVMIDAGARTVVITGMLPIGCEPQQLAQFAGGPGRRLRPYHRLHHAVQPARRAPQPHAEDDAEGAADQVPQAQAPHPPLRRHLPPRDRGRRVPRLVRLRRHAAGSVLRGRWRPQQLQLHRLLRHAGVDHVHRPVQVRLLGRDPLHRGYQQASRS

SEQ ID NO: 11918 - DNA, 1942 bp, Zea mays subsp. mays
  misc_feature (1)..(1942): Ceres Seq. ID no. 12348812
  misc_feature (1)..(1942): Ortholog of  Ceres SEQ ID NO 14313714 as cited in SEQ ID NO 54084
gcggatgatttcctctcgtctcgtctctcccatactccagtcccgtccgtcttcacctgcgttccccgggtcccgacaagccgctgtaccagtcccgcccgcctgcgcacttctcccacccccgcgccgccttcggcgccggcgagccctcccgacgctcctcgagcgatccgtccctctcgcggcccttctctcagccgcttccagcccaaggggaggagagggagaggatgtggtcgtcgagccaggcgagcacgaggggcgtcgtggagatggggagggtggaggccgggccgtcgcatttccctaagagacccgcgcctcagaactccgccagggtcaatctgtcaaggacacacacagttaaacctacctctgctggcaaccgttcaggaatttctgttaaatgcaacttggggtggtcttctcaaccatcgcctgacttgaggcatcactttagaggatactcatcagcatcagaggcagttcttacttcccaatctgatgtgagaaaactgtttgttggcaatgaaaaaatcggtgttctcttgctgaatcttgggggcccagagactcttgacgatgtgcagcctttcttgtttaatctttttgcagatccggacattatccgtcttcctaggctctttcgctttctgcagaagccacttgcaaaattcatatcggtagtgagagcaccaaaaagtaaggaaggttatgcatccataggtggcggttctcctctacgacaaattactgatgcacaggctgaagcactgagggaggcattacatgggaaagatgttcctgccaacgtgtatgttggaatgcggtattggcatcccttcactgaagaagccatagaacaaataaaacgggatggaatcacgaaacttgttgtgttgcctctataccctcagttctccatatcaactagtggttcaagtctccgtttattggagagcatattcagagaggatgagtatctcgtgaatatgcaacatacagttataccttcctggtaccaacgtgaaggatatatcaaggctatggcaactttgattgaaaacgaattgacaaaatttcaagaaccccaaaaggttatgatatttttcagtgctcatggagttcctctggcatatgttgaagaagctggtgatccatataaagcagaaatggaagagtgtatcgatcttatcatggaagaactggaaaaaagaggaataacaaatccgtgcatacttgcttatcagagccgagttggaccagtggaatggctgaaaccgtacactgatgagacaattattgagcttgggcagaaaggggtaaagagcctgcttgctgttcctattagttttgttagcgaacacattgaaactttggaagaaatcgatgtggagtacaaagagttggctttagaatctggcatcaagcactggggacgggttccagcactaggttgtgaacccacattcatttcggatcttgctgatgctgttattgaaagcctaccttatgttggggcaatggcagtttccaatcttgaggctcggcagtctctcgtacccctcgggagcgtggaggagctgctagcagcatacgactcgaagcgcgatgagctccctccacccgtaatcgtgtgggagtggggctggacaaagagcgcggagacctggaatggccgtgcggcgatgctggccgtgctggctctcctggtgctggaagtgaccaccggcgaagggttcctgcatcaatggggaatcctgcctctgttccgctgagccgacaattctgttcatgatggggtcataattttgctgcagccgaaggaagttttgaacttctgatgctgtatatgaatcaatttgccttaaatcgtcgagggggaaagaggagaaaatggtaaaatatggacagaattcgacggtatatcatgttatattgt

SEQ ID NO: 11919 - protein, 515 aa, Zea mays subsp. mays
  peptide (1)..(515): Ceres Seq. ID no. 12348813
MWSSSQASTRGVVEMGRVEAGPSHFPKRPAPQNSARVNLSRTHTVKPTSAGNRSGISVKCNLGWSSQPSPDLRHHFRGYSSASEAVLTSQSDVRKLFVGNEKIGVLLLNLGGPETLDDVQPFLFNLFADPDIIRLPRLFRFLQKPLAKFISVVRAPKSKEGYASIGGGSPLRQITDAQAEALREALHGKDVPANVYVGMRYWHPFTEEAIEQIKRDGITKLVVLPLYPQFSISTSGSSLRLLESIFREDEYLVNMQHTVIPSWYQREGYIKAMATLIENELTKFQEPQKVMIFFSAHGVPLAYVEEAGDPYKAEMEECIDLIMEELEKRGITNPCILAYQSRVGPVEWLKPYTDETIIELGQKGVKSLLAVPISFVSEHIETLEEIDVEYKELALESGIKHWGRVPALGCEPTFISDLADAVIESLPYVGAMAVSNLEARQSLVPLGSVEELLAAYDSKRDELPPPVIVWEWGWTKSAETWNGRAAMLAVLALLVLEVTTGEGFLHQWGILPLFR

SEQ ID NO: 11920 - protein, 501 aa, Zea mays subsp. mays
  peptide (1)..(501): Ceres Seq. ID no. 12348814
MGRVEAGPSHFPKRPAPQNSARVNLSRTHTVKPTSAGNRSGISVKCNLGWSSQPSPDLRHHFRGYSSASEAVLTSQSDVRKLFVGNEKIGVLLLNLGGPETLDDVQPFLFNLFADPDIIRLPRLFRFLQKPLAKFISVVRAPKSKEGYASIGGGSPLRQITDAQAEALREALHGKDVPANVYVGMRYWHPFTEEAIEQIKRDGITKLVVLPLYPQFSISTSGSSLRLLESIFREDEYLVNMQHTVIPSWYQREGYIKAMATLIENELTKFQEPQKVMIFFSAHGVPLAYVEEAGDPYKAEMEECIDLIMEELEKRGITNPCILAYQSRVGPVEWLKPYTDETIIELGQKGVKSLLAVPISFVSEHIETLEEIDVEYKELALESGIKHWGRVPALGCEPTFISDLADAVIESLPYVGAMAVSNLEARQSLVPLGSVEELLAAYDSKRDELPPPVIVWEWGWTKSAETWNGRAAMLAVLALLVLEVTTGEGFLHQWGILPLFR

SEQ ID NO: 11921 - protein, 317 aa, Zea mays subsp. mays
  peptide (1)..(317): Ceres Seq. ID no. 12348815
MRYWHPFTEEAIEQIKRDGITKLVVLPLYPQFSISTSGSSLRLLESIFREDEYLVNMQHTVIPSWYQREGYIKAMATLIENELTKFQEPQKVMIFFSAHGVPLAYVEEAGDPYKAEMEECIDLIMEELEKRGITNPCILAYQSRVGPVEWLKPYTDETIIELGQKGVKSLLAVPISFVSEHIETLEEIDVEYKELALESGIKHWGRVPALGCEPTFISDLADAVIESLPYVGAMAVSNLEARQSLVPLGSVEELLAAYDSKRDELPPPVIVWEWGWTKSAETWNGRAAMLAVLALLVLEVTTGEGFLHQWGILPLFR

SEQ ID NO: 11922 - DNA, 818 bp, Zea mays subsp. mays
  misc_feature (1)..(818): Ceres Seq. ID no. 12403859
  misc_feature (1)..(818): Ortholog of  Ceres SEQ ID NO 12612272 as cited in SEQ ID NO 55946
  misc_feature (1)..(818): Ortholog of  Ceres SEQ ID NO 15169960 as cited in SEQ ID NO 57591
ggaggattggtcctataaataacctgccacgcacaggttgctgcaacctacgccaaggagaaattgcaaacctgtcactagcgaagcatacttcgtcgagcacactcttgcaattaatccaccgagttcggtttagtagcatagcatcgacaataaatgtcgctcgtgagtcggcgcagcagcaacgtgttcgaccccttctccctcgacctctgggaccccttcgacatgttccgctccatcgtcccgtcggcggcctcctccggcggcggttccgagaccgccgccttcgccaacgcccgcgtggactggaaggagacgcccgaggcgcacgtgttcaaggccgacctccccggcatcaagaaggaggaggtcaaggtcgaggtggaggacggcaacgtgctcgtcatcagcggcaagcgcagcagggaggaggaggacaagaacgacaagtggcaccgcgtcgagcgcagcagcggccagttcatgaggcgcttccgcctgcctgagaacgccaaggtcgacgaggtgaaggctggcctcgagaacggcgtgctcacggtcaccgtgcccaagacggaggtgaagaagcccgaggtgaaggctatcgagatctctggttgaccgtccgttggacgtcgattggagctccgttgtactgctactggtccgtggatgtcctgcatgttgcactgcagcggaggatgttcgctgcgtcttctacgcatttgctctgtttgtgctgtggtcgtcttccccgtatatggtttgtgtattgtcccttatcgataataataaataaaatcaggctttacgtc

SEQ ID NO: 11923 - protein, 168 aa, Zea mays subsp. mays
  peptide (1)..(168): Ceres Seq. ID no. 12403860
RIGPINNLPRTGCCNLRQGEIANLSLAKHTSSSTLLQLIHRVRFSSIASTINVARESAQQQRVRPLLPRPLGPLRHVPLHRPVGGLLRRRFRDRRLRQRPRGLEGDARGARVQGRPPRHQEGGGQGRGGGRQRARHQRQAQQGGGGQERQVAPRRAQQRPVHEALPPA

SEQ ID NO: 11924 - protein, 155 aa, Zea mays subsp. mays
  peptide (1)..(155): Ceres Seq. ID no. 12403861
MSLVSRRSSNVFDPFSLDLWDPFDMFRSIVPSAASSGGGSETAAFANARVDWKETPEAHVFKADLPGIKKEEVKVEVEDGNVLVISGKRSREEEDKNDKWHRVERSSGQFMRRFRLPENAKVDEVKAGLENGVLTVTVPKTEVKKPEVKAIEISG

SEQ ID NO: 11925 - protein, 131 aa, Zea mays subsp. mays
  peptide (1)..(131): Ceres Seq. ID no. 12403862
MFRSIVPSAASSGGGSETAAFANARVDWKETPEAHVFKADLPGIKKEEVKVEVEDGNVLVISGKRSREEEDKNDKWHRVERSSGQFMRRFRLPENAKVDEVKAGLENGVLTVTVPKTEVKKPEVKAIEISG

SEQ ID NO: 11926 - DNA, 770 bp, Zea mays subsp. mays
  misc_feature (1)..(770): Ceres Seq. ID no. 12348776
  misc_feature (1)..(770): Ortholog of  Ceres SEQ ID NO 13587131 as cited in SEQ ID NO 331
  misc_feature (1)..(770): Ortholog of  Ceres SEQ ID NO 13661176 as cited in SEQ ID NO 61114
agtcgcctccttcctgcgccgccgccgccgccgccgccgccgctaccaccgcctcgcggccgcctgcggctccgcgtttccgcacggaagttggtgaaggtttcttgaggctgagaacatggtgctgaagacggaactttgccgcttcagcggccagaagatttatcctgggaaaggcattagatttatccgtgctgattctcaggtcttcctttttgccaactcgaaatgcaagcgctacttccacaaccgcctgaagcctgcaaagcttacctggacagcaatgtacaggaagcagcacaagaaggatatccatgctgaagcggtaaagaagaggcgccgcgccaccaagaagccatactccaggtcaattgtgggtgcttccttggaagtaatccagaagaagagagctgagaagccagaggtccgcgatgctgctagagaagctgctcttcgtgagatcaaggagcgcatcaagaagaccaaggatgagaagaaagcgaagaaggcggaggtgagcaagtcccagaagacgcagacaaagggtgcggtccagaagggttccaagggccccaagttgggcggcggtggtgggaagcgctgaaagaacttagtgtcgtttctcgacattgcagtcgttccttagccaaagccactttcgtagaacctgtgttgaatttgcaagacttattcaagcgttgcttttgcgtgctaaataccatggcaagagaacggatttatatttatgcctgaaaaaaatgaccgttcat

SEQ ID NO: 11927 - protein, 161 aa, Zea mays subsp. mays; identical to SEQ ID NO: 1700
  peptide (1)..(161): Ceres Seq. ID no. 12348777

SEQ ID NO: 11928 - protein, 106 aa, Zea mays subsp. mays; identical to SEQ ID NO: 1701
  peptide (1)..(106): Ceres Seq. ID no. 12348778

SEQ ID NO: 11929 - DNA, 1605 bp, Zea mays subsp. mays
  misc_feature (1)..(1605): Ceres Seq. ID no. 12350452
  misc_feature (1)..(1605): Ortholog of  Ceres SEQ ID NO 13592768 as cited in SEQ ID NO 20317
  misc_feature (1)..(1605): Ortholog of  Ceres SEQ ID NO 14303656 as cited in SEQ ID NO 61363
agggcgacgaacgatggctggctggccgtccgtgattgttttggaacgggcagcgtgtttggttggtgcctgtgctgtgccgccgttcgtctctgggtagcgtagcgacggcgccacggcggcttccggctcgtgcgcgcgcgcgcgtgtccgggcgagaagagctgccaagggatggaggcgctgaggaagcaggcgagcaagttcaaggagcaggtcgccaagcagcagcaggctgttataaagcaattcagtactactggctatgagcggtcagattccattgtaattgatgaggttgaactacagagacatcaacagcttgagaaattgtatacttctactcgttctgtaagggatttccagaaggacatagttagagcagctgaaggtttggtgtctattggaaacaaacatattgaagtgggaacaaaattttctgaggactgctatagatatggaagcgaaaataatgcaagcgacgaagcccttagaaaagcagcatcactatacggaggtgctttgagaaatattgagaaagagtatgaagatttcaacagaattttatcttctcagactatagacccattgagagcaatggctatgggtggacccctggaagatgctcgtggtcttgcacagcgctatagcaggatgagacatgaagctgagatcctctctactgaaattgctagaagaaaggcacgggtaagagaagctccaattgctgagcacactacaaagcttcagcaatcagaagctagaatgatagagcacaaagcaagcatggccgtgttagggaaggaagcagcagctgcacttgcagctgtcgagtctcaacagcaacgagtgacccttcagaggctggttggcacggcggaagcagaaaagttattccatctgagattagctgctatacttgatgacgttgaggcagagatgtcctctgagaagcaaaggagagaatctgcaccacctatcatatcttcacataagcgtgctgagaaagctcagtacttccttgctgaggtaatgcataatttcaatggaaccacggagaaggaactgagcttaattgttggcgattatgttgttgttcgtcagattgctcccaacggctgggcggaaggagaatgccgagggaaggctggctggtttccggctgcctatgttgagaggcgcgagaatatccccccgaataaagttttccctcaagtataagatcataagaggggtcatctgtttccactgataagcagtttggtttggcattgaggagctgcaaggctgtatctaacttctgattggtttgatgctccgtatggcgtatcttgtgcatcctatgttcttgtggtggtctagacttggaataagatatgtcggcacgtgctctgcgcctgtgcctgcgcgcacattgatgaagatgtcgctttgcatgtgtccgcagtgtgctactgcttgcggcagcgtaggtcatgttgaatgagctttcctttactgacagatttcgagtgtaaattggttcttgcacttttttttcgttagggtgtatcagtagttctgtacaatatgtttttaatgagaccattcggccatcagagcttt

SEQ ID NO: 11930 - protein, 348 aa, Zea mays subsp. mays
  peptide (1)..(348): Ceres Seq. ID no. 12350453
MEALRKQASKFKEQVAKQQQAVIKQFSTTGYERSDSIVIDEVELQRHQQLEKLYTSTRSVRDFQKDIVRAAEGLVSIGNKHIEVGTKFSEDCYRYGSENNASDEALRKAASLYGGALRNIEKEYEDFNRILSSQTIDPLRAMAMGGPLEDARGLAQRYSRMRHEAEILSTEIARRKARVREAPIAEHTTKLQQSEARMIEHKASMAVLGKEAAAALAAVESQQQRVTLQRLVGTAEAEKLFHLRLAAILDDVEAEMSSEKQRRESAPPIISSHKRAEKAQYFLAEVMHNFNGTTEKELSLIVGDYVVVRQIAPNGWAEGECRGKAGWFPAAYVERRENIPPNKVFPQV

SEQ ID NO: 11931 - protein, 207 aa, Zea mays subsp. mays; identical to SEQ ID NO: 6174
  peptide (1)..(207): Ceres Seq. ID no. 12350454

SEQ ID NO: 11932 - protein, 205 aa, Zea mays subsp. mays; identical to SEQ ID NO: 6175
  peptide (1)..(205): Ceres Seq. ID no. 12350455

SEQ ID NO: 11933 - DNA, 1402 bp, Zea mays subsp. mays
  misc_feature (1)..(1402): Ceres Seq. ID no. 13492514
  misc_feature (1)..(1402): Ortholog of  Ceres SEQ ID NO 14310443 as cited in SEQ ID NO 54695
  misc_feature (1)..(1402): Ortholog of  Ceres SEQ ID NO 13596354 as cited in SEQ ID NO 68027
atgtgacagttcgggcaccgacgtccgtctccgtacttccggctgtgtgcgaaactgcgaacgcgtgatatctccgcgtacgcaaacgcgacgcgaaggtcagcacggacaactctacccctccgcctcgaccctgaccccccacctcgtcggcgatgagttcctcttccaacggcgggaagaagccggctcccggcggcggccgcaggggtcccgccatccgcacgctcgctgacataagccgtgggcccaccggcttcccaggtgccggaggcggcgacagcggcagcgacgacgacgagccacaggaatactacaccggtggcgagaagagtggaatgcttgttcaagatccaacaagaagaaatgatgtggatgcgatatttgaacaagccagacaagcgggtatcaaaggaatgcctcctcttcttgatggcgagtcttccagctctaggagctttacagggactgggccgacttcttacaggggagacaatatcatctgctgcacctcaggaaccagtaccaattcgagtacgccacaatatacatttgtggaacaatggctttagtgtggatgatggtccactgagatactacgacgatcctgaaaatgcagagttccttgagagccttaagatgtcaaagtgccccaaggagctggtgcctactgatggagaacatgttgatgcgtctgttattagaaggatggaagattacagggaacctgtaaggcctcgatcagctttccagggtgttggaagaacccttggtggtggaccttccccagatgagagcgcaacagctgctcctgcatcagcggcccctgctgcttcgaggtccgctggcgttgtcgtggatgactcccagccatttacgtccatacagctgaggctggctgacggcactcgcatggtcgcccggttcaacatgcaccacaccgtgggagacatcaggtcctttatagacgcagctcggcctggagctgcaaggccttatcagctgcagacgggtttccctcccaagcagctggctgacccaacgcagaccgtggagcaagctgggcttgcaaactctgttatcatgcagaagatgtaaatgcttcggctggcaacctggggagctcggatgcatcgtactgcatcttctgaaaaccgtaatattatggttgatcatgttatcagatactgctctggtgcatcattctcagtcatggttacttacagtagcatctggtgcctcgttgggagcacaggagtttataattcatctaggaactgaagtatgctttcttgcatcactattgcatcacttttttcatttttaatattggtgttatgatatttcgtgtttccatggccgcttccttgcaagttgaagcgcgactcgcaagtcgcagcat

SEQ ID NO: 11934 - protein, 243 aa, Zea mays subsp. mays
  peptide (1)..(243): Ceres Seq. ID no. 13492515
MMWMRYLNKPDKRVSKECLLFLMASLPALGALQGLGRLLTGETISSAAPQEPVPIRVRHNIHLWNNGFSVDDGPLRYYDDPENAEFLESLKMSKCPKELVPTDGEHVDASVIRRMEDYREPVRPRSAFQGVGRTLGGGPSPDESATAAPASAAPAASRSAGVVVDDSQPFTSIQLRLADGTRMVARFNMHHTVGDIRSFIDAARPGAARPYQLQTGFPPKQLADPTQTVEQAGLANSVIMQKM

SEQ ID NO: 11935 - protein, 242 aa, Zea mays subsp. mays
  peptide (1)..(242): Ceres Seq. ID no. 13492516
MWMRYLNKPDKRVSKECLLFLMASLPALGALQGLGRLLTGETISSAAPQEPVPIRVRHNIHLWNNGFSVDDGPLRYYDDPENAEFLESLKMSKCPKELVPTDGEHVDASVIRRMEDYREPVRPRSAFQGVGRTLGGGPSPDESATAAPASAAPAASRSAGVVVDDSQPFTSIQLRLADGTRMVARFNMHHTVGDIRSFIDAARPGAARPYQLQTGFPPKQLADPTQTVEQAGLANSVIMQKM

SEQ ID NO: 11936 - protein, 240 aa, Zea mays subsp. mays
  peptide (1)..(240): Ceres Seq. ID no. 13492517
MRYLNKPDKRVSKECLLFLMASLPALGALQGLGRLLTGETISSAAPQEPVPIRVRHNIHLWNNGFSVDDGPLRYYDDPENAEFLESLKMSKCPKELVPTDGEHVDASVIRRMEDYREPVRPRSAFQGVGRTLGGGPSPDESATAAPASAAPAASRSAGVVVDDSQPFTSIQLRLADGTRMVARFNMHHTVGDIRSFIDAARPGAARPYQLQTGFPPKQLADPTQTVEQAGLANSVIMQKM

SEQ ID NO: 11937 - DNA, 1276 bp, Zea mays subsp. mays
  misc_feature (1)..(1276): Ceres Seq. ID no. 12341164
  misc_feature (1)..(1276): Ortholog of  Ceres SEQ ID NO 15175949 as cited in SEQ ID NO 58819
  misc_feature (1)..(1276): Ortholog of  Ceres SEQ ID NO 13596660 as cited in SEQ ID NO 63180
attaagattagcaaaattgtgggccagcagcaggagcgccccccgtctccctccaccctcctctgtcagggtcctccgagtcggacttcctcacggccgccgcgccaaatcccgtctcgttgctccggtccgctgcgcatcctcaggaatggaacttggcgccaccactgccctctaccctctgcaccgctgcaaaaccatttacctggtcaggcatgcccagggcattcacaatgtcgcgggggagaaggactttggtgcatacatgtcacatgatctgttcgatgctcagctcactcctttgggttggaaccaagtcgatggtctgcgggagcatgtgaagaaaagtgggcttgcagaaaagattgaattagttatttcttcccctttactgaggactatgcaaactgcagttggtgtctttggtggtgaaaagtatattgatggtgtaaatgcacctccactaatggtcgaaaatgccggacacagtggtcgtccggcagtttcaagtttgaactgccccccatttattgcagtcgaaacctgcagagagcacttgggtgtccatccctgtgacaagaggaggagcataacagaataccggcctctctttcctgcgattgatttttcattgatagagaatgatgaagatgttctttgggaaccagatgtgagagaaccaaatgaggctgtcgctttgaggggtatgaagttcatggactggttgtggacaagagaagagaaagagatagctattgtcagtcacagtggtttcttgtttcacaccttaagcatgtacagtaaggagtgtcatccaaccataagagacgaagttggcaagcactttgcaaactgcgagctacggtcgatggtgttggttgacagaagcatgcttggatcatattcttcaagattcaactatgctggcaagaatccaaccggactagatgtgcctagtgatattgcagataagaagcaggttgacgaagctcagaagaactgaggcaacctcgaaagcataccatatatgacttggattatcaagaaattctgacctttgcgaagcttgtttgctttgaagaggacaagctaagagggcatctacagatagagtttacgcataccattttgttagtcaagttgaactacgcagcaatgtattagcatgtctgctcttttgtctcagcctacattgagattcagggccttggactacgattatctatttatgataataataaccggatcacctacattcaccaggtgatgcatggcc

SEQ ID NO: 11938 - protein, 333 aa, Zea mays subsp. mays
  peptide (1)..(333): Ceres Seq. ID no. 12341165
LRLAKLWASSRSAPRLPPPSSVRVLRVGLPHGRRAKSRLVAPVRCASSGMELGATTALYPLHRCKTIYLVRHAQGIHNVAGEKDFGAYMSHDLFDAQLTPLGWNQVDGLREHVKKSGLAEKIELVISSPLLRTMQTAVGVFGGEKYIDGVNAPPLMVENAGHSGRPAVSSLNCPPFIAVETCREHLGVHPCDKRRSITEYRPLFPAIDFSLIENDEDVLWEPDVREPNEAVALRGMKFMDWLWTREEKEIAIVSHSGFLFHTLSMYSKECHPTIRDEVGKHFANCELRSMVLVDRSMLGSYSSRFNYAGKNPTGLDVPSDIADKKQVDEAQKN

SEQ ID NO: 11939 - protein, 284 aa, Zea mays subsp. mays
  peptide (1)..(284): Ceres Seq. ID no. 12341166
MELGATTALYPLHRCKTIYLVRHAQGIHNVAGEKDFGAYMSHDLFDAQLTPLGWNQVDGLREHVKKSGLAEKIELVISSPLLRTMQTAVGVFGGEKYIDGVNAPPLMVENAGHSGRPAVSSLNCPPFIAVETCREHLGVHPCDKRRSITEYRPLFPAIDFSLIENDEDVLWEPDVREPNEAVALRGMKFMDWLWTREEKEIAIVSHSGFLFHTLSMYSKECHPTIRDEVGKHFANCELRSMVLVDRSMLGSYSSRFNYAGKNPTGLDVPSDIADKKQVDEAQKN

SEQ ID NO: 11940 - protein, 245 aa, Zea mays subsp. mays
  peptide (1)..(245): Ceres Seq. ID no. 12341167
MSHDLFDAQLTPLGWNQVDGLREHVKKSGLAEKIELVISSPLLRTMQTAVGVFGGEKYIDGVNAPPLMVENAGHSGRPAVSSLNCPPFIAVETCREHLGVHPCDKRRSITEYRPLFPAIDFSLIENDEDVLWEPDVREPNEAVALRGMKFMDWLWTREEKEIAIVSHSGFLFHTLSMYSKECHPTIRDEVGKHFANCELRSMVLVDRSMLGSYSSRFNYAGKNPTGLDVPSDIADKKQVDEAQKN

SEQ ID NO: 11941 - DNA, 1304 bp, Zea mays subsp. mays; identical to SEQ ID NO: 2273
  misc_feature (1)..(1304): Ceres Seq. ID no. 12347730
  misc_feature (1)..(1304): Ortholog of  Ceres SEQ ID NO 14314434 as cited in SEQ ID NO 52401
  misc_feature (1)..(1304): Ortholog of  Ceres SEQ ID NO 14303939 as cited in SEQ ID NO 54286
  misc_feature (1)..(1304): Ortholog of  Ceres SEQ ID NO 14307760 as cited in SEQ ID NO 54741
  misc_feature (1)..(1304): Ortholog of  Ceres SEQ ID NO 14313391 as cited in SEQ ID NO 58556
  misc_feature (1)..(1304): Ortholog of  Ceres SEQ ID NO 14307540 as cited in SEQ ID NO 59670
  misc_feature (1)..(1304): Ortholog of  Ceres SEQ ID NO 15179003 as cited in SEQ ID NO 0
  misc_feature (1)..(1304): Ortholog of  Ceres SEQ ID NO 15179235 as cited in SEQ ID NO 0

SEQ ID NO: 11942 - protein, 254 aa, Zea mays subsp. mays; identical to SEQ ID NO: 2274
  peptide (1)..(254): Ceres Seq. ID no. 12347731

SEQ ID NO: 11943 - protein, 231 aa, Zea mays subsp. mays; identical to SEQ ID NO: 2275
  peptide (1)..(231): Ceres Seq. ID no. 12347732

SEQ ID NO: 11944 - protein, 172 aa, Zea mays subsp. mays; identical to SEQ ID NO: 2276
  peptide (1)..(172): Ceres Seq. ID no. 12347733

SEQ ID NO: 11945 - DNA, 1499 bp, Zea mays subsp. mays
  misc_feature (1)..(1499): Ceres Seq. ID no. 12350250
  misc_feature (1)..(1499): Ortholog of  Ceres SEQ ID NO 13504015 as cited in SEQ ID NO 51020
  misc_feature (1)..(1499): Ortholog of  Ceres SEQ ID NO 13597643 as cited in SEQ ID NO 65208
atggaacaggttctctgtcctcataactccaaccaaacaacggcagctagcgagctcccgcggtcccgccgccgccccctggtcctccaaaaaacggctgaaccctaaaccctccctagctcccgccgcctcgcttaaccgcgcccatggccgccgccgctcgcgccgccctcccgcggccccacctctctcttttttcgtcctcccaccgcagcccccatctgtccctcacgccctcctccgcccctcgcctgcgcagcggcgctgccacctcccctgcgctgcagcagcaccaccaggtcaccacgcgcctgggcgacgtgatcgaggcgcagcagttcgaccgggacgcgctgaacgagatcttcgaggtggcgcgggagatggaggccgtggagaggggttcccacggcgcccccagccgcgtcctcgaggggtacctcatggccacgcttttctacgagccctccacgcgcacgcgcctctccttcgaggctgctatgcggaggctcggcggggaggtcctcaccaccgagaatgcgcgcgagttctcttccgccgccaagggggagacactcgaagataccataagaaccgttgagggttattccgatattattgtactgagacattttgaaagtggagctgcaagaaaagcagcagatactgcaaatattcctgttattaatgcaggtgatggaccagggcaacatccaacccaggctttgttggatgtgtacacaataaagagagaaattggcacactagatggaattaaacttggtttggttggtgaccttgctaatgggaggacagttcgttctctggcttacttgattgctaagtaccagaacattaagatatactttgtatctcctgatgttgttaaaatgaaggatgatatcaagaactacttaaattccaaaggtgttgaatgggaagaaagttcagatttgttggaggtggcatccaagtgtgatgttatttatcaaacacgtattcaaaaagaaagatttggtgagaggattgacctttatgaagctgctcgtggcaagtacatcatggataaaaaggtcttagatgtgctgccaaaacatgctgtcatcatgcatccccttccaaggcttgatgagatcacagtagaagttgatagtgatccaagagctgcatattttaggcaggctaagaatggcctctacataaggatggcattgctcaaacttctgcttgttggtcactgacatttcggctagtgctttagcttgtgctgcgtcaagggattagaaggtattattcttaatataatgatcgaggctgtcttactcacgcaggtcgagtttttagaaacatgtactaataatcagcagcttgtgtcaaaattcaatgttcgctgttgcaggtaataaaagtctgcatccatgcgaatgtgcagcgatgtttggcagagtttggtgttctcatgtgctgtgagaacatggaacataattaattttgcctgc

SEQ ID NO: 11946 - protein, 364 aa, Zea mays subsp. mays; identical to SEQ ID NO: 6074
  peptide (1)..(364): Ceres Seq. ID no. 12350251

SEQ ID NO: 11947 - protein, 285 aa, Zea mays subsp. mays; identical to SEQ ID NO: 6075
  peptide (1)..(285): Ceres Seq. ID no. 12350252

SEQ ID NO: 11948 - protein, 265 aa, Zea mays subsp. mays; identical to SEQ ID NO: 6076
  peptide (1)..(265): Ceres Seq. ID no. 12350253

SEQ ID NO: 11949 - DNA, 836 bp, Zea mays subsp. mays
  misc_feature (1)..(836): Ceres Seq. ID no. 13498286
  misc_feature (1)..(836): Ortholog of  Ceres SEQ ID NO 13661089 as cited in SEQ ID NO 61053
agaaaaagaaaaagaaaagccaaaggcaaaggcaaaggaatcccaatcaggcaagcaaaaggaagaaccagctgctgcggccggagatgtcgtcgcagctgatcgaggagcaccggtcgggcgcggaggtgcacgtcgggcacgagctgtgcgagcgcaagtcgcgcgagttcatggtggagctgggcctccccgacgggctcctcccgctgcccagcctggacgaggtgggctacaaccggtcgacggggttcgtgtggctgcggcaggccgccggcctgacccacaccttcggctccatcggcaagcaggtgtggtacgacagggaggtgacggcgttcgtggagcccgggcggatgcacggcctcgccggggtgaagagcaaggagctcctcatctgggtcaccatctccgagatcgtcctcagcccctccggcaccaagatcgtgttccgcacccccgcggggctcggccgcgccttccctgtcaccgccttccagctcgagcccgcggcggcggagggggaccacaaggaggaggccgaggacgccgccgccgcggccgccaactgatctgctctagcttccggcggcggcggccgtgcgtgggctgctcgatccggtagtggcagtggctttgtgagacagtcgagtcgattgtggtttcccctcctccgccatgtgcgtgtagtggatgatgatgcaggaataaacggtgtccctggatccagaactcacggttcgatccatccagtttatctcatgcttgtgtatctctatgtatgcattgcctgtttgttcgctggaatctactacttgcagcggcctcgtctcttc

SEQ ID NO: 11950 - protein, 207 aa, Zea mays subsp. mays
  peptide (1)..(207): Ceres Seq. ID no. 13498287
EKEKEKPKAKAKESQSGKQKEEPAAAAGDVVAADRGAPVGRGGARRARAVRAQVARVHGGAGPPRRAPPAAQPGRGGLQPVDGVRVAAAGRRPDPHLRLHRQAGVVRQGGDGVRGARADARPRRGEEQGAPHLGHHLRDRPQPLRHQDRVPHPRGARPRLPCHRLPARARGGGGGPQGGGRGRRRRGRQLICSSFRRRRPCVGCSIR

SEQ ID NO: 11951 - protein, 189 aa, Zea mays subsp. mays
  peptide (1)..(189): Ceres Seq. ID no. 13498288
KKKKKSQRQRQRNPNQASKRKNQLLRPEMSSQLIEEHRSGAEVHVGHELCERKSREFMVELGLPDGLLPLPSLDEVGYNRSTGFVWLRQAAGLTHTFGSIGKQVWYDREVTAFVEPGRMHGLAGVKSKELLIWVTISEIVLSPSGTKIVFRTPAGLGRAFPVTAFQLEPAAAEGDHKEEAEDAAAAAAN

SEQ ID NO: 11952 - protein, 161 aa, Zea mays subsp. mays
  peptide (1)..(161): Ceres Seq. ID no. 13498289
MSSQLIEEHRSGAEVHVGHELCERKSREFMVELGLPDGLLPLPSLDEVGYNRSTGFVWLRQAAGLTHTFGSIGKQVWYDREVTAFVEPGRMHGLAGVKSKELLIWVTISEIVLSPSGTKIVFRTPAGLGRAFPVTAFQLEPAAAEGDHKEEAEDAAAAAAN

SEQ ID NO: 11953 - DNA, 1233 bp, Zea mays subsp. mays
  misc_feature (1)..(1233): Ceres Seq. ID no. 13498172
  misc_feature (1)..(1233): Ortholog of  Ceres SEQ ID NO 13656382 as cited in SEQ ID NO 69195
gattcgattcaaaatccacgtatccaaatcgcaaggccacacccacacctccctcctcccctccacccagagcgagcccgcccgcccgcatcggatcacatcgcgccggagcctgacgccgtgccgtcaacgaatccatgggacccacgccgccgcacacggacgacactagggttgcgcagctcccgctccccggcggcgccgaagattacgtgcgcgactccatccacgcctccctgggcctccccgtctccgatcgctccctccgcctcaagctcctcgcctccgaggagcagcgccaccgcctccaggaccacgtcttctcgctcgaggaagacctccgcgcagcccagcgccgcatcgacctcctcaaggccgaggccgccatgaacgccgccggcctccgccgctgcgtcgaggaaaaggaggccgtggccgccgcatacgccgacctctccgacaagagcagcaaggagtgtcggctctacgagcgggacctcgagcgcgccatggagtcctgtgacgacctcgccagggagaacgacgacctccgcgcacgcctaaaccagaacacagatttggcagcattgatggtgcaagtgcaagaactacataaggaaaaggagattctgaagatgaatcttgatacggcggaggcagaggtcgtgacactgagtgaggacaacagggctcttgatgaagagatcaaaaggctgctgagtttgttggagaaggagcgacagcgccggtctgaaagaaagaaatctgccagtacatccaccaagaacaagcgcaagtcgtctagcttgagggatggcaacacagctggcagggctcttgatttcggctgtgcagattcttcaaggcatccattgtccccattgccccacaactccccagactacagggcgcacaagaagtgaaggcaagaaccaacaaaccaaccattcagagcatttccagattaccttgtgcgcaacgcgagtgttgcatcatgccgctaatgatctgattcaaatatggtccctgctaattttctttctttcctgtttcggttgctgcgatgtttttagaccaggagcaaatttatcagcaaatgtatgcttgcttcgcttgcattctattacattggtagaggttgctgttgtttttgtgatggttcttaaagaaatgagaaggcacatggtttgtttatggcttgatgtatcatgtatgatatgaaagcagcttctc

SEQ ID NO: 11954 - protein, 261 aa, Zea mays subsp. mays
  peptide (1)..(261): Ceres Seq. ID no. 13498173
MGPTPPHTDDTRVAQLPLPGGAEDYVRDSIHASLGLPVSDRSLRLKLLASEEQRHRLQDHVFSLEEDLRAAQRRIDLLKAEAAMNAAGLRRCVEEKEAVAAAYADLSDKSSKECRLYERDLERAMESCDDLARENDDLRARLNQNTDLAALMVQVQELHKEKEILKMNLDTAEAEVVTLSEDNRALDEEIKRLLSLLEKERQRRSERKKSASTSTKNKRKSSSLRDGNTAGRALDFGCADSSRHPLSPLPHNSPDYRAHKK

SEQ ID NO: 11955 - protein, 178 aa, Zea mays subsp. mays
  peptide (1)..(178): Ceres Seq. ID no. 13498174
MNAAGLRRCVEEKEAVAAAYADLSDKSSKECRLYERDLERAMESCDDLARENDDLRARLNQNTDLAALMVQVQELHKEKEILKMNLDTAEAEVVTLSEDNRALDEEIKRLLSLLEKERQRRSERKKSASTSTKNKRKSSSLRDGNTAGRALDFGCADSSRHPLSPLPHNSPDYRAHKK

SEQ ID NO: 11956 - protein, 137 aa, Zea mays subsp. mays
  peptide (1)..(137): Ceres Seq. ID no. 13498175
MESCDDLARENDDLRARLNQNTDLAALMVQVQELHKEKEILKMNLDTAEAEVVTLSEDNRALDEEIKRLLSLLEKERQRRSERKKSASTSTKNKRKSSSLRDGNTAGRALDFGCADSSRHPLSPLPHNSPDYRAHKK

SEQ ID NO: 11957 - DNA, 1246 bp, Zea mays subsp. mays
  misc_feature (1)..(1246): Ceres Seq. ID no. 12365011
  misc_feature (1)..(1246): Ortholog of  Ceres SEQ ID NO 15176375 as cited in SEQ ID NO 53238
  misc_feature (1)..(1246): Ortholog of  Ceres SEQ ID NO 15170532 as cited in SEQ ID NO 55671
  misc_feature (1)..(1246): Ortholog of  Ceres SEQ ID NO 14316507 as cited in SEQ ID NO 57397
  misc_feature (1)..(1246): Ortholog of  Ceres SEQ ID NO 13663060 as cited in SEQ ID NO 60964
  misc_feature (1)..(1246): Ortholog of  Ceres SEQ ID NO 13598532 as cited in SEQ ID NO 65204
  misc_feature (1)..(1246): Ortholog of  Ceres SEQ ID NO 13656849 as cited in SEQ ID NO 65764
  misc_feature (1)..(1246): Ortholog of  Ceres SEQ ID NO 13655298 as cited in SEQ ID NO 68914
  misc_feature (1)..(1246): Ortholog of  Ceres SEQ ID NO 13656501 as cited in SEQ ID NO 69206
aacaagccgactccgacggcgccgtccacgacgacgggcggcggactgcgcgccatggatctgtacgagaagctggagaaggtgggggagggcacgtacgggaaggtgtacaaggcccgggagaaggcgacgggccggatcgtggcgctcaagaagacgcggctccccgaggacgacgagggcgtgccgcccaccgcgctgcgggaggtctcgctgctgcggatgctgtcgcaggacccgcacgtggtccgcctgctcgacctcaagcagggcgtcaacaaggaggggcagaccatcctgtacctcgtcttcgagtacatggacaccgacctgaagaagttcatccggggctatcgcgccaaccacgagaagatccccgcacaaaccgtcaagatcctgatgtaccagcttgcaagggcgtgggttttgttcacggccgcggggtgctccaccgtgatctgaaaccgcacaacctgctcatggaccgcaagaccatggcgctcaagatcgctgacctcggactcagccgtgccatcaccgtccctgtaaagaagtacacgcacgagattctgacgctgtggtacagggcgcccgaggttcttcttggcgccacacactactccacgccggttgacatttggtccgtggggtgcatatttactgagttggttactaatcagccacttttccctggcgactccgagttgcagcagctcctccacatcttcaagttgctgggcaccccaaatgaggagatgtggccaggagtaggcaagctgccgaactggcacgtgtacccccagtggaagcccactaagctgtccactcttgtccctggtcttgactccgatggctatgatttacttgagaaaatgcttgcatatgagccagggaagcgggtctcggcgaagaaggccctggagcacccgtacttcaatgatgttaacaaggaggtgtactgaagcgacccgagtagtagggttcatcgagagaggatcattgtcaccttattcttcgcttagtgtgttaatatggctaccctgaagcagtacttgaagtatctctgtgttcaagctgctacttttctatttgttgtgccattcactttggttgtgatggataaggcagggagagttttcagcatgagtgagcttatgttgacactgtttcttgcaaattgtagccggaaagcttgcgatcatcttccatttgatttataaagcttcactatatggctctgaagctc

SEQ ID NO: 11958 - protein, 319 aa, Zea mays subsp. mays
  peptide (1)..(319): Ceres Seq. ID no. 12365012
QADSDGAVHDDGRRTARHGSVREAGEGGGGHVREGVQGPGEGDGPDRGAQEDAAPRGRRGRAAHRAAGGLAAADAVAGPARGPPARPQAGRQQGGADHPVPRLRVHGHRPEEVHPGLSRQPREDPRTNRQDPDVPACKGVGFVHGRGVLHRDLKPHNLLMDRKTMALKIADLGLSRAITVPVKKYTHEILTLWYRAPEVLLGATHYSTPVDIWSVGCIFTELVTNQPLFPGDSELQQLLHIFKLLGTPNEEMWPGVGKLPNWHVYPQWKPTKLSTLVPGLDSDGYDLLEKMLAYEPGKRVSAKKALEHPYFNDVNKEVY

SEQ ID NO: 11959 - protein, 160 aa, Zea mays subsp. mays
  peptide (1)..(160): Ceres Seq. ID no. 12365013
MDRKTMALKIADLGLSRAITVPVKKYTHEILTLWYRAPEVLLGATHYSTPVDIWSVGCIFTELVTNQPLFPGDSELQQLLHIFKLLGTPNEEMWPGVGKLPNWHVYPQWKPTKLSTLVPGLDSDGYDLLEKMLAYEPGKRVSAKKALEHPYFNDVNKEVY

SEQ ID NO: 11960 - DNA, 1361 bp, Zea mays subsp. mays
  misc_feature (1)..(1361): Ceres Seq. ID no. 12355661
  misc_feature (1)..(1361): Ortholog of  Ceres SEQ ID NO 13646680 as cited in SEQ ID NO 20737
aaaaaaatacgggcccgtgtctcagcgcacacctcttcgtgctcgctcccatggaggccaccccgatctccatgaagccaccggcgccacccccggtcactctggagcccatagaattgtcaacgcatgccgtcggactgaccgagctggagcgatccagcatgaaccagctcgcaatagcgccggaccccaagcggcagagggtggaggaggctgcggatggcaacgggtgcaagcattgcgcctgcaagaagtccagatgcttgaagctctattgcccatgttttgctggaggtggttattgttccgataagtgtggctgccaaccatgtttcaacaaagaagccttttcagaaacagttcagactactcgcaaggtgttactttcaagacagaagcgcatgtcgatgaaaattaataggagacctgaggcaaatgctgaaccaatggaagatgctcaccattcttcttcttcaactccaccaaggagaggttgcaactgcaagaaatcaagttgcctgaagaaatactgcgattgctaccaggatgggaccggatgttccttgttttgccgttgcgacgattgccagaaccctttcgggaaaaatgacggcataattgctgatgacagtaagcgctatctgtacactggtgctgatttggatcacagcgagggcgaacatgacttcgttgtggagcgctcgcctcgtctgcagtcacccatgtcgaaggagtcttctttccaccagaccccaccccatctcagggcctcgagcagagacgcgcacgtgttcccgcaggcggtatcccagtggcaggcgctgccccgctcgtggcactgttccaacaagaggaacggcaacgacagggcgatggacgactcctccgccaacggcaactacaagagctcgagccatgactggcagatgtccaagctcgaggacggctacagcatatcgagatgcgtccagatcctgaacggcatggtggagctgtcgcaggtggagaagtcagttgcccccgacgtcttcctgctgccgggcaaccgggaaattttcgtctccctcggcggcgatgtgcgcgccatgtggctgaagcgcaagattcagcacctggcttaggggagggtgtgtttcattgcgccatgtgccgtcctctcgagtgaggagattggaggggaaattgagttttcttttagatcctgcatgttctgctgctggtcgtgggcgtgcacaggattctaggctcttttttcctgtttactgaggtgtatttatggattgacattacgtattgtctttgtagagatagcggtttcgagcctggtatcggatataataaaaaaatgagattatacaccc

SEQ ID NO: 11961 - protein, 372 aa, Zea mays subsp. mays
  peptide (1)..(372): Ceres Seq. ID no. 12355662
KNTGPCLSAHLFVLAPMEATPISMKPPAPPPVTLEPIELSTHAVGLTELERSSMNQLAIAPDPKRQRVEEAADGNGCKHCACKKSRCLKLYCPCFAGGGYCSDKCGCQPCFNKEAFSETVQTTRKVLLSRQKRMSMKINRRPEANAEPMEDAHHSSSSTPPRRGCNCKKSSCLKKYCDCYQDGTGCSLFCRCDDCQNPFGKNDGIIADDSKRYLYTGADLDHSEGEHDFVVERSPRLQSPMSKESSFHQTPPHLRASSRDAHVFPQAVSQWQALPRSWHCSNKRNGNDRAMDDSSANGNYKSSSHDWQMSKLEDGYSISRCVQILNGMVELSQVEKSVAPDVFLLPGNREIFVSLGGDVRAMWLKRKIQHLA

SEQ ID NO: 11962 - protein, 356 aa, Zea mays subsp. mays
  peptide (1)..(356): Ceres Seq. ID no. 12355663
MEATPISMKPPAPPPVTLEPIELSTHAVGLTELERSSMNQLAIAPDPKRQRVEEAADGNGCKHCACKKSRCLKLYCPCFAGGGYCSDKCGCQPCFNKEAFSETVQTTRKVLLSRQKRMSMKINRRPEANAEPMEDAHHSSSSTPPRRGCNCKKSSCLKKYCDCYQDGTGCSLFCRCDDCQNPFGKNDGIIADDSKRYLYTGADLDHSEGEHDFVVERSPRLQSPMSKESSFHQTPPHLRASSRDAHVFPQAVSQWQALPRSWHCSNKRNGNDRAMDDSSANGNYKSSSHDWQMSKLEDGYSISRCVQILNGMVELSQVEKSVAPDVFLLPGNREIFVSLGGDVRAMWLKRKIQHLA

SEQ ID NO: 11963 - protein, 349 aa, Zea mays subsp. mays
  peptide (1)..(349): Ceres Seq. ID no. 12355664
MKPPAPPPVTLEPIELSTHAVGLTELERSSMNQLAIAPDPKRQRVEEAADGNGCKHCACKKSRCLKLYCPCFAGGGYCSDKCGCQPCFNKEAFSETVQTTRKVLLSRQKRMSMKINRRPEANAEPMEDAHHSSSSTPPRRGCNCKKSSCLKKYCDCYQDGTGCSLFCRCDDCQNPFGKNDGIIADDSKRYLYTGADLDHSEGEHDFVVERSPRLQSPMSKESSFHQTPPHLRASSRDAHVFPQAVSQWQALPRSWHCSNKRNGNDRAMDDSSANGNYKSSSHDWQMSKLEDGYSISRCVQILNGMVELSQVEKSVAPDVFLLPGNREIFVSLGGDVRAMWLKRKIQHLA

SEQ ID NO: 11964 - DNA, 1224 bp, Zea mays subsp. mays
  misc_feature (1)..(1224): Ceres Seq. ID no. 12411717
  misc_feature (1)..(1224): Ortholog of  Ceres SEQ ID NO 13662054 as cited in SEQ ID NO 61539
  misc_feature (1)..(1224): Ortholog of  Ceres SEQ ID NO 13663665 as cited in SEQ ID NO 67230
  misc_feature (1)..(1224): Ortholog of  Ceres SEQ ID NO 15174315 as cited in SEQ ID NO 0
gccgtgccgtctcctctcctctcctctctcctctctcatccccaggtctcagcccacctagcaatgttctcctcctccccttccacatgaccagcgccgcgccgcgcagcgcagccatccttgttctgtcccgggtacgccgccacacacatcgcttcaagcgcttccctccgtccctcctctttgtggattggaatcgacgcctgaaagtggatgacgatggcgggttcttgcgccgcgccgcccgttgcctgtcttccctcgttgaggacgctgccgccaactcacgtcagacttagcggcttcttgccctgttcctcggccgcgcggagtcgcggcgccgccgtgctgggatgcgctctggggaccaagaggcagacgccgggtgttctgaaccggttgttctgtggatacatgcaaagagatgggcatgaaggagatgtaagctgtcaaggaagggatgacactgttatgtttggaccagatgatgatggtgtaaagattcctactcaggtagagactcttgtaaagggcactgcaatggttgctgaaccagaatacaaggctagcccagatctagattacctacaggagctgctggctattcagcagcaaggacctcgtgcaataggtttctttggaacccgcaacatgggatttatgcatcaacaacttattgagatcctgagctatgctatggtcataacaaaaaatcatatattcacatctggtgcttctggaacaaatgcagctgttatcaggggtgctttaagagctgaaaagccagagctgcttactgtaattttacctcaaagcctaaagaagcagcctcctgaaagccaagaactgttgtctaaagtacaaaacttgatcgagaaaccacagtatgatcatttgccactaattgaggctagcaggttatgcaatatggacatcatctccaaggtccaacaggtgatctgcttcgcgttccatgacagcaagctgctgatggaaacatgccaggaggccaagaaccttcggaagatcgtgacactcttctacttggattagctcctccgacatggatctattctccttttttttttgttcgtggcgtaggctaatgttggggggataaaaagcaagttggacggtttagttagtttcgaaatatactggataggtggtgggatgaccttccattggatgagaaagtcattttgtttcgcccattattactgg

SEQ ID NO: 11965 - protein, 279 aa, Zea mays subsp. mays
  peptide (1)..(279): Ceres Seq. ID no. 12411718
MTMAGSCAAPPVACLPSLRTLPPTHVRLSGFLPCSSAARSRGAAVLGCALGTKRQTPGVLNRLFCGYMQRDGHEGDVSCQGRDDTVMFGPDDDGVKIPTQVETLVKGTAMVAEPEYKASPDLDYLQELLAIQQQGPRAIGFFGTRNMGFMHQQLIEILSYAMVITKNHIFTSGASGTNAAVIRGALRAEKPELLTVILPQSLKKQPPESQELLSKVQNLIEKPQYDHLPLIEASRLCNMDIISKVQQVICFAFHDSKLLMETCQEAKNLRKIVTLFYLD

SEQ ID NO: 11966 - protein, 277 aa, Zea mays subsp. mays
  peptide (1)..(277): Ceres Seq. ID no. 12411719
MAGSCAAPPVACLPSLRTLPPTHVRLSGFLPCSSAARSRGAAVLGCALGTKRQTPGVLNRLFCGYMQRDGHEGDVSCQGRDDTVMFGPDDDGVKIPTQVETLVKGTAMVAEPEYKASPDLDYLQELLAIQQQGPRAIGFFGTRNMGFMHQQLIEILSYAMVITKNHIFTSGASGTNAAVIRGALRAEKPELLTVILPQSLKKQPPESQELLSKVQNLIEKPQYDHLPLIEASRLCNMDIISKVQQVICFAFHDSKLLMETCQEAKNLRKIVTLFYLD

SEQ ID NO: 11967 - protein, 212 aa, Zea mays subsp. mays
  peptide (1)..(212): Ceres Seq. ID no. 12411720
MQRDGHEGDVSCQGRDDTVMFGPDDDGVKIPTQVETLVKGTAMVAEPEYKASPDLDYLQELLAIQQQGPRAIGFFGTRNMGFMHQQLIEILSYAMVITKNHIFTSGASGTNAAVIRGALRAEKPELLTVILPQSLKKQPPESQELLSKVQNLIEKPQYDHLPLIEASRLCNMDIISKVQQVICFAFHDSKLLMETCQEAKNLRKIVTLFYLD

SEQ ID NO: 11968 - DNA, 1351 bp, Zea mays subsp. mays
  misc_feature (1)..(1351): Ceres Seq. ID no. 12411713
  misc_feature (1)..(1351): Ortholog of  Ceres SEQ ID NO 13505291 as cited in SEQ ID NO 56614
  misc_feature (1)..(1351): Ortholog of  Ceres SEQ ID NO 13596535 as cited in SEQ ID NO 62321
gattgtaattctgtaattacgattagttggagagctgcaccgtgcagcactggctgaacaacagctccttgtcgccgtcctcggcgtcctcgggactcatcttgggtcggaagctgctccacgccggcgccagccctggtgcagcgctggtgtcgaagctgtgcactagcgagactgttcggaagctgtcgtcgcccgacggcacctggtagccggcgaggaagtagagctgcgtgccgacgacggccatggtgaggtagagccgctgagctgaagacgggagactggcgagcagcgacaggtcgggcagggcggagtggtccatgatgctctagatgttgagctcgccgtcgtagacctcgacgtgtcccttccagctggtgaggcagtcgccggagctgaacagcctgttggccaccgccacgatctggttcgggggcacgtcgagctgccacatccccggtagattttgtatctaaccatatctcgtgaggatgattgttgtgttggtttgttcaggcgtggctgaccccgtgaacttgccgtcgggaagtccagctgctgcggtttttgtggcgagcctttgcagttcgttctccagtgtaaccggcaacatcagctctgcaagaaccccagaataaaccctgacatcaagacactccactgatcactcttgtgctgctcctaccaatggagcaagagcatctccacctgacaatggtccactcgttgtattcatcactaagtccgctcgattccaccaataggtgttcatgcttacagttgaattggcaaactgagggaggtgccgggggagcaaaattttctcagtttggcgctgatttatcaacgatcatggataagcatttgaagacccttgccccagtctacgtgggaacaaaattcgtcaagcttgatgctgaatatgctccattctttgtggccaaactggcaatcaagacactgccatgtgtaatattgttcaagaaggatattgctgttgaccgattagttgggtttcaagatctcagaagtaaagacgattttctgacaagagcattggaacacattcttattctcaagacgaaagggataatcgatgagaagaagaaagatgacgacgatgacgatgaagaaagcgaggctaagaataggagggttaggtcctcaactgctcaagactctgactcagactgaacttgagatgaggattgaggactcaccgtttttgcactttggattttgtttgtttgtttgtttgttctgtgctgtgttgtactgtaattgatttgtgtaaccatgtatcggtaccagacaccacaacaagaacatgtacaagagattctttagc

SEQ ID NO: 11969 - protein, 168 aa, Zea mays subsp. mays
  peptide (1)..(168): Ceres Seq. ID no. 12411714
MEQEHLHLTMVHSLYSSLSPLDSTNRCSCLQLNWQTEGGAGGAKFSQFGADLSTIMDKHLKTLAPVYVGTKFVKLDAEYAPFFVAKLAIKTLPCVILFKKDIAVDRLVGFQDLRSKDDFLTRALEHILILKTKGIIDEKKKDDDDDDEESEAKNRRVRSSTAQDSDSD

SEQ ID NO: 11970 - protein, 159 aa, Zea mays subsp. mays
  peptide (1)..(159): Ceres Seq. ID no. 12411715
MVHSLYSSLSPLDSTNRCSCLQLNWQTEGGAGGAKFSQFGADLSTIMDKHLKTLAPVYVGTKFVKLDAEYAPFFVAKLAIKTLPCVILFKKDIAVDRLVGFQDLRSKDDFLTRALEHILILKTKGIIDEKKKDDDDDDEESEAKNRRVRSSTAQDSDSD

SEQ ID NO: 11971 - protein, 113 aa, Zea mays subsp. mays
  peptide (1)..(113): Ceres Seq. ID no. 12411716
MDKHLKTLAPVYVGTKFVKLDAEYAPFFVAKLAIKTLPCVILFKKDIAVDRLVGFQDLRSKDDFLTRALEHILILKTKGIIDEKKKDDDDDDEESEAKNRRVRSSTAQDSDSD

SEQ ID NO: 11972 - DNA, 1674 bp, Zea mays subsp. mays
  misc_feature (1)..(1674): Ceres Seq. ID no. 12355665
  misc_feature (1)..(1674): Ortholog of  Ceres SEQ ID NO 15176223 as cited in SEQ ID NO 51535
  misc_feature (1)..(1674): Ortholog of  Ceres SEQ ID NO 15171193 as cited in SEQ ID NO 59370
  misc_feature (1)..(1674): Ortholog of  Ceres SEQ ID NO 13597198 as cited in SEQ ID NO 63665
cacttgcagaggttcgcgactcgcgacgcctccgcagccccagccccacgccccgcgacccaaaccctagccccctccaccgtaccgccaccgtcatggccgaaccatccgccgccgccgtcaccgcagctgaggtcggggaggagtccgatgccgccgcgatggaggaggtcgcggcggccgcgaagaggtggcccgggtggcccggggacagcgtgttccggctggtggtgccagtgctcaaggtcggaagcataatcgggcggaagggcgagctcatcaagcgccttgtcgaggggaccaaggccagagtccgcatcctcgagggccccgtcggcgccaccgagcgtatcgttttggtttctggaaaagaagatccaggcttggagctatctccagccatggatgctctcatgagagtttttaagcgtgtcattgggataacagatggagctgcggagggcactcaggctgctgctactcctggtgtatgtgctgcccgattgttggttcctggagctcaggcaattaacctaattgggaagcaaggtgccactatcaaagcaatccaggagagcacgggtgctacaatacgggtaatatcagtagatgaacatgagagaccattttatgtaactgacgatgaaaggatagttgagatacagggcgatacagagaaagttctaaaagcactgcaagcagtttctaaccatcttcggaagtttttggttgaccatagtgtacttccattatttgaaaaaactaatactgcagtgagccaagatcacaatgttggttggagtgatatgtcacatccttcaattggttctgcacaagtgaatcaaccaccttcagtggtagatgaatatattcttccagtgaagagggatactttgtatcttgaacgagaacctttgttagatcataacattcatcgctcaggcgtatcactttatgggcgggatccagccttgtcaacactacgaccacctggaatacatggtgctgggcccgctacttacacagataacccaaaccatgcaaatcccacttacctatgctgaagacattataggagttaaaggagcaaatattgcgtacatacgagctaatagtggagctgttgttacaattcaggagagtttgggtagtccagatgatattactgttgaaataaaggggacatcttcacaggtacaagctgcacagcagctcatccaggactcgttggctgcacaccgagaacctgtcagaagcagttatgtgggagcaggattagattcactgtataggtccagctactcacaatatggcagctccacctatccttcgtcatcactgccatcttattctagcatcgatgatgttagtaggtacccatcttcaggtcttggtggctatgggtcgagttacaggtactagtactagttcgtccttaggcttgaatgcttgatggcaccttgtatccattcctgggtgattattgtacaagtcagcaagttttctgctctgcgtgcttacgggcaggggatcattttacaagtcagcaagttctctgctttgtatgcttccgggcagggatctggtagattatactgcatcccaattcccagtacccagacttcggggtccaatttgctttgacaaacaatggaatcggaaatcgtgcttgtc

SEQ ID NO: 11973 - protein, 353 aa, Zea mays subsp. mays
  peptide (1)..(353): Ceres Seq. ID no. 12355666
LAEVRDSRRLRSPSPTPRDPNPSPLHRTATVMAEPSAAAVTAAEVGEESDAAAMEEVAAAAKRWPGWPGDSVFRLVVPVLKVGSIIGRKGELIKRLVEGTKARVRILEGPVGATERIVLVSGKEDPGLELSPAMDALMRVFKRVIGITDGAAEGTQAAATPGVCAARLLVPGAQAINLIGKQGATIKAIQESTGATIRVISVDEHERPFYVTDDERIVEIQGDTEKVLKALQAVSNHLRKFLVDHSVLPLFEKTNTAVSQDHNVGWSDMSHPSIGSAQVNQPPSVVDEYILPVKRDTLYLEREPLLDHNIHRSGVSLYGRDPALSTLRPPGIHGAGPATYTDNPNHANPTYLC

SEQ ID NO: 11974 - protein, 322 aa, Zea mays subsp. mays
  peptide (1)..(322): Ceres Seq. ID no. 12355667
MAEPSAAAVTAAEVGEESDAAAMEEVAAAAKRWPGWPGDSVFRLVVPVLKVGSIIGRKGELIKRLVEGTKARVRILEGPVGATERIVLVSGKEDPGLELSPAMDALMRVFKRVIGITDGAAEGTQAAATPGVCAARLLVPGAQAINLIGKQGATIKAIQESTGATIRVISVDEHERPFYVTDDERIVEIQGDTEKVLKALQAVSNHLRKFLVDHSVLPLFEKTNTAVSQDHNVGWSDMSHPSIGSAQVNQPPSVVDEYILPVKRDTLYLEREPLLDHNIHRSGVSLYGRDPALSTLRPPGIHGAGPATYTDNPNHANPTYLC

SEQ ID NO: 11975 - protein, 300 aa, Zea mays subsp. mays
  peptide (1)..(300): Ceres Seq. ID no. 12355668
MEEVAAAAKRWPGWPGDSVFRLVVPVLKVGSIIGRKGELIKRLVEGTKARVRILEGPVGATERIVLVSGKEDPGLELSPAMDALMRVFKRVIGITDGAAEGTQAAATPGVCAARLLVPGAQAINLIGKQGATIKAIQESTGATIRVISVDEHERPFYVTDDERIVEIQGDTEKVLKALQAVSNHLRKFLVDHSVLPLFEKTNTAVSQDHNVGWSDMSHPSIGSAQVNQPPSVVDEYILPVKRDTLYLEREPLLDHNIHRSGVSLYGRDPALSTLRPPGIHGAGPATYTDNPNHANPTYLC

SEQ ID NO: 11976 - DNA, 1383 bp, Zea mays subsp. mays
  misc_feature (1)..(1383): Ceres Seq. ID no. 12411698
  misc_feature (1)..(1383): Ortholog of  Ceres SEQ ID NO 12583421 as cited in SEQ ID NO 56410
  misc_feature (1)..(1383): Ortholog of  Ceres SEQ ID NO 15169300 as cited in SEQ ID NO 59572
  misc_feature (1)..(1383): Ortholog of  Ceres SEQ ID NO 15176407 as cited in SEQ ID NO 59620
  misc_feature (1)..(1383): Ortholog of  Ceres SEQ ID NO 13596876 as cited in SEQ ID NO 62696
  misc_feature (1)..(1383): Ortholog of  Ceres SEQ ID NO 13655442 as cited in SEQ ID NO 64359
  misc_feature (1)..(1383): Ortholog of  Ceres SEQ ID NO 14303652 as cited in SEQ ID NO 67569
tctccccgggcacatgcccgtgggcacgcgtgcaggccactggccacccccacgcagaaaaaccagcggccgcgcgcaccgacccggccgacgactccggcgaccgcgcgcacacgacaaaaccccggcggcgacgacagacccacaggatcagacgactcagcgagcggaacaccccctggcgccggccgttaaagtcaagtcaagcaccggagccggtgtataaagctccggcgactggtgcccaccacggctagctgccgtcgtcgcagaagtaggagctcgcgtttctccatccgtacgtcctgcagtagtgattgggcagcatcgtcatcgatcgatcgccatgaggctccgcggcgtgctgcgcctcgtcctcgcgctcctcctcgccgccaccgccatcgtgccggtgctgctccttagcgagaacggcggcggcggcgtcgcacctgcgccgccgttcaactcctcgcgtgtcaaggccgtctcgtggcatccaaggatcttcgtgtacaaggggttcctctccgacgccgagtgtgaccacctcgtgactctggcgaagaaaaagatccagcggtccatggtggcggacaacgagtccggcaagagcgtcaagagcgaggtgcgcaccagctccggcatgttcctcgacaagcgccaggacccggtggtgagtcggatcgaggagaggatcgcggcatggacgtttcttcctcaagagaacgccgagaacatgcaggtgctgcgctacgagccggggcagaagtacgagccgcacttcgactacttccacgacagggtcaaccaggcccgcggcggccaccgctacgccaccgtgctcatgtacctgtccaccgtccgcgagggaggcgagaccgtgttccccaacgccaagggttgggagtcccagcccaaggacgccactttctccgagtgtgcacacaaaggattggcagtgaaaccggtgaaaggcgacgccgtgctcttcttcagcctgcacgccgacggcacgccggacccgctcagcctccacgggagctgcccggtgatccggggcgagaagtggtcggcgcccaagtggatccacgtcaggtcgtacgaggacgaaccccaggcagtactcgtgctccccgaggaaaccgacggcgcgcgggtgcgccgataggagcgagcgctgcgcgaagtgggccgcggcgggtgagtgcgcctggaacccggcgtacatgctcggcgccggcgatgagggggcgcctgggcagtgccgcaggagctgcggagtctgcgattcgtaggcgcgtccttgccttttctttctttcttcctttctttgtttgttttgggatgcagtattcagataactagtggctgtttttctgc

SEQ ID NO: 11977 - protein, 274 aa, Zea mays subsp. mays
  peptide (1)..(274): Ceres Seq. ID no. 12411699
MRLRGVLRLVLALLLAATAIVPVLLLSENGGGGVAPAPPFNSSRVKAVSWHPRIFVYKGFLSDAECDHLVTLAKKKIQRSMVADNESGKSVKSEVRTSSGMFLDKRQDPVVSRIEERIAAWTFLPQENAENMQVLRYEPGQKYEPHFDYFHDRVNQARGGHRYATVLMYLSTVREGGETVFPNAKGWESQPKDATFSECAHKGLAVKPVKGDAVLFFSLHADGTPDPLSLHGSCPVIRGEKWSAPKWIHVRSYEDEPQAVLVLPEETDGARVRR

SEQ ID NO: 11978 - protein, 220 aa, Zea mays subsp. mays
  peptide (1)..(220): Ceres Seq. ID no. 12411700
MDVSSSRERREHAGAALRAGAEVRAALRLLPRQGQPGPRRPPLRHRAHVPVHRPRGRRDRVPQRQGLGVPAQGRHFLRVCTQRIGSETGERRRRALLQPARRRHAGPAQPPRELPGDPGREVVGAQVDPRQVVRGRTPGSTRAPRGNRRRAGAPIGASAARSGPRRVSAPGTRRTCSAPAMRGRLGSAAGAAESAIRRRVLAFSFFLPFFVCFGMQYSDN

SEQ ID NO: 11979 - protein, 194 aa, Zea mays subsp. mays
  peptide (1)..(194): Ceres Seq. ID no. 12411701
MVADNESGKSVKSEVRTSSGMFLDKRQDPVVSRIEERIAAWTFLPQENAENMQVLRYEPGQKYEPHFDYFHDRVNQARGGHRYATVLMYLSTVREGGETVFPNAKGWESQPKDATFSECAHKGLAVKPVKGDAVLFFSLHADGTPDPLSLHGSCPVIRGEKWSAPKWIHVRSYEDEPQAVLVLPEETDGARVRR

SEQ ID NO: 11980 - DNA, 1048 bp, Zea mays subsp. mays
  misc_feature (1)..(1048): Ceres Seq. ID no. 13577875
  misc_feature (1)..(1048): Ortholog of  Ceres SEQ ID NO 13581804 as cited in SEQ ID NO 51424
  misc_feature (1)..(1048): Ortholog of  Ceres SEQ ID NO 14306627 as cited in SEQ ID NO 53023
  misc_feature (1)..(1048): Ortholog of  Ceres SEQ ID NO 15174917 as cited in SEQ ID NO 53650
  misc_feature (1)..(1048): Ortholog of  Ceres SEQ ID NO 14304034 as cited in SEQ ID NO 53878
  misc_feature (1)..(1048): Ortholog of  Ceres SEQ ID NO 14307559 as cited in SEQ ID NO 54006
  misc_feature (1)..(1048): Ortholog of  Ceres SEQ ID NO 14307797 as cited in SEQ ID NO 54802
  misc_feature (1)..(1048): Ortholog of  Ceres SEQ ID NO 15168374 as cited in SEQ ID NO 55652
  misc_feature (1)..(1048): Ortholog of  Ceres SEQ ID NO 13663874 as cited in SEQ ID NO 67003
cagacttccagcatctccgctccggctgcgctctgccttgctttcctgctacctgctctagcgcgagcgagagaggtacggcggccgatctggcggcgcaggcggagggctcggccggggccggcaagtcggcgccgaacatggggaggggccgggtcgagctcaagcggatcgagaacaagatcaaccgccaggtcaccttcgccaagcgccgcaacggcctgctcaagaaggcgtacgagctctcggtgctctgcgacgccgaggtcgcgctcatcatcttctccaaccgcggcaagctctacgagttctccagcacgcagagcatgccaaaaacacttgaaaagtaccaaaaatgcagttttgcagggcctgaaacagcactccagaatagagagaatgagcaactgaaaagtagccgcaatgagtacctcaaactgaaggcacgtgttgataatttacagcggactcaaaggaacttgcttggtgaagatcttgagtcattaggcataaaagagctggagcacctggagaagcagctcgattcgtccttgaagcacataagatctacaaggacacaacacatggttgatcaactgacagaacttcagaaaaaagaacaaatgttttgtgaagcaaataagtgtcttcgaagaagactggaggagagcaaccaggttatatggcagcatgcgtgggagcaaagcgagcggcattctgaagtgcagccgcagcagctcaatggcaataacttcttccatcccctcgatggtgctggtgaacccacccttcagatagggtatccttcagaggcactgactagctcatgcatgaccaccttcctgcccccgtggttgccatgagatcgaactactgcgcaattccgaattaataagcatggccgcatgcagctgcctgtgctatacgttgtgcttggagtgtactttaaggttcttgcatggcaagtatgtgtgtaacatttgtgatgaacatggaaactatccacttaattctcgaataatcaatgaactgggtaagattgtaacat

SEQ ID NO: 11981 - protein, 286 aa, Zea mays subsp. mays
  peptide (1)..(286): Ceres Seq. ID no. 13577876
DFQHLRSGCALPCFPATCSSASERGTAADLAAQAEGSAGAGKSAPNMGRGRVELKRIENKINRQVTFAKRRNGLLKKAYELSVLCDAEVALIIFSNRGKLYEFSSTQSMPKTLEKYQKCSFAGPETALQNRENEQLKSSRNEYLKLKARVDNLQRTQRNLLGEDLESLGIKELEHLEKQLDSSLKHIRSTRTQHMVDQLTELQKKEQMFCEANKCLRRRLEESNQVIWQHAWEQSERHSEVQPQQLNGNNFFHPLDGAGEPTLQIGYPSEALTSSCMTTFLPPWLP

SEQ ID NO: 11982 - protein, 240 aa, Zea mays subsp. mays
  peptide (1)..(240): Ceres Seq. ID no. 13577877
MGRGRVELKRIENKINRQVTFAKRRNGLLKKAYELSVLCDAEVALIIFSNRGKLYEFSSTQSMPKTLEKYQKCSFAGPETALQNRENEQLKSSRNEYLKLKARVDNLQRTQRNLLGEDLESLGIKELEHLEKQLDSSLKHIRSTRTQHMVDQLTELQKKEQMFCEANKCLRRRLEESNQVIWQHAWEQSERHSEVQPQQLNGNNFFHPLDGAGEPTLQIGYPSEALTSSCMTTFLPPWLP

SEQ ID NO: 11983 - protein, 178 aa, Zea mays subsp. mays
  peptide (1)..(178): Ceres Seq. ID no. 13577878
MPKTLEKYQKCSFAGPETALQNRENEQLKSSRNEYLKLKARVDNLQRTQRNLLGEDLESLGIKELEHLEKQLDSSLKHIRSTRTQHMVDQLTELQKKEQMFCEANKCLRRRLEESNQVIWQHAWEQSERHSEVQPQQLNGNNFFHPLDGAGEPTLQIGYPSEALTSSCMTTFLPPWLP

SEQ ID NO: 11984 - DNA, 1504 bp, Zea mays subsp. mays
  misc_feature (1)..(1504): Ceres Seq. ID no. 13492786
  misc_feature (1)..(1504): Ortholog of  Ceres SEQ ID NO 13523550 as cited in SEQ ID NO 58816
gtcttgtttcgctgtcttgttccgcgctccccaacccccctcccaaccccaaccccgtcccaacccccactacggccttccccccatggctcccctggcctcccttcctctcccgcccagtactgccgtcaccgctcgcttcctcgccgcccccgccatccgcgtgatcagcccatcgcggcccgcgctgccgctcctctcatccgcctccgcaggcggcttccctcacgcctctcgcgctccctgcagtgccgcccgcgagcaccgccgcggcaccgtgcgggaatgctctcgagctgatgctgctggagcagctccattatcaaagacactgttagacctcaaggattcctgctggagatttttaaggccacatacaatccgaggaactgctttaggatccatagcattggttgcgagagccttgatagagaattcccatctgataaactggtggttgatattcaaagcattctatggacttggggcattgatatttggcaatggttacatagttgggattaatcagatctatgatgttgctattgacaagataaacaagccatatttacccattgctgctggtgatctctcaattcagtcagcatggttgttggtgatattatttgcagctgcaggtttttcaattgttatatcaaactttggacctttcattacctctctatactgccttggcctatttcttggcactatatattctgttcctccattcagactgaagagatatccggttgctgcttttcttatcattgcaacggttcgtggtttccttctcaactttggcgtgtactatgctactagggctgcactaggtcttacattccaatggagctcccctgttgctttcattacatgcttcgtgacactatttgctttggtcattgctataaccaaagatctccctgatgttgaaggagatcgcaagtatcaaatatcaactttggcaacaaagcttggtgtcagaaatattgcattccttggatctggtttattattagcaaactatattgctgctattgctgtagcttttaccatgcctcaggctttcaggtgcactgtaatggttcctgtgcatgctgtccttgctggtggtttaattttccagacatgggttctggagcaagcgaagtacagaaaggatgctatttcgcagtactatcggttcatctggaatctcttctatgctgaatatatcttcttcccgttaatatagagaggtgagtttcctgattagcattcagcatccatgaccctttgcttctgacatttgtctgcacaaaaaaatgtcagatcttgtagttcatcttgatcttgggctacagcctaattcatggtgaaaagagggagaagttggcaaagtgaggtctgtcgtgcatattttcaacggaaacaatggagtagcaatattgctatgctagggttctgaagttgtaggagcttttctaagcttttacgatgttgaaggcgttgttggagctgtggc

SEQ ID NO: 11985 - protein, 410 aa, Zea mays subsp. mays
  peptide (1)..(410): Ceres Seq. ID no. 13492787
SCFAVLFRAPQPPSQPQPRPNPHYGLPPMAPLASLPLPPSTAVTARFLAAPAIRVISPSRPALPLLSSASAGGFPHASRAPCSAAREHRRGTVRECSRADAAGAAPLSKTLLDLKDSCWRFLRPHTIRGTALGSIALVARALIENSHLINWWLIFKAFYGLGALIFGNGYIVGINQIYDVAIDKINKPYLPIAAGDLSIQSAWLLVILFAAAGFSIVISNFGPFITSLYCLGLFLGTIYSVPPFRLKRYPVAAFLIIATVRGFLLNFGVYYATRAALGLTFQWSSPVAFITCFVTLFALVIAITKDLPDVEGDRKYQISTLATKLGVRNIAFLGSGLLLANYIAAIAVAFTMPQAFRCTVMVPVHAVLAGGLIFQTWVLEQAKYRKDAISQYYRFIWNLFYAEYIFFPLI

SEQ ID NO: 11986 - protein, 382 aa, Zea mays subsp. mays
  peptide (1)..(382): Ceres Seq. ID no. 13492788
MAPLASLPLPPSTAVTARFLAAPAIRVISPSRPALPLLSSASAGGFPHASRAPCSAAREHRRGTVRECSRADAAGAAPLSKTLLDLKDSCWRFLRPHTIRGTALGSIALVARALIENSHLINWWLIFKAFYGLGALIFGNGYIVGINQIYDVAIDKINKPYLPIAAGDLSIQSAWLLVILFAAAGFSIVISNFGPFITSLYCLGLFLGTIYSVPPFRLKRYPVAAFLIIATVRGFLLNFGVYYATRAALGLTFQWSSPVAFITCFVTLFALVIAITKDLPDVEGDRKYQISTLATKLGVRNIAFLGSGLLLANYIAAIAVAFTMPQAFRCTVMVPVHAVLAGGLIFQTWVLEQAKYRKDAISQYYRFIWNLFYAEYIFFPLI

SEQ ID NO: 11987 - DNA, 1481 bp, Zea mays subsp. mays
  misc_feature (1)..(1481): Ceres Seq. ID no. 12341277
  misc_feature (1)..(1481): Ortholog of  Ceres SEQ ID NO 13598272 as cited in SEQ ID NO 69297
ctgttccggctctgtggagcgccgccccttctccgacgtggcgcctcagtatttgttagggttttctccgggattgaaggcactgctgcaggctgaaacgtttctcgcttgattggcggaagaagggattccagcgatctgtttgctgctagctgcgagagttcaatatgtctcggaccttcaaatcgacgacgggtctctctcggcggtttctgaatctgatcgcggccaaccactcccctggcgtcaagtcgctgcaccgcatcggcctgggtcgcatctttaactcaacgccagggccaataccaaacggagatcgattggagtccgcagcaggacaagaagactacatggtgcggccccgcgcgttggatatcattcggctccccacgccggtaatgagcttccgatcttcagcgtcatttgaaagcaaagaatggaagttggattgcttcccgttatcggactgcaaagttttctgcatggaccagtcagggcgcggtttcctcttcgatgccaactcgtgcggggtgtcaaccgtggcccatctccatacacccaaggtgaagcccatctccctctctatcccccaacccaatgttgacgaagacgaccacaacgacgagtggggcagcaaacttttcatcttggagagcatgcccgaagaaccagaggtgaactgccagttcgaggccttcatctaccgcatgcgagatgtgtatcccagggtactgaaacattggaatcgccacctcgtcccaccgccgccgccattcatccgtgagacagttaaccagaatagccgccgccttgaggttacatcttatgctgtgattgaggatggctcccacatctgcatatccattgagggcgctggcacctactgcatgcacacggtcagccacacgtggaaccgggtcggcgagtggacactacccttccgtggcaagattgagtacgtgcccgagctcaaactctggtttggcacctctgccgagtctgggcacctggctgcggctgacctctctgccatggactcccagccacagctagtgggtacttggaaggaacttgatccgccagagggttggaaggaatgcaaggattctcaggttgtcaacctcggctccggtaggttctgtatagcaaggttctttaagaaaaatccagtggacgtacgttctggtgacgaactaccgggccagagttttgctgtccttaccggcgtggaggtggtgaatcgagggtgtgatgcggaagtggaactccggatggtcactcacaaatcgaggcgagtcaacagcactacaatcgagacattgttctgattttatccattatgtgtcatctgaattagtaaaagccatcttttcttggcatctatttcttgtgtttctctctgttctcagtgtattgttcttcgatgctgaaactgattcaacttatgtacgctcttgatttacaaatttctgttgtgcttc

SEQ ID NO: 11988 - protein, 386 aa, Zea mays subsp. mays
  peptide (1)..(386): Ceres Seq. ID no. 12341278
MSRTFKSTTGLSRRFLNLIAANHSPGVKSLHRIGLGRIFNSTPGPIPNGDRLESAAGQEDYMVRPRALDIIRLPTPVMSFRSSASFESKEWKLDCFPLSDCKVFCMDQSGRGFLFDANSCGVSTVAHLHTPKVKPISLSIPQPNVDEDDHNDEWGSKLFILESMPEEPEVNCQFEAFIYRMRDVYPRVLKHWNRHLVPPPPPFIRETVNQNSRRLEVTSYAVIEDGSHICISIEGAGTYCMHTVSHTWNRVGEWTLPFRGKIEYVPELKLWFGTSAESGHLAAADLSAMDSQPQLVGTWKELDPPEGWKECKDSQVVNLGSGRFCIARFFKKNPVDVRSGDELPGQSFAVLTGVEVVNRGCDAEVELRMVTHKSRRVNSTTIETLF

SEQ ID NO: 11989 - protein, 325 aa, Zea mays subsp. mays
  peptide (1)..(325): Ceres Seq. ID no. 12341279
MVRPRALDIIRLPTPVMSFRSSASFESKEWKLDCFPLSDCKVFCMDQSGRGFLFDANSCGVSTVAHLHTPKVKPISLSIPQPNVDEDDHNDEWGSKLFILESMPEEPEVNCQFEAFIYRMRDVYPRVLKHWNRHLVPPPPPFIRETVNQNSRRLEVTSYAVIEDGSHICISIEGAGTYCMHTVSHTWNRVGEWTLPFRGKIEYVPELKLWFGTSAESGHLAAADLSAMDSQPQLVGTWKELDPPEGWKECKDSQVVNLGSGRFCIARFFKKNPVDVRSGDELPGQSFAVLTGVEVVNRGCDAEVELRMVTHKSRRVNSTTIETLF

SEQ ID NO: 11990 - protein, 309 aa, Zea mays subsp. mays
  peptide (1)..(309): Ceres Seq. ID no. 12341280
MSFRSSASFESKEWKLDCFPLSDCKVFCMDQSGRGFLFDANSCGVSTVAHLHTPKVKPISLSIPQPNVDEDDHNDEWGSKLFILESMPEEPEVNCQFEAFIYRMRDVYPRVLKHWNRHLVPPPPPFIRETVNQNSRRLEVTSYAVIEDGSHICISIEGAGTYCMHTVSHTWNRVGEWTLPFRGKIEYVPELKLWFGTSAESGHLAAADLSAMDSQPQLVGTWKELDPPEGWKECKDSQVVNLGSGRFCIARFFKKNPVDVRSGDELPGQSFAVLTGVEVVNRGCDAEVELRMVTHKSRRVNSTTIETLF

SEQ ID NO: 11991 - DNA, 1831 bp, Zea mays subsp. mays
  misc_feature (1)..(1831): Ceres Seq. ID no. 12413529
  misc_feature (1)..(1831): Ortholog of  Ceres SEQ ID NO 12625335 as cited in SEQ ID NO 63326
gcacgagaccattacctagaacatcctaatcgaaaaactccgcctccgctccccgctcgccgccgagattgctggattggctgccgccagcgccccggtgctagctcccgttcctcgcggtggtcgctggactagcctggacgccgcggcccgccgcctggtcgaagagatggactcggtcatggccgcccccgactcgccgccgcagactgtcgtgctcgtctctgccggcgccagccactccgtcgcgctcctcacgggcaatgtcctgtgctcgtggggcaggggcgaggacgggcagctcggccacggcgacgcggaggaccggctcgtgcccacggtgcttagcggcttcgacgcgcccgcgatcacgtcagtcatctgcggtgccgaccacaccaccgcctactccgaggacgagctgcaggtctacagctggggctggggagacttcgggaggctggggcatggcaactccagcgacgtcttcacgccccagcctgtcaaggcgctgcaggggctcaagatcaaacagattgcctgcggggacagccattgtcttgccgtcaccatggccggagaagtgcagagttggggccgtaaccaaaacggacagctaggccttggaaccactgaagactcgctgctcccacagaagattcaggcttttgagagtgtttgcgtgaaaatgattgctgccggtgccgaacatactgctgcagtaactgaagacggtgacctctacggatggggttggggtcgatatggaaacttaggtcttggtgaccgtaatgaccgtttgcttcctgaaaaagtatcttctgtggagggtgagaagatggtgcttgtggcatgtggatggcgccatacaattactgtttctgactctggtaatctgtacacttatggttggagcaaatacggtcaactagggcatggtgattttgaagatcatttagttccacataaagtagaagctttgaaagatagcactatatcccagatttcaggcggctggaggcatacgatggcacttacatcagagggaaagctttacggatggggatggaacaagttcggacaagtcggagtcggcaacaacgacgaccacagctcccccggacaagtcagttttccaggatcagaaaatctcccaggttgcatgcggatggaggcacactctggccctctccgagaagaaaaatgtcttctcctgggggaggggcactagcggacagctcggcaacggtgaaatagtcgacaggaacacacctgtgctgatcgatgccctgagctcagatggttctgcctgcaagaagctagagtcatccacggcagccccgttcgcagccaaagtttgggtgtcgccgtcagaacgatacgccattgtccctgacgagaacgtccgtaaagcaggcggaggcacggcacgaggcaacggcgccgacgcgaacgtgccggagaacgacgtgaagaggatgcgcgtgcagtcgtcgtagtaggtcttctactaccgtccactccaccccacccccgttaaccctactactagtagtaagtactacgaagaaccggtgccccatctagcggcgcccgatttttgtgcgttacgttctgcctaaaagtgctttccgtcgacggacggacctcctggtgttgagatggtagcggtagcactgcctcgcgggcgatggtgtgtgtgtgttgtgacgtgattcacctcttagagtagagaggtggctagcccagtcgacctgtgtgtgttgttaagatgtgtcctggatcttttgtgacattgcatgggagggtacaaataagcgcttcgtttctg

SEQ ID NO: 11992 - protein, 353 aa, Zea mays subsp. mays
  peptide (1)..(353): Ceres Seq. ID no. 12413530
MDSVMAAPDSPPQTVVLVSAGASHSVALLTGNVLCSWGRGEDGQLGHGDAEDRLVPTVLSGFDAPAITSVICGADHTTAYSEDELQVYSWGWGDFGRLGHGNSSDVFTPQPVKALQGLKIKQIACGDSHCLAVTMAGEVQSWGRNQNGQLGLGTTEDSLLPQKIQAFESVCVKMIAAGAEHTAAVTEDGDLYGWGWGRYGNLGLGDRNDRLLPEKVSSVEGEKMVLVACGWRHTITVSDSGNLYTYGWSKYGQLGHGDFEDHLVPHKVEALKDSTISQISGGWRHTMALTSEGKLYGWGWNKFGQVGVGNNDDHSSPGQVSFPGSENLPGCMRMEAHSGPLREEKCLLLGEGH

SEQ ID NO: 11993 - protein, 349 aa, Zea mays subsp. mays
  peptide (1)..(349): Ceres Seq. ID no. 12413531
MAAPDSPPQTVVLVSAGASHSVALLTGNVLCSWGRGEDGQLGHGDAEDRLVPTVLSGFDAPAITSVICGADHTTAYSEDELQVYSWGWGDFGRLGHGNSSDVFTPQPVKALQGLKIKQIACGDSHCLAVTMAGEVQSWGRNQNGQLGLGTTEDSLLPQKIQAFESVCVKMIAAGAEHTAAVTEDGDLYGWGWGRYGNLGLGDRNDRLLPEKVSSVEGEKMVLVACGWRHTITVSDSGNLYTYGWSKYGQLGHGDFEDHLVPHKVEALKDSTISQISGGWRHTMALTSEGKLYGWGWNKFGQVGVGNNDDHSSPGQVSFPGSENLPGCMRMEAHSGPLREEKCLLLGEGH

SEQ ID NO: 11994 - protein, 219 aa, Zea mays subsp. mays
  peptide (1)..(219): Ceres Seq. ID no. 12413532
MAGEVQSWGRNQNGQLGLGTTEDSLLPQKIQAFESVCVKMIAAGAEHTAAVTEDGDLYGWGWGRYGNLGLGDRNDRLLPEKVSSVEGEKMVLVACGWRHTITVSDSGNLYTYGWSKYGQLGHGDFEDHLVPHKVEALKDSTISQISGGWRHTMALTSEGKLYGWGWNKFGQVGVGNNDDHSSPGQVSFPGSENLPGCMRMEAHSGPLREEKCLLLGEGH

SEQ ID NO: 11995 - DNA, 1859 bp, Zea mays subsp. mays
  misc_feature (1)..(1859): Ceres Seq. ID no. 12343907
  misc_feature (1)..(1859): Ortholog of  Ceres SEQ ID NO 14314823 as cited in SEQ ID NO 52565
  misc_feature (1)..(1859): Ortholog of  Ceres SEQ ID NO 14307324 as cited in SEQ ID NO 54131
  misc_feature (1)..(1859): Ortholog of  Ceres SEQ ID NO 14303336 as cited in SEQ ID NO 54567
acacaccccatgccttgcctcctcctcctgcctgcctgcctgcctttccctcgccgctcgcggcaagatccacatgcagtagtaggagtaggagcagcaagcaacaagggagggagggagcgaggtcttgggctctcgctctcttgttagttcctgcgtgcttgccctgccctggatcggctttcaaatcgggaacaacgacagatccgaggctttctcgaatcgggcaggtccatcaaatcgcaagtttagccagccccagccccagccccaggcacagccagctagccgtcaaatcactcacactcatcaaatcaaaggggaccaaaaggatatctcctggctcctgcccctctcccctctcctctcctagcgagctactcgtataaaattcccctttcgactctccccccacccacatacctgactctcctccgatctctcagcacgctcctcttctgctaccttgctttccctgctgcgatccgttccttgctctattagtattagctagccggccggccggatcgatcgagcaaggagaggcgccccagcagtcctcgtcggatcgatccatctcgtcgacagcgtcagcgcctcaggtggatcggagcggaggtggtggaccggagctagtagctgccagccacacatttcggtcgtcggaaccacatatcatgatgtcgtcctcgtcctcgtcctcgtcgtcggccgcctgctgcttcccgctggaccacctcgcgccgtcccccaccgagcagctctgctacgtgcactgcaactgctgcgacaccatcctcgccgtcggcgtgccctgcagcagcctgttcaagacggtgacggtgcgctgcggccactgcgccaacctactctccgtnaacctccgcggcctcctgctcccgcccgccgcgccggcgccgcccaaccatctcaacttcgctcactccttgctgtcacccacatccccgcatggcctcttggacgagttggctctccagcaggcgccgagcttcctgatggagcaggcgagtgccaacctgagcagcaccatgacgggccgcagcagcaacagcagctgcgccagcaacctgccgccgccggcgccgatgcctgcagctcagcctgtgcagcaggaagccgaactgcccaagaccgccccgtcggtaaacaggcctccggagaagcggcagagagtcccgtcggcatacaaccggttcatcaaggacgagatccagcgcatcaaggccggcaacccggacatcacccaccgggaggcgttcagcgcagccgcaaagaattgggcccatttcccacacatccacttcggcctcatgccggaccagggcctcaagaagaccttcaagactcatcaggatggcgctgaagacatgctactcaaagacgatctctacgccgcagcggctgcagctgcagcagccaacatgggcatcactccattctaataactctggttaggcatgtgttctgaatcagctggcacgtcgtagtggctatcgccctttgtgctgcattctagggtttcgtctcagatcttgatctcaacatcgatcgtgtgtcgtttaattagagtactttccagtgtggggatagaaatggagaataatcaagttagagcgcgcatcaagtaggccactgatgatccgtaggtacagacttgattgtctcctctatatatcccttttcatttcatgttctctctctttttcctattttttgttcctggaccccttcaactcgccagtagagagctcgttgtgcctctccaatcccatgtttgcgtatgtctgctcaacaacatgtttttaccatggagaacaagttgaacatctgttagatct

SEQ ID NO: 11996 - protein, 261 aa, Zea mays subsp. mays
  peptide (1)..(261): Ceres Seq. ID no. 12343908
  misc_feature (67)..(67): Xaa is any aa, unknown or other
MMSSSSSSSSSAACCFPLDHLAPSPTEQLCYVHCNCCDTILAVGVPCSSLFKTVTVRCGHCANLLSXNLRGLLLPPAAPAPPNHLNFAHSLLSPTSPHGLLDELALQQAPSFLMEQASANLSSTMTGRSSNSSCASNLPPPAPMPAAQPVQQEAELPKTAPSVNRPPEKRQRVPSAYNRFIKDEIQRIKAGNPDITHREAFSAAAKNWAHFPHIHFGLMPDQGLKKTFKTHQDGAEDMLLKDDLYAAAAAAAAANMGITPF

SEQ ID NO: 11997 - protein, 260 aa, Zea mays subsp. mays
  peptide (1)..(260): Ceres Seq. ID no. 12343909
  misc_feature (66)..(66): Xaa is any aa, unknown or other
MSSSSSSSSSAACCFPLDHLAPSPTEQLCYVHCNCCDTILAVGVPCSSLFKTVTVRCGHCANLLSXNLRGLLLPPAAPAPPNHLNFAHSLLSPTSPHGLLDELALQQAPSFLMEQASANLSSTMTGRSSNSSCASNLPPPAPMPAAQPVQQEAELPKTAPSVNRPPEKRQRVPSAYNRFIKDEIQRIKAGNPDITHREAFSAAAKNWAHFPHIHFGLMPDQGLKKTFKTHQDGAEDMLLKDDLYAAAAAAAAANMGITPF

SEQ ID NO: 11998 - protein, 148 aa, Zea mays subsp. mays
  peptide (1)..(148): Ceres Seq. ID no. 12343910
MEQASANLSSTMTGRSSNSSCASNLPPPAPMPAAQPVQQEAELPKTAPSVNRPPEKRQRVPSAYNRFIKDEIQRIKAGNPDITHREAFSAAAKNWAHFPHIHFGLMPDQGLKKTFKTHQDGAEDMLLKDDLYAAAAAAAAANMGITPF

SEQ ID NO: 11999 - DNA, 1312 bp, Zea mays subsp. mays
  misc_feature (1)..(1312): Ceres Seq. ID no. 12374092
  misc_feature (1)..(1312): Ortholog of  Ceres SEQ ID NO 14304863 as cited in SEQ ID NO 54200
  misc_feature (1)..(1312): Ortholog of  Ceres SEQ ID NO 13598340 as cited in SEQ ID NO 68543
gactctcgagagatagagcgaggcaccaagaaggggaaaaagagggacaggaaaaaaaaatcattctcgtttcgcgctgtccgctagaccccgcccgaatcaatggagattagggctccgccgacgagcctgaggctcgcgccgccgcccgcctccgccagcttccgccgaaccccgcttaggacctccttccttcgcggcagcgtgtcacttaaagttgtgcaagtacggcagtcaaatgtcaacagatttaagtgcaatagcatacgaagtaacctctttgataggctaacaagggttgtcaggtcctacgcaaatgcagttctaagttcgtttgaagaccctgagaagattctagaccaggcagttctggagatgaatgatgacttgacaaagatgcggcaggccactgcacaggtcttggcatctcaaaagcggcttgagaataaatctaaagctgcagaacaagcttctgctgattggtatcggagggctcaacttgctcttcaaaagggtgacgaggatcttgctcgtgaagcccttaagcggcgtaaatcatatgctgacaatgcaagctccttaagatcccagcttgatcagcagaagggtgtagttgaaaatctgatttcaaatacccggcttcttgagagcaagatatcagaggccaagcagaaaaaggataccctaaaagctcgtgctcaatcagcaaagactgctacaaaagtgagtgaaatgttgggcaacgtgaatacaagtagcgccctttctgcatttgagaaaatggaggaaaaagttatggcgatggaatcccaagcagaggcactcggccagttagcaactgatgatttagaaggaaagtttgcactgcttgagacttcatctgttgatgatgatctttcacaactgaaaaaggaattgtctggaagctctttgaaaggagagcttcctccaggcagaacagcggtcagcaactcaggtgctgggcgccctttccccgacctagagattgaaagcgagctaaacgagctgcggaggaaagccaaggaatattaggctcattccttgtcgattcagcaggcctgacggaatctcacttccaagaaaatatagtgcagctgcagattgctccattgcgcgtttcgaaagttgaaacacaagtgcgcattgactgtttgttaaagagtatggaatcggctaatttctcggcattttcccccctcgagtgacatttgtacagctatccataaaattgttgtaaatcactactctctctacagcctttttttgcatatatatatatagtcaaagttcg

SEQ ID NO: 12000 - protein, 316 aa, Zea mays subsp. mays
  peptide (1)..(316): Ceres Seq. ID no. 12374093
MEIRAPPTSLRLAPPPASASFRRTPLRTSFLRGSVSLKVVQVRQSNVNRFKCNSIRSNLFDRLTRVVRSYANAVLSSFEDPEKILDQAVLEMNDDLTKMRQATAQVLASQKRLENKSKAAEQASADWYRRAQLALQKGDEDLAREALKRRKSYADNASSLRSQLDQQKGVVENLISNTRLLESKISEAKQKKDTLKARAQSAKTATKVSEMLGNVNTSSALSAFEKMEEKVMAMESQAEALGQLATDDLEGKFALLETSSVDDDLSQLKKELSGSSLKGELPPGRTAVSNSGAGRPFPDLEIESELNELRRKAKEY

SEQ ID NO: 12001 - protein, 225 aa, Zea mays subsp. mays
  peptide (1)..(225): Ceres Seq. ID no. 12374094
MNDDLTKMRQATAQVLASQKRLENKSKAAEQASADWYRRAQLALQKGDEDLAREALKRRKSYADNASSLRSQLDQQKGVVENLISNTRLLESKISEAKQKKDTLKARAQSAKTATKVSEMLGNVNTSSALSAFEKMEEKVMAMESQAEALGQLATDDLEGKFALLETSSVDDDLSQLKKELSGSSLKGELPPGRTAVSNSGAGRPFPDLEIESELNELRRKAKEY

SEQ ID NO: 12002 - protein, 218 aa, Zea mays subsp. mays
  peptide (1)..(218): Ceres Seq. ID no. 12374095
MRQATAQVLASQKRLENKSKAAEQASADWYRRAQLALQKGDEDLAREALKRRKSYADNASSLRSQLDQQKGVVENLISNTRLLESKISEAKQKKDTLKARAQSAKTATKVSEMLGNVNTSSALSAFEKMEEKVMAMESQAEALGQLATDDLEGKFALLETSSVDDDLSQLKKELSGSSLKGELPPGRTAVSNSGAGRPFPDLEIESELNELRRKAKEY

SEQ ID NO: 12003 - DNA, 1005 bp, Zea mays subsp. mays
  misc_feature (1)..(1005): Ceres Seq. ID no. 12365007
  misc_feature (1)..(1005): Ortholog of  Ceres SEQ ID NO 14316536 as cited in SEQ ID NO 60272
  misc_feature (1)..(1005): Ortholog of  Ceres SEQ ID NO 13598570 as cited in SEQ ID NO 65434
  misc_feature (1)..(1005): Ortholog of  Ceres SEQ ID NO 13596238 as cited in SEQ ID NO 68834
  misc_feature (1)..(1005): Ortholog of  Ceres SEQ ID NO 15174329 as cited in SEQ ID NO 0
ggagagcatcaaagcaagccatgtggaggagggctttagcgatggtcctgttcatggctggcgccgcgctgctcgccggggctgccggcgccggcgcgcagcaggggcgtgtggagcatcatcacccggcccatgttccagagcatgctgagccaccgcggcgacagcgggtgccagggcgccttctacacctacgacgccttcatcgaggccgccagcaagttccccggcttcggcaccaccggcgacgagcagacgcgcaggcgggagctcgccgccttcttcggccagacgtcccacgaaaccaccggtggatgggcgactgctccggatggaccgtttgcctggggatactgccgggtgaaggaacagaaacagacggacccaccctactatggacgaggacccatacagctaactcataagtacaactacaggctcgccgggcaagcgctgaacctgaacctggtgggcgacccggacctggtggcgagagaccccgtggtagccttcaagacggccatctggttctggatgacgccgcagtcgcccaagccgtcgtgccacgccgtgatgaccggcgactggaggccctccgccaccgaccgcgccgcggggaggctccccggatacggcctgaccacgaacatcatcaacggcggcctagagtgcggcgaggaccgctccaccgacggcgccaaagccgccaaggaccgggtcggctactacaagaggtactgcggtatgctccgagtggggtacggggacaacatggcatgcaggaaccagaagccttacggaggatgatgacactagtagctgatctatggttgctgcaatgcaagccttcacgtgtgtttgcctctctacctaaagaataaatcaagctagcagcgaacctaccttcggcgtgtgtctacttgcttatcatagtgtgtgtctgtgtatgagagatgatgtactgtcacgtgtgtatgagagaggatatatggtaagactatcact

SEQ ID NO: 12004 - protein, 224 aa, Zea mays subsp. mays
  peptide (1)..(224): Ceres Seq. ID no. 12365008
MFQSMLSHRGDSGCQGAFYTYDAFIEAASKFPGFGTTGDEQTRRRELAAFFGQTSHETTGGWATAPDGPFAWGYCRVKEQKQTDPPYYGRGPIQLTHKYNYRLAGQALNLNLVGDPDLVARDPVVAFKTAIWFWMTPQSPKPSCHAVMTGDWRPSATDRAAGRLPGYGLTTNIINGGLECGEDRSTDGAKAAKDRVGYYKRYCGMLRVGYGDNMACRNQKPYGG

SEQ ID NO: 12005 - protein, 220 aa, Zea mays subsp. mays
  peptide (1)..(220): Ceres Seq. ID no. 12365009
MLSHRGDSGCQGAFYTYDAFIEAASKFPGFGTTGDEQTRRRELAAFFGQTSHETTGGWATAPDGPFAWGYCRVKEQKQTDPPYYGRGPIQLTHKYNYRLAGQALNLNLVGDPDLVARDPVVAFKTAIWFWMTPQSPKPSCHAVMTGDWRPSATDRAAGRLPGYGLTTNIINGGLECGEDRSTDGAKAAKDRVGYYKRYCGMLRVGYGDNMACRNQKPYGG

SEQ ID NO: 12006 - protein, 140 aa, Zea mays subsp. mays
  peptide (1)..(140): Ceres Seq. ID no. 12365010
RASKQAMWRRALAMVLFMAGAALLAGAAGAGAQQGRVEHHHPAHVPEHAEPPRRQRVPGRLLHLRRLHRGRQQVPRLRHHRRRADAQAGARRLLRPDVPRNHRWMGDCSGWTVCLGILPGEGTETDGPTLLWTRTHTANS

SEQ ID NO: 12007 - DNA, 744 bp, Zea mays subsp. mays
  misc_feature (1)..(744): Ceres Seq. ID no. 12341175
  misc_feature (1)..(744): Ortholog of  Ceres SEQ ID NO 13594172 as cited in SEQ ID NO 58419
accattcagtcatgcccctcgctgcgcagatcctctctgttccggcgtgctctgctaggcaggaagagatctttcatttctgccagcagttctgaggatgccgaatccggcactcccccgccgcttggtggcgacaaacaccagcaggaggttcttgcacagatcgccatgcttcagacgcagaaggtgcgcatcacagacttcttggacgagcgctctgcttacctgaccaagttcgccaaggacgccgactcggagttcgacctgattgggcagaacgccatgaaagaacttgatgccgttggtgaccagatactggagaggctcgacagcaagatgcaagccttcgaggagacggctgaggtacaacggcaagagatagaaatgaacgataaggtgttagaggacttcgaagactggattgagaaggagaaaaacgaaggaatgttcttcaaaagccttggcaaggtcaaacctcggaacaagatggaaataaaggtgaaagccaaggtggaagcacagaaggtcaaagagattgcagaggagagtgcaggatcaaaaactcgtatgaacatttacctggggctgatggggatactcgggattacaattgcgaatgccatctttgcaacaccagaggtggagtggaggaaggttgctgctctgggtctgattttcattggtctggttgctcaggtcatctacgagcaggatatctcaccgccggaagctgagaagacagag

SEQ ID NO: 12008 - protein, 248 aa, Zea mays subsp. mays
  peptide (1)..(248): Ceres Seq. ID no. 12341176
TIQSCPSLRRSSLFRRALLGRKRSFISASSSEDAESGTPPPLGGDKHQQEVLAQIAMLQTQKVRITDFLDERSAYLTKFAKDADSEFDLIGQNAMKELDAVGDQILERLDSKMQAFEETAEVQRQEIEMNDKVLEDFEDWIEKEKNEGMFFKSLGKVKPRNKMEIKVKAKVEAQKVKEIAEESAGSKTRMNIYLGLMGILGITIANAIFATPEVEWRKVAALGLIFIGLVAQVIYEQDISPPEAEKTE

SEQ ID NO: 12009 - protein, 192 aa, Zea mays subsp. mays
  peptide (1)..(192): Ceres Seq. ID no. 12341177
MLQTQKVRITDFLDERSAYLTKFAKDADSEFDLIGQNAMKELDAVGDQILERLDSKMQAFEETAEVQRQEIEMNDKVLEDFEDWIEKEKNEGMFFKSLGKVKPRNKMEIKVKAKVEAQKVKEIAEESAGSKTRMNIYLGLMGILGITIANAIFATPEVEWRKVAALGLIFIGLVAQVIYEQDISPPEAEKTE

SEQ ID NO: 12010 - protein, 154 aa, Zea mays subsp. mays
  peptide (1)..(154): Ceres Seq. ID no. 12341178
MKELDAVGDQILERLDSKMQAFEETAEVQRQEIEMNDKVLEDFEDWIEKEKNEGMFFKSLGKVKPRNKMEIKVKAKVEAQKVKEIAEESAGSKTRMNIYLGLMGILGITIANAIFATPEVEWRKVAALGLIFIGLVAQVIYEQDISPPEAEKTE

SEQ ID NO: 12011 - DNA, 460 bp, Zea mays subsp. mays
  misc_feature (1)..(460): Ceres Seq. ID no. 13573968
  misc_feature (1)..(460): Ortholog of  Ceres SEQ ID NO 14309727 as cited in SEQ ID NO 1030
  misc_feature (1)..(460): Ortholog of  Ceres SEQ ID NO 15224315 as cited in SEQ ID NO 66131
ctcaagaaaatgactggcttcaatgccttttggtttactcaccacttatttgttattgtgtatgcactgctcattgtccatgggacctgtttatatctaagcaggaaatggtacaagaaaacgacatggatgtaccttgctgtccctgtgctcttgtatgtaagtgagcgcattcttcggctatttaggagccatgatgctgttaggattcagaaggttgcagtatatccagggaatgttttggctctctatatgtccaagccacctggattcaggtatcggagtgggcagtatatcttcataaaatgcagtgatgtctctccatacgaatggcacccattttcgattacatcagcaccaggagatgattatcttagtgtccacattcgcacaaggggtgattggacttcacgtcttaggactgtcttctctgaggcatgccgccctccatctgatggag

SEQ ID NO: 12012 - protein, 153 aa, Zea mays subsp. mays
  peptide (1)..(153): Ceres Seq. ID no. 13573969
LKKMTGFNAFWFTHHLFVIVYALLIVHGTCLYLSRKWYKKTTWMYLAVPVLLYVSERILRLFRSHDAVRIQKVAVYPGNVLALYMSKPPGFRYRSGQYIFIKCSDVSPYEWHPFSITSAPGDDYLSVHIRTRGDWTSRLRTVFSEACRPPSDG

SEQ ID NO: 12013 - protein, 150 aa, Zea mays subsp. mays
  peptide (1)..(150): Ceres Seq. ID no. 13573970
MTGFNAFWFTHHLFVIVYALLIVHGTCLYLSRKWYKKTTWMYLAVPVLLYVSERILRLFRSHDAVRIQKVAVYPGNVLALYMSKPPGFRYRSGQYIFIKCSDVSPYEWHPFSITSAPGDDYLSVHIRTRGDWTSRLRTVFSEACRPPSDG

SEQ ID NO: 12014 - protein, 110 aa, Zea mays subsp. mays
  peptide (1)..(110): Ceres Seq. ID no. 13573971
MYLAVPVLLYVSERILRLFRSHDAVRIQKVAVYPGNVLALYMSKPPGFRYRSGQYIFIKCSDVSPYEWHPFSITSAPGDDYLSVHIRTRGDWTSRLRTVFSEACRPPSDG

SEQ ID NO: 12015 - DNA, 1193 bp, Zea mays subsp. mays
  misc_feature (1)..(1193): Ceres Seq. ID no. 12408082
  misc_feature (1)..(1193): Ortholog of  Ceres SEQ ID NO 15225046 as cited in SEQ ID NO 57061
  misc_feature (1)..(1193): Ortholog of  Ceres SEQ ID NO 15173586 as cited in SEQ ID NO 61901
  misc_feature (1)..(1193): Ortholog of  Ceres SEQ ID NO 15179881 as cited in SEQ ID NO 66861
cacacacacacacatcctccaccaccattcatcagaaagcgaagcacaagcctctgatgccaagccaaagcacacacacctcctccagcctttcttcctctacagccccaattcttccctgcagctctgctgctgccttgtttcgatcggtcatggcggcggtggccacagagactccgttccatgtcctggcggtggacgacagcctcccggacaggaagctcatcgagaggctcctcaagacctcttccttccaagtgaccactgtcgactccgggagcaaggcgctgcagttcctgggcctccatgaccaggacagcacggttcctcctgtccacacgcaccagctggatgtggctgccaatcaggatgtggctgtgaacctgatcatcacagactactgcatgcctggcatgacaggatatgacctgctcaagaagatcaaggagtcgtcgtctctcagagatatcccggtggtgatcatgtcctctgagaacattccttcaaggatcaataggtgcctggaggaaggagctgacgagttcttcctaaaacctgtgcggctatcagacatgaacaagctcaagccccacatactgaaaagcagatgcaaccaggaacagcaccagcaaagtgacagtcacagtggcgaacgcaggaaccccacaatcggcagcagcagcgatagcataaacaaccgcaagagaaagggtgcaggcaccgaagaaatcttgccccagctggcaaacagatcaaggcacagttaactgagaactgactagtacagctaaaaccttttctttttcactttactttggcctactgatttgtaacgtagatgttagccctggatttgcaaaacggaacggaatctgtaaactgatactgcttgagtcgaatcgatcgaagtgattctgcaccagatctccctatttcatttatcagaatcgaaagccagctgacagagtcacagtaacagcccgttggacatagcagcaggtgccgaagccaagaacatctgaaactgaccgtcggataacctacgatgggagtagccttttactgcttctaagctttagcctggatacaagttgtcactacagtagtcagtagggcagtaacttggtgcatctccaagagttttcaaaacacactgtcaatctagaaatttttggtgatgtagcttctcccac

SEQ ID NO: 12016 - protein, 254 aa, Zea mays subsp. mays
  peptide (1)..(254): Ceres Seq. ID no. 12408083
HTHTSSTTIHQKAKHKPLMPSQSTHTSSSLSSSTAPILPCSSAAALFRSVMAAVATETPFHVLAVDDSLPDRKLIERLLKTSSFQVTTVDSGSKALQFLGLHDQDSTVPPVHTHQLDVAANQDVAVNLIITDYCMPGMTGYDLLKKIKESSSLRDIPVVIMSSENIPSRINRCLEEGADEFFLKPVRLSDMNKLKPHILKSRCNQEQHQQSDSHSGERRNPTIGSSSDSINNRKRKGAGTEEILPQLANRSRHS

SEQ ID NO: 12017 - protein, 236 aa, Zea mays subsp. mays
  peptide (1)..(236): Ceres Seq. ID no. 12408084
MPSQSTHTSSSLSSSTAPILPCSSAAALFRSVMAAVATETPFHVLAVDDSLPDRKLIERLLKTSSFQVTTVDSGSKALQFLGLHDQDSTVPPVHTHQLDVAANQDVAVNLIITDYCMPGMTGYDLLKKIKESSSLRDIPVVIMSSENIPSRINRCLEEGADEFFLKPVRLSDMNKLKPHILKSRCNQEQHQQSDSHSGERRNPTIGSSSDSINNRKRKGAGTEEILPQLANRSRHS

SEQ ID NO: 12018 - protein, 204 aa, Zea mays subsp. mays
  peptide (1)..(204): Ceres Seq. ID no. 12408085
MAAVATETPFHVLAVDDSLPDRKLIERLLKTSSFQVTTVDSGSKALQFLGLHDQDSTVPPVHTHQLDVAANQDVAVNLIITDYCMPGMTGYDLLKKIKESSSLRDIPVVIMSSENIPSRINRCLEEGADEFFLKPVRLSDMNKLKPHILKSRCNQEQHQQSDSHSGERRNPTIGSSSDSINNRKRKGAGTEEILPQLANRSRHS

SEQ ID NO: 12019 - DNA, 1807 bp, Zea mays subsp. mays
  misc_feature (1)..(1807): Ceres Seq. ID no. 12374088
  misc_feature (1)..(1807): Ortholog of  Ceres SEQ ID NO 13592859 as cited in SEQ ID NO 20479
gagccgcggaggagcagcggcgcatcgcaacactaaccaaagtcctcctctccaggtgccgagccagggtgactgttccgaggagcgtggcgtggacccatgggggaagaagggcaagtggttcggtgccgtcaagaaggtcttcagccccgaatccaaggagaagaaagaggagaggctaaggaggaaatcagcagctagcaacccagcaccggtagatctgaccccatctacctccctggaagtcaatgtttcggtgccaccccctccggctcctcctccagttcctcgccagaccgacgaggtcagggtccccgaagccgagcaggagcagagcaagcatgtcaccctggaggaggcccctgctgctgctgctgccccagcacaggcgtcggtgctgccacctggtgcgccaaccgaagagctcgccgcaatcaagatccagaccgccttccgaggttacctggcaaggagggcactaagagcactacgaggccttgtacgattgaagtcattggttgagggtaattcagttaagcgtcaatctgcaagcactctgcgctgtatgcaaactctatcgcgggtgcagtcacaaatacgatctaggagagcaaagatgtccgaggagaaccaggccctccaacgccagctcctacttaaacaggaactggagaatttcagaatgggtgagaactgggacgacagcactcaatccaaggagcaaatcgaggcaagcctaataagcaggcaagaggcagcgataagaagagaaagagctcttgcatatgcattttcacatcagtggaagagcacatcaagatctgcgaacccaatgtttgtagacccaaataacttgcagtggggctggagctggttggagcgctggatggcagcaaaaccttgggagggacgcaatgggaccgacaaggagagcaacattgatcgcggctccgtcaagaatatgagcttgaaccttggagttggagagggtgagatcacaaaagctttcaaccgccgggactcaaagccagagaagccatcaccaccgactccaaaaccggcccgtccagcttccaggcaatccccttcgacgccctctgctagagtggccccaatacctgcgaggaggaaatccagcacgccaaagaatgggctttcacaggtggacgatgacgtgaggagcgtgctcagtgtgcagtctgagcgaccaaggaggcacagcatagccacgacgtcgaccatgcgggacgatgagagcctcgcgagctccccgtcgctcccgagctacatggttcccacagaatctgcgagggccaaatctcgcacagcaacggccaatggcgcagagacgcctgagaaaggaggctctgctggaccagtcaagaagaggttgtctttccaaggtggagctgcggctgcctcaccgatgcgacggcattctggccctcccaaggtggagagcgctgtgaaggacattgctgcgccaccacagcctgaggccttggtagccaatggtggtggaagcaagtgacttgtattgacaagttccaggatgggggagcgggttatggtcttatggagggacatgtttcatccgtgaacagaagttaagagtggtgccggatctacgaatggtttgaattgttttcccgttacaaccacattgtttgctgtataagattcactgtacctgccagttggttccatttgttgttttctgtaaaacaaacatcaatttgtcactagaatctgtgatgcttgtatgtaaacaggtcctctatttatgtgagccatatatttcattttc

SEQ ID NO: 12020 - protein, 509 aa, Zea mays subsp. mays
  peptide (1)..(509): Ceres Seq. ID no. 12374089
SRGGAAAHRNTNQSPPLQVPSQGDCSEERGVDPWGKKGKWFGAVKKVFSPESKEKKEERLRRKSAASNPAPVDLTPSTSLEVNVSVPPPPAPPPVPRQTDEVRVPEAEQEQSKHVTLEEAPAAAAAPAQASVLPPGAPTEELAAIKIQTAFRGYLARRALRALRGLVRLKSLVEGNSVKRQSASTLRCMQTLSRVQSQIRSRRAKMSEENQALQRQLLLKQELENFRMGENWDDSTQSKEQIEASLISRQEAAIRRERALAYAFSHQWKSTSRSANPMFVDPNNLQWGWSWLERWMAAKPWEGRNGTDKESNIDRGSVKNMSLNLGVGEGEITKAFNRRDSKPEKPSPPTPKPARPASRQSPSTPSARVAPIPARRKSSTPKNGLSQVDDDVRSVLSVQSERPRRHSIATTSTMRDDESLASSPSLPSYMVPTESARAKSRTATANGAETPEKGGSAGPVKKRLSFQGGAAAASPMRRHSGPPKVESAVKDIAAPPQPEALVANGGGSK

SEQ ID NO: 12021 - protein, 321 aa, Zea mays subsp. mays
  peptide (1)..(321): Ceres Seq. ID no. 12374090
MQTLSRVQSQIRSRRAKMSEENQALQRQLLLKQELENFRMGENWDDSTQSKEQIEASLISRQEAAIRRERALAYAFSHQWKSTSRSANPMFVDPNNLQWGWSWLERWMAAKPWEGRNGTDKESNIDRGSVKNMSLNLGVGEGEITKAFNRRDSKPEKPSPPTPKPARPASRQSPSTPSARVAPIPARRKSSTPKNGLSQVDDDVRSVLSVQSERPRRHSIATTSTMRDDESLASSPSLPSYMVPTESARAKSRTATANGAETPEKGGSAGPVKKRLSFQGGAAAASPMRRHSGPPKVESAVKDIAAPPQPEALVANGGGSK

SEQ ID NO: 12022 - protein, 304 aa, Zea mays subsp. mays
  peptide (1)..(304): Ceres Seq. ID no. 12374091
MSEENQALQRQLLLKQELENFRMGENWDDSTQSKEQIEASLISRQEAAIRRERALAYAFSHQWKSTSRSANPMFVDPNNLQWGWSWLERWMAAKPWEGRNGTDKESNIDRGSVKNMSLNLGVGEGEITKAFNRRDSKPEKPSPPTPKPARPASRQSPSTPSARVAPIPARRKSSTPKNGLSQVDDDVRSVLSVQSERPRRHSIATTSTMRDDESLASSPSLPSYMVPTESARAKSRTATANGAETPEKGGSAGPVKKRLSFQGGAAAASPMRRHSGPPKVESAVKDIAAPPQPEALVANGGGSK

SEQ ID NO: 12023 - DNA, 1746 bp, Zea mays subsp. mays
  misc_feature (1)..(1746): Ceres Seq. ID no. 12411690
  misc_feature (1)..(1746): Ortholog of  Ceres SEQ ID NO 12567026 as cited in SEQ ID NO 1198
  misc_feature (1)..(1746): Ortholog of  Ceres SEQ ID NO 15179852 as cited in SEQ ID NO 66623
gcagtctcgctcgcctctcgcaaaccctatccccgaccccgattcccctctcgcctctcgatctctggcggcggcgccgtcgttttcccccatcggctcagcgactctcgagtcccgacctcgacgctaccggctcagcggctctggtgctccgtcctccactcctcctcctccttcatccattcctccggtgcaaggtttgttactttctttatctcggcgcctcacgacctcgacaataccggctctggttctccgactttgaaaggtccgtctctggtgtaccgcgccgtcctgttcggcggcctcagcaacgacgtcatctcggccggagccctggggatcacgaccgcacagctggtgcgcatcaacgacctccacagccggacggtgcaccaggagaacgccctgtcgaaccgactcgccaccctgcaggaagacatcgccaaccgcccgctcctgcccatcgtgcggcagcgcgagctcgccaccgcgacacgactgggagctgctgcgagcggaagctgcgacggcgcggcacgacggtggcttagggcggcacggctaggagaaccagagccggtattgtcgaggcggtggacaacctgacgctgcgtcggttcctgcgcgcgcgcgaccacgacgtggacaaggcctccgccatgttcctcaagttcctcaagtggcggagggaggcggcgcccggcggctccgtgccggaggagcaggtgaggagggagctgtcgcaggacaagctgtgcatgggcggcgtcgacagggccggtcgccccatcctcgtcgccttcgcggccaggcacttctccgccggccgtgacatggcagagttcaagagttttgttgtctacttcttcgacaagatctgtgccagaatccccagagggcaggagaaattcctctgcatcgttgatctcaagggctgggggtactcaaactgtgacgtccgggcatacattgccgctatagagatcttgcagtatttctacaggttaacaaggtacatacaaagaaggcggctgctcccaagattgctaaacaagagtccagtgatgatgacactagcgacgagacctttgaatctgatgagttttcagagtttttagatgccaattcatcttctcattaaggaacctacaaagaagcctgctgctaaacccttggctgcagttgcaaaaaatggttcgaagacggtcaagcaagagagcagcagcgatgaggacagttctgaagatgagtcggatgacgacagtgatgatgtgagttgaagtttcctcggcgtccctgcatcgcttccaccagccctccccacacgcggcgacagggtcgtcgtcgtcccggctccgcgtcggccacacccgaacgaccgtctccatgtcgtgccgtctccagttatgcgagcgaggctggataaggtcgtggggttccaacaaggtggtgcagctccattcgtccctccacctcacccgccggccatctctcgatttctttttgtgtgctcagttttttctttgtgtgtcatgagtttcagaacttgattgggatggtttttgtgccatgagaattagggtttgatagggatgatttgggtatcagttcttacggtcactggaatttgcatattgtcatagtctaatgccattaaattttgagggtagcgatattgttttcaacctattgaatagggtatatgatgatgttggcaagcgctggagcaggtaatattttgtc

SEQ ID NO: 12024 - protein, 202 aa, Zea mays subsp. mays
  peptide (1)..(202): Ceres Seq. ID no. 12411691
AVSLASRKPYPRPRFPSRLSISGGGAVVFPHRLSDSRVPTSTLPAQRLWCSVLHSSSSFIHSSGARFVTFFISAPHDLDNTGSGSPTLKGPSLVYRAVLFGGLSNDVISAGALGITTAQLVRINDLHSRTVHQENALSNRLATLQEDIANRPLLPIVRQRELATATRLGAAASGSCDGAARRWLRAARLGEPEPVLSRRWTT

SEQ ID NO: 12025 - protein, 183 aa, Zea mays subsp. mays
  peptide (1)..(183): Ceres Seq. ID no. 12411692
SLARLSQTLSPTPIPLSPLDLWRRRRRFPPSAQRLSSPDLDATGSAALVLRPPLLLLLHPFLRCKVCYFLYLGASRPRQYRLWFSDFERSVSGVPRRPVRRPQQRRHLGRSPGDHDRTAGAHQRPPQPDGAPGERPVEPTRHPAGRHRQPPAPAHRAAARARHRDTTGSCCERKLRRRGTTVA

SEQ ID NO: 12026 - protein, 152 aa, Zea mays subsp. mays
  peptide (1)..(152): Ceres Seq. ID no. 12411693
MFLKFLKWRREAAPGGSVPEEQVRRELSQDKLCMGGVDRAGRPILVAFAARHFSAGRDMAEFKSFVVYFFDKICARIPRGQEKFLCIVDLKGWGYSNCDVRAYIAAIEILQYFYRLTRYIQRRRLLPRLLNKSPVMMTLATRPLNLMSFQSF

SEQ ID NO: 12027 - DNA, 1575 bp, Zea mays subsp. mays
  misc_feature (1)..(1575): Ceres Seq. ID no. 12411686
  misc_feature (1)..(1575): Ortholog of  Ceres SEQ ID NO 13662301 as cited in SEQ ID NO 68114
aacatacttggctgggccttccccagcggcgagggcgtggcccgttgtacaagtataacaacaattggcccagcgtagcatgcccgtggtggtggcgtcatcgtgtctcctcgatcccctctcgttcctccctcgtcgcctcatcaattcaagatccaatctttgctgctgccactcggcgatccgatcgttctcgagcaaggtcggtggccatggcacgctgccgccatcacctcctcctcctttccgtcttacttgccttggctgctgctgctgcgcggcaggcgcagagtcatggaaaagcctccgccgtcttcatcgatgcctcgtcgcaccgctaccttcgggaccagcaagccgaccaccaggacgcttcaatgtcgttaaatgaagtttctgcggttgtttctgtcttgcttggtttcgcaccgtcaacatccctaccagctatttcttcttcgaagttgaacaaagttcttcttcctaatccatttgatagaccgcgtgctgttttcctcgtgcaaattgatgggttcaatgttcctagcttcgtatctgaaggcagcaacattttcaagaccaggattgaaggtgcaaacatcgctgatacagggcttacagataaggatgacttaattgtcattcattcagatgaatctctagatctctctcgatcagattatcttgataatgaactttccagcttggcaaactggttggagggatcttatcagaagtctaccggcaaactagtcattcccttggagaatggaaacagtcttactttgcaacttgataaggaagcagacaaggaattcatgtccagcttggcttcccttcttaagactattgaaagggcgatccaggttcatgaagatttctcaggtgtcgtgaaccctgcagagttattagaatgtcacttcacagggttgaaggctctggagaatgaatatggttctggtgaaattgttaagcagggaacagaaatagttcagagagctgtcaccaaatcattccagtccctacatgaagcatacaaagggaaaattgttgggctggtaatatccacaaatgaggctccatcatccttaggatccataattgacgcaccatcttcactgcacatttcaagacggctagaagaagcaagcaagactacagacatagcctctgtcgtacttgttcgaaagagcttggcatggattacagggatcatcctgcttgtttcaactctcataggggtttgcttgcttatgaacatgccacttaccagggacaccctcctgtactcgaatgtcaagatcgattagtttgaaggggtgttcgcggcagctactcttggggttcaactttggccttgtgtatttatgggatggatttcagatggtagagacgtatgcttgtgctgttcacaaaaccagtgtacaatgtgatactaggtgctacgtgcctttctttttttaatctgtgcttccatcttgcctgtatgggctgttttgttgttgggttcccggtaaataatccagagcagtggcacaaacgattagttgttgcagaatgctactgccttttctg

SEQ ID NO: 12028 - protein, 435 aa, Zea mays subsp. mays
  peptide (1)..(435): Ceres Seq. ID no. 12411687
HTWLGLPQRRGRGPLYKYNNNWPSVACPWWWRHRVSSIPSRSSLVASSIQDPIFAAATRRSDRSRARSVAMARCRHHLLLLSVLLALAAAAARQAQSHGKASAVFIDASSHRYLRDQQADHQDASMSLNEVSAVVSVLLGFAPSTSLPAISSSKLNKVLLPNPFDRPRAVFLVQIDGFNVPSFVSEGSNIFKTRIEGANIADTGLTDKDDLIVIHSDESLDLSRSDYLDNELSSLANWLEGSYQKSTGKLVIPLENGNSLTLQLDKEADKEFMSSLASLLKTIERAIQVHEDFSGVVNPAELLECHFTGLKALENEYGSGEIVKQGTEIVQRAVTKSFQSLHEAYKGKIVGLVISTNEAPSSLGSIIDAPSSLHISRRLEEASKTTDIASVVLVRKSLAWITGIILLVSTLIGVCLLMNMPLTRDTLLYSNVKID

SEQ ID NO: 12029 - protein, 365 aa, Zea mays subsp. mays
  peptide (1)..(365): Ceres Seq. ID no. 12411688
MARCRHHLLLLSVLLALAAAAARQAQSHGKASAVFIDASSHRYLRDQQADHQDASMSLNEVSAVVSVLLGFAPSTSLPAISSSKLNKVLLPNPFDRPRAVFLVQIDGFNVPSFVSEGSNIFKTRIEGANIADTGLTDKDDLIVIHSDESLDLSRSDYLDNELSSLANWLEGSYQKSTGKLVIPLENGNSLTLQLDKEADKEFMSSLASLLKTIERAIQVHEDFSGVVNPAELLECHFTGLKALENEYGSGEIVKQGTEIVQRAVTKSFQSLHEAYKGKIVGLVISTNEAPSSLGSIIDAPSSLHISRRLEEASKTTDIASVVLVRKSLAWITGIILLVSTLIGVCLLMNMPLTRDTLLYSNVKID

SEQ ID NO: 12030 - protein, 310 aa, Zea mays subsp. mays
  peptide (1)..(310): Ceres Seq. ID no. 12411689
MSLNEVSAVVSVLLGFAPSTSLPAISSSKLNKVLLPNPFDRPRAVFLVQIDGFNVPSFVSEGSNIFKTRIEGANIADTGLTDKDDLIVIHSDESLDLSRSDYLDNELSSLANWLEGSYQKSTGKLVIPLENGNSLTLQLDKEADKEFMSSLASLLKTIERAIQVHEDFSGVVNPAELLECHFTGLKALENEYGSGEIVKQGTEIVQRAVTKSFQSLHEAYKGKIVGLVISTNEAPSSLGSIIDAPSSLHISRRLEEASKTTDIASVVLVRKSLAWITGIILLVSTLIGVCLLMNMPLTRDTLLYSNVKID

SEQ ID NO: 12031 - DNA, 1790 bp, Zea mays subsp. mays
  misc_feature (1)..(1790): Ceres Seq. ID no. 12345156
  misc_feature (1)..(1790): Ortholog of  Ceres SEQ ID NO 15178909 as cited in SEQ ID NO 0
acaatcacaggcctcccggcctcccgtgcgctattctctatcagcttacccagcacacagtacacactctaatctccacacgacccaatagatatacggggctgaaggatgaagcttagagcaaaagggatcggcctcctgcttctccttgtcttgcttgctctttgctccaccattgaagtcggcgaggcaagaagaggcaagcattggaggtcgtcgaggagctcaccgggctcatcccagctcaagaaagacaagggaaagaagagcagctcccgccggcagtacggcgccaaccggccaggtccgaagccaccggtcagctcgacaccaagctctggtgctgccaagggaaatcatcagaatccttaccaaccaagcccaagtccaagcccgaatgcccctgacatccctcctatgccaagccctgccaatggcagcaggcattccactcccgagccgccggctccaagctgtgggaagggtcaacagcagccatcacagccgccgccagcgacctcgcagggtgcagtattcaatgtggttgattttggagccaagggtgacggagttacagacgatactaaggcttttgaaggagcgtgggctgctgcctgcaaaaagggggcatgtacagttctcgtaccaccagaactagagttcctagttgggccaatctcgttctctgggccttactgcaaatcgaatattgtctttcagctggaaggaacaatcctagctccaaccagtgctaaatcctggggttcaggcttgctccagtggctcgagttcaccaaactaaatggaatggttattcaagggaacggcattataaatggcagagggcaacaatggtggacctactcagacacagaagacgaggatgatgatgacacgtacgatgtggagtttgaaagaatgccacagattaaacctacagcattgaggttttatggtagtttcaacgttgtagtggctggtatcactattgtcaacagctcacagtgtcatcttaagtttgacaactgtcaaggagtgatggtccatgacttgactatatcctcccctgagaacagtctcaacactgacggaatacacctgcagaactccaaagatgtcagcattcatcatacaaacctggcttgtggtgacgattgcatctccatccagacaggatgcagcaacataaatatacataacgtgaattgtggaccaggccatggaatcagcataggtggactaggccgagacaacacaaaagcatgcgtatcaaatgttacagtaagagatgtcaacatgttcagaaccatgaatggtgtcagaatcaagacctggcagggtggtgtaggattggttcaagacataaggttctcaaatatacaagtctcagaggttcaaacacccatcatcatagatcagttttattgtgacagaagcacttgcagaaatcaaacatcagcagtggcagtatcaggggttcaatatgagaatatcagaggaacatttacaatcaaacctgtccattttgcatgcagtgacagcttaccttgttcaggaatctctcttaccggtgtgcaactcagaccagtgcaagtaccccactaccacctgaataacccattctgctggcaagcttttggggagctctacactccaactgtccctcctatagcttgcttgcagattggaaaacctgctggcaataacttacagtcatatgatgacatatgctgaaacactcaaagtgcctttgtttgttgattggtgcttatccatgagtggtcgttgtg

SEQ ID NO: 12032 - protein, 541 aa, Zea mays subsp. mays
  peptide (1)..(541): Ceres Seq. ID no. 12345157
MKLRAKGIGLLLLLVLLALCSTIEVGEARRGKHWRSSRSSPGSSQLKKDKGKKSSSRRQYGANRPGPKPPVSSTPSSGAAKGNHQNPYQPSPSPSPNAPDIPPMPSPANGSRHSTPEPPAPSCGKGQQQPSQPPPATSQGAVFNVVDFGAKGDGVTDDTKAFEGAWAAACKKGACTVLVPPELEFLVGPISFSGPYCKSNIVFQLEGTILAPTSAKSWGSGLLQWLEFTKLNGMVIQGNGIINGRGQQWWTYSDTEDEDDDDTYDVEFERMPQIKPTALRFYGSFNVVVAGITIVNSSQCHLKFDNCQGVMVHDLTISSPENSLNTDGIHLQNSKDVSIHHTNLACGDDCISIQTGCSNINIHNVNCGPGHGISIGGLGRDNTKACVSNVTVRDVNMFRTMNGVRIKTWQGGVGLVQDIRFSNIQVSEVQTPIIIDQFYCDRSTCRNQTSAVAVSGVQYENIRGTFTIKPVHFACSDSLPCSGISLTGVQLRPVQVPHYHLNNPFCWQAFGELYTPTVPPIACLQIGKPAGNNLQSYDDIC

SEQ ID NO: 12033 - protein, 438 aa, Zea mays subsp. mays
  peptide (1)..(438): Ceres Seq. ID no. 12345158
MPSPANGSRHSTPEPPAPSCGKGQQQPSQPPPATSQGAVFNVVDFGAKGDGVTDDTKAFEGAWAAACKKGACTVLVPPELEFLVGPISFSGPYCKSNIVFQLEGTILAPTSAKSWGSGLLQWLEFTKLNGMVIQGNGIINGRGQQWWTYSDTEDEDDDDTYDVEFERMPQIKPTALRFYGSFNVVVAGITIVNSSQCHLKFDNCQGVMVHDLTISSPENSLNTDGIHLQNSKDVSIHHTNLACGDDCISIQTGCSNINIHNVNCGPGHGISIGGLGRDNTKACVSNVTVRDVNMFRTMNGVRIKTWQGGVGLVQDIRFSNIQVSEVQTPIIIDQFYCDRSTCRNQTSAVAVSGVQYENIRGTFTIKPVHFACSDSLPCSGISLTGVQLRPVQVPHYHLNNPFCWQAFGELYTPTVPPIACLQIGKPAGNNLQSYDDIC

SEQ ID NO: 12034 - protein, 308 aa, Zea mays subsp. mays
  peptide (1)..(308): Ceres Seq. ID no. 12345159
MVIQGNGIINGRGQQWWTYSDTEDEDDDDTYDVEFERMPQIKPTALRFYGSFNVVVAGITIVNSSQCHLKFDNCQGVMVHDLTISSPENSLNTDGIHLQNSKDVSIHHTNLACGDDCISIQTGCSNINIHNVNCGPGHGISIGGLGRDNTKACVSNVTVRDVNMFRTMNGVRIKTWQGGVGLVQDIRFSNIQVSEVQTPIIIDQFYCDRSTCRNQTSAVAVSGVQYENIRGTFTIKPVHFACSDSLPCSGISLTGVQLRPVQVPHYHLNNPFCWQAFGELYTPTVPPIACLQIGKPAGNNLQSYDDIC

SEQ ID NO: 12035 - DNA, 1775 bp, Zea mays subsp. mays
  misc_feature (1)..(1775): Ceres Seq. ID no. 12342268
  misc_feature (1)..(1775): Ortholog of  Ceres SEQ ID NO 15171693 as cited in SEQ ID NO 60124
ctcggtgctctcgagtctcgagagtcgagactcaggggacctgatttcctcgtccggccatggcgaccggtggcaagtccgctgcccctcagccacctcccgccgcgtcctcctcctccgaacgcgcgctggagtcagtccacttctcttccggaaaccctcgcatcgaggagacccgcggcgtcgtcgtcctccaccccgacccgcccgcggccgcctcctggtctcatgtcccgttggggagtaagccgcgggtgtgcgtgctcgccgtgcccaaccacatgacctacgccgacttctgccgtttctgcggcgccttcgtccctcacacactcgagatgcgcatcgtcagaactgatggagcagaggaccagtacagcgttcttataaattttgacactcagagctccacagacagcttctataagcacttcaacgggaagcagttctcttcgctggaggggggtgtctgccatgtccgttttgtggaagaggtgcactacactgaattgattgagcatgcacatacctcagttacaaacttggctgagcaacctacatgcccagtatgtcttgaacgacttgaccaagatcctggaggtattctcacaacaatctgcaaccattctttccactgctcgtgcatatcaaaatggacagactcctcatgcccggtctgtagatattgtcagcagcaaccagagaaatccatgtgttctatttgcggaacttcggagaatctttggatatgtctaatctgtggccatgttggctgtggaaggtacaagggtggacatgctattgaacactggaaggaaactcaacattgttattcacttgagttagagacacaaaaagtgtgggactatgctggggacaactatgtacatcggcttattcagtcaaaaacagatggaaagctagttgagtacaatttccatggtgatcacacagcagagagcacgtgttcactatgcagtggtgatgccgcaatggatgaagctctactgaacagtaaatttgaagctattgttgaagagtacaatgatctcgtcacatttcaacttgaaaagcaaagaaattactatgagtcacttctactagaagtcaaggaggaaactgagaaagaaatttctgctgctactgagaaagccatgagcacaaaactccaaaagttggaagtaaagtttgacaagtgtatggaagagaaaaaatttcttgatgaagtaaatggcaatcttgtcaagaatcaggagatgtggattgaaactatacgaaaagcacaagcaagggagcaagctgcgctcagattaaaagatgagaagatcgaaaaacttcaggaagagctaagaggtttgatagcccatttcgactgccaaagtgacactgcacaagcttcaaatgcgatctcgagcgatataccagggggcatgattcttccggtagcatcagaatcgtcctcgagcggcggcgttgttggtggcactggaaacggggagcaaaattgagtaaactgcgccctgtataaagcacgtttggatcttagggacctaggtatattcttgcttccaaacccccaccgttgtaggttcagttagggtaatacacacttgttagctgtcacctcactgcccctcgattctactgtcactagccgctagtagtgtggtactagggatgaaaacgatttcatttttttttggtttttcgaaattcgtttccgatttttcgaccgtatttaatggttatggtatttttcgaaaacataattggtc

SEQ ID NO: 12036 - protein, 482 aa, Zea mays subsp. mays
  peptide (1)..(482): Ceres Seq. ID no. 12342269
MATGGKSAAPQPPPAASSSSERALESVHFSSGNPRIEETRGVVVLHPDPPAAASWSHVPLGSKPRVCVLAVPNHMTYADFCRFCGAFVPHTLEMRIVRTDGAEDQYSVLINFDTQSSTDSFYKHFNGKQFSSLEGGVCHVRFVEEVHYTELIEHAHTSVTNLAEQPTCPVCLERLDQDPGGILTTICNHSFHCSCISKWTDSSCPVCRYCQQQPEKSMCSICGTSENLWICLICGHVGCGRYKGGHAIEHWKETQHCYSLELETQKVWDYAGDNYVHRLIQSKTDGKLVEYNFHGDHTAESTCSLCSGDAAMDEALLNSKFEAIVEEYNDLVTFQLEKQRNYYESLLLEVKEETEKEISAATEKAMSTKLQKLEVKFDKCMEEKKFLDEVNGNLVKNQEMWIETIRKAQAREQAALRLKDEKIEKLQEELRGLIAHFDCQSDTAQASNAISSDIPGGMILPVASESSSSGGVVGGTGNGEQN

SEQ ID NO: 12037 - protein, 408 aa, Zea mays subsp. mays
  peptide (1)..(408): Ceres Seq. ID no. 12342270
MTYADFCRFCGAFVPHTLEMRIVRTDGAEDQYSVLINFDTQSSTDSFYKHFNGKQFSSLEGGVCHVRFVEEVHYTELIEHAHTSVTNLAEQPTCPVCLERLDQDPGGILTTICNHSFHCSCISKWTDSSCPVCRYCQQQPEKSMCSICGTSENLWICLICGHVGCGRYKGGHAIEHWKETQHCYSLELETQKVWDYAGDNYVHRLIQSKTDGKLVEYNFHGDHTAESTCSLCSGDAAMDEALLNSKFEAIVEEYNDLVTFQLEKQRNYYESLLLEVKEETEKEISAATEKAMSTKLQKLEVKFDKCMEEKKFLDEVNGNLVKNQEMWIETIRKAQAREQAALRLKDEKIEKLQEELRGLIAHFDCQSDTAQASNAISSDIPGGMILPVASESSSSGGVVGGTGNGEQN

SEQ ID NO: 12038 - protein, 389 aa, Zea mays subsp. mays
  peptide (1)..(389): Ceres Seq. ID no. 12342271
MRIVRTDGAEDQYSVLINFDTQSSTDSFYKHFNGKQFSSLEGGVCHVRFVEEVHYTELIEHAHTSVTNLAEQPTCPVCLERLDQDPGGILTTICNHSFHCSCISKWTDSSCPVCRYCQQQPEKSMCSICGTSENLWICLICGHVGCGRYKGGHAIEHWKETQHCYSLELETQKVWDYAGDNYVHRLIQSKTDGKLVEYNFHGDHTAESTCSLCSGDAAMDEALLNSKFEAIVEEYNDLVTFQLEKQRNYYESLLLEVKEETEKEISAATEKAMSTKLQKLEVKFDKCMEEKKFLDEVNGNLVKNQEMWIETIRKAQAREQAALRLKDEKIEKLQEELRGLIAHFDCQSDTAQASNAISSDIPGGMILPVASESSSSGGVVGGTGNGEQN

SEQ ID NO: 12039 - DNA, 1508 bp, Zea mays subsp. mays
  misc_feature (1)..(1508): Ceres Seq. ID no. 12348820
  misc_feature (1)..(1508): Ortholog of  Ceres SEQ ID NO 14301676 as cited in SEQ ID NO 67423
cactgatcggattcttcggtgccgcgtttgggagcgtcggcggagttggtggcggcgggatcttcgtgccgatgctgacgctcatcattgggtttgacccgaaatcatctactgcgatatcaaagtgtatgattatgggagcctctgtttcaactgtttactacaatctcaagctaaagcatccgactttggacatgccagtgatcgattatgacctggctgtgctcatgcagcctatgctaatgcttgggatcagcattggtgttatttttaatgttatattccctgactggctggtcacagttctgctgataattcttttcctaggcacatccacaaaagcctttctgaagggcattgagacatggaagaaagagacagtaatccaaagggaggctgcgaaacttttggagcaaactgcaggtgaggaagcagagtatgcagcacttcctactggaccagatgttgcagcaaacaaaaaagccctcacatcagatgaggcgccatcgcttataaagaacatacactggaagaaggttggtcttctttcatttgtatgggtggcattccttgttcttcaggtcacaaagaattacactgctacttgctccccatggtactgggtcttgaaccttctccaggttccagtgtcactaggagtgacactgtatgaaggatttgggctgatgagtgcgaagagggtgttatcatcaaagggaagtggacaaactaccatgaaatttcatcaggtagtcgtatacggtctattcggtatagccgcaggactagttggtggactccttggtctcggaggtggcttcattatggggccactgttcttggagcttggcatccctccccaagtttcaagtgctactgctacctttgcaatgatgttctcatcttccatgtcggttgtcgaatactacctcttgaaccggtttccagtgccttatgctgtttatttcatcgttgttgcatttgttgctgccatcattggccagcatgtggtgaggaagttgatcaactggctagggcgagcatcacttatcatcttcatactggctttcatgatctttgtcagcgcgatttctctcggtggggttggcgtctctaacatggttcacaagattgagcgacatgagtacatggggtttgaggacctttgcaagtacgatgcataagaagcagggaagctgaagatgtgagctatgtggtgtgcagttctccgcaagcagaagtgggataattcaaggatagaagggttccatgatgcaatttggtgcgtaggaccgaagaggttctagcagcgacagttcctcgaagggaggctagctgcatggattggcttaagatgaattttgggcactgaattttcaaaacaaatgtagagatgattttctgccacggcagaatgtcgtcagtgcatttcgttgtaggaaatgtacactgcacatcttcagataaccatcctatagtactacgcgatatgaaatatcacatgatag

SEQ ID NO: 12040 - protein, 393 aa, Zea mays subsp. mays
  peptide (1)..(393): Ceres Seq. ID no. 12348821
LIGFFGAAFGSVGGVGGGGIFVPMLTLIIGFDPKSSTAISKCMIMGASVSTVYYNLKLKHPTLDMPVIDYDLAVLMQPMLMLGISIGVIFNVIFPDWLVTVLLIILFLGTSTKAFLKGIETWKKETVIQREAAKLLEQTAGEEAEYAALPTGPDVAANKKALTSDEAPSLIKNIHWKKVGLLSFVWVAFLVLQVTKNYTATCSPWYWVLNLLQVPVSLGVTLYEGFGLMSAKRVLSSKGSGQTTMKFHQVVVYGLFGIAAGLVGGLLGLGGGFIMGPLFLELGIPPQVSSATATFAMMFSSSMSVVEYYLLNRFPVPYAVYFIVVAFVAAIIGQHVVRKLINWLGRASLIIFILAFMIFVSAISLGGVGVSNMVHKIERHEYMGFEDLCKYDA

SEQ ID NO: 12041 - protein, 370 aa, Zea mays subsp. mays
  peptide (1)..(370): Ceres Seq. ID no. 12348822
MLTLIIGFDPKSSTAISKCMIMGASVSTVYYNLKLKHPTLDMPVIDYDLAVLMQPMLMLGISIGVIFNVIFPDWLVTVLLIILFLGTSTKAFLKGIETWKKETVIQREAAKLLEQTAGEEAEYAALPTGPDVAANKKALTSDEAPSLIKNIHWKKVGLLSFVWVAFLVLQVTKNYTATCSPWYWVLNLLQVPVSLGVTLYEGFGLMSAKRVLSSKGSGQTTMKFHQVVVYGLFGIAAGLVGGLLGLGGGFIMGPLFLELGIPPQVSSATATFAMMFSSSMSVVEYYLLNRFPVPYAVYFIVVAFVAAIIGQHVVRKLINWLGRASLIIFILAFMIFVSAISLGGVGVSNMVHKIERHEYMGFEDLCKYDA

SEQ ID NO: 12042 - protein, 351 aa, Zea mays subsp. mays
  peptide (1)..(351): Ceres Seq. ID no. 12348823
MIMGASVSTVYYNLKLKHPTLDMPVIDYDLAVLMQPMLMLGISIGVIFNVIFPDWLVTVLLIILFLGTSTKAFLKGIETWKKETVIQREAAKLLEQTAGEEAEYAALPTGPDVAANKKALTSDEAPSLIKNIHWKKVGLLSFVWVAFLVLQVTKNYTATCSPWYWVLNLLQVPVSLGVTLYEGFGLMSAKRVLSSKGSGQTTMKFHQVVVYGLFGIAAGLVGGLLGLGGGFIMGPLFLELGIPPQVSSATATFAMMFSSSMSVVEYYLLNRFPVPYAVYFIVVAFVAAIIGQHVVRKLINWLGRASLIIFILAFMIFVSAISLGGVGVSNMVHKIERHEYMGFEDLCKYDA

SEQ ID NO: 12043 - DNA, 1433 bp, Zea mays subsp. mays; identical to SEQ ID NO: 4847
  misc_feature (1)..(1433): Ceres Seq. ID no. 13492071
  misc_feature (1)..(1433): Ortholog of  Ceres SEQ ID NO 12578315 as cited in SEQ ID NO 62451
  misc_feature (1)..(1433): Ortholog of  Ceres SEQ ID NO 13597295 as cited in SEQ ID NO 63743
  misc_feature (1)..(1433): Ortholog of  Ceres SEQ ID NO 12617090 as cited in SEQ ID NO 64005
  misc_feature (1)..(1433): Ortholog of  Ceres SEQ ID NO 13584577 as cited in SEQ ID NO 65298

SEQ ID NO: 12044 - protein, 374 aa, Zea mays subsp. mays; identical to SEQ ID NO: 4848
  peptide (1)..(374): Ceres Seq. ID no. 13492072

SEQ ID NO: 12045 - protein, 264 aa, Zea mays subsp. mays; identical to SEQ ID NO: 4849
  peptide (1)..(264): Ceres Seq. ID no. 13492073

SEQ ID NO: 12046 - protein, 261 aa, Zea mays subsp. mays; identical to SEQ ID NO: 4850
  peptide (1)..(261): Ceres Seq. ID no. 13492074

SEQ ID NO: 12047 - DNA, 1464 bp, Zea mays subsp. mays
  misc_feature (1)..(1464): Ceres Seq. ID no. 12411682
  misc_feature (1)..(1464): Ortholog of  Ceres SEQ ID NO 13596581 as cited in SEQ ID NO 62420
  misc_feature (1)..(1464): Ortholog of  Ceres SEQ ID NO 13591273 as cited in SEQ ID NO 65904
  misc_feature (1)..(1464): Ortholog of  Ceres SEQ ID NO 13623086 as cited in SEQ ID NO 0
atccacccaccccctacagttcagttcagttcagttggtctaggccatggccatgtccgcttcctcctcctcgcgcgccctcctccgccggatcggcggcgcgctcctccgccgctccttctcctcctcatccgccgcctccgcagggtaccacgtcgcgggcgggcccagctacatgcgcggcgccgtcttctgggagcccggccgcccgctcacgctcgaggagttccgcatgccgcggcccaaggccggcgagctcctcatcaagaccaaagcctgcggggtctgtcactccgatctccatgtcctcaaaggcgagctccctttctccacgccctgtgtcgtgggccatgagatcactggagaggtggttgaccatggcacgcacactcctgttgagatcatcaacaggttcccagtcggaagtcacgtcgtcggcgccttcataatgccatgtgggaactgcttctactgcgttaagggccaagaagatctgtgtgagtctttcttcgcgtataatcgtgccaaggggacactctatgatggcgagacacggctgtttctaaggggcaatgggaaaccggtgtacatgtatagtatgggagggcttgcagagtattgtgttgtcccagccaatgcgctagcagttctccctgactcactgccatacacagaatcagcaattttaggatgtgcagtgtttaccgcgtatggtgccctgaggcatgctgctgaaatgcggcctggtgattcagtagctgtgatcggagttggaggggttgggtcaagctgtttacagatagcaaaagcctttggagcttcccaagtcattgcagtggatgtccttgatgagaagcttcagaacgctacaacacttggagcaacccacactgtaaatgcagcaaaagatgatgcagttgaaaggataaaggaaattactgatggtaggggtgtagatgtggctatagaggcacttggtaaggcgttaacattttcccagtgcgccaagagcgtgcgtgatggaggcaaagctgttatgatcgggcttgctgcaacgaacgtaatgggagaggttgatataacccgtcttgtccgacgacaggtgaaaatcattggctcatatggcgcaagggctaggcaagaccttcctcagatagtgaagctcgcggagagtggtgccttcaatctccaaaacaccatatcaaggaaatgcaaatttgaggaggcgaatggcgcctatgaggatctcaatcagggcaagatcgtaggacgagctgtggttgagatcatggagtgatgacggacaaggtaatcaatcctgtggttccaagtctgggtcacacaacaataaagttttgcgtgctctttcacagcattgtcaaaatctgtagatgaccaaactgcattgtgtgtgtgtgtgtgtgtgtgtgtgacagtgtgttgttggaattaacatttgccctt

SEQ ID NO: 12048 - protein, 416 aa, Zea mays subsp. mays
  peptide (1)..(416): Ceres Seq. ID no. 12411683
MAMSASSSSRALLRRIGGALLRRSFSSSSAASAGYHVAGGPSYMRGAVFWEPGRPLTLEEFRMPRPKAGELLIKTKACGVCHSDLHVLKGELPFSTPCVVGHEITGEVVDHGTHTPVEIINRFPVGSHVVGAFIMPCGNCFYCVKGQEDLCESFFAYNRAKGTLYDGETRLFLRGNGKPVYMYSMGGLAEYCVVPANALAVLPDSLPYTESAILGCAVFTAYGALRHAAEMRPGDSVAVIGVGGVGSSCLQIAKAFGASQVIAVDVLDEKLQNATTLGATHTVNAAKDDAVERIKEITDGRGVDVAIEALGKALTFSQCAKSVRDGGKAVMIGLAATNVMGEVDITRLVRRQVKIIGSYGARARQDLPQIVKLAESGAFNLQNTISRKCKFEEANGAYEDLNQGKIVGRAVVEIME

SEQ ID NO: 12049 - protein, 414 aa, Zea mays subsp. mays
  peptide (1)..(414): Ceres Seq. ID no. 12411684
MSASSSSRALLRRIGGALLRRSFSSSSAASAGYHVAGGPSYMRGAVFWEPGRPLTLEEFRMPRPKAGELLIKTKACGVCHSDLHVLKGELPFSTPCVVGHEITGEVVDHGTHTPVEIINRFPVGSHVVGAFIMPCGNCFYCVKGQEDLCESFFAYNRAKGTLYDGETRLFLRGNGKPVYMYSMGGLAEYCVVPANALAVLPDSLPYTESAILGCAVFTAYGALRHAAEMRPGDSVAVIGVGGVGSSCLQIAKAFGASQVIAVDVLDEKLQNATTLGATHTVNAAKDDAVERIKEITDGRGVDVAIEALGKALTFSQCAKSVRDGGKAVMIGLAATNVMGEVDITRLVRRQVKIIGSYGARARQDLPQIVKLAESGAFNLQNTISRKCKFEEANGAYEDLNQGKIVGRAVVEIME

SEQ ID NO: 12050 - protein, 373 aa, Zea mays subsp. mays
  peptide (1)..(373): Ceres Seq. ID no. 12411685
MRGAVFWEPGRPLTLEEFRMPRPKAGELLIKTKACGVCHSDLHVLKGELPFSTPCVVGHEITGEVVDHGTHTPVEIINRFPVGSHVVGAFIMPCGNCFYCVKGQEDLCESFFAYNRAKGTLYDGETRLFLRGNGKPVYMYSMGGLAEYCVVPANALAVLPDSLPYTESAILGCAVFTAYGALRHAAEMRPGDSVAVIGVGGVGSSCLQIAKAFGASQVIAVDVLDEKLQNATTLGATHTVNAAKDDAVERIKEITDGRGVDVAIEALGKALTFSQCAKSVRDGGKAVMIGLAATNVMGEVDITRLVRRQVKIIGSYGARARQDLPQIVKLAESGAFNLQNTISRKCKFEEANGAYEDLNQGKIVGRAVVEIME

SEQ ID NO: 12051 - DNA, 1587 bp, Zea mays subsp. mays
  misc_feature (1)..(1587): Ceres Seq. ID no. 12341285
  misc_feature (1)..(1587): Ortholog of  Ceres SEQ ID NO 15179320 as cited in SEQ ID NO 0
  misc_feature (1)..(1587): Ortholog of  Ceres SEQ ID NO 15224350 as cited in SEQ ID NO 0
ctggaaacaaaccacggagccgtgaccgaggggagcggcggcggcgcaaggtgtcttcctctccgtcgccggcaacgtcgacaccgctggcaagcttctctccggttgtccctgctccagtaagagtaggcgaggacgagcctcccccatcctgggtgttggtgcctgacccattttctcaagataagatgttcagaggttctcctaagatagtagctttatctaaagctgctcaaaagaaggcttctcctaaagctgcaacaacaaagaaatgtggcggtggtgttgagagagctacatggaatgttgaattggagaagagtcttgttgacttgttgttttaacacaacatgcctccatatagggctcaaaatgggtggagtccagatgcttggaataaaatagtttctgaattccacaagaagcatgaatatgttacattcaacaagatccaaattcaggaaaaggagagggaattgaaaagggaatacaagatattgaaggaggcaagaaaacaaagtggagtttcttggaatgaaaaaagatgcatgatcattgctgaaccaacgatatgggacaacattatcactacatttcctagagctaagaagttccgcaagaagtcttttcctctctttgatgccttgggtgaattatatgatggtcacatcgcacaagggacttggaacattacctctactcaaccagtacaaaattctaatgatggagagcaactaaaaaccatagaagtggaagatgaagatactaatgaaccagaagaagatgcaagaatagaacaagatgaagatatagtaattgttgaaagggttgaacagaggttacctaaaaggtcaggtgcaccaactgtcaatcaagagaaggagacaaaaagagtgaggaaagatgcactagaagggctgatagggaggtaccttgatgtgaaaacgaagcaagttgcagatgaggctgcacaatcagcaaaagtaaaggatgttgctcaagataatgatttttctatcaagaggtgtatttctgttcttaagactatggatatgacaagagatgagaaggtcaaagcagctgaggtgttcaacataccaaattacagggaaacatttatttgtttcaatgatgatgagccagaagtcgctctcctttggctaagagggaagatggataaactctaaaggcaggtctggtggaacacggacaggctctgacttcgttcgagaccatccatttgattcttgcaccggttcttttctcagttcagttgaaagctagcactagatgcctacacggaatagaaggtccaccacagtccacagtcgttcatccaagcagctgtgtagatgtcgcctccttttattttgtcccttttctggttgtcatgtccctttttctggttgtcacgttgagctcttggtttgcagtttcatgttggtgtgcattgtctgaatagaaaactgaaaggctgttgtttcagtttcatgttggtgtgcgtcctctgaatagaaaactgaaaagttgtttcagtttcatgttggtgtgcgtcctctgaatagaaaactgaaaggctgttgttcc

SEQ ID NO: 12052 - protein, 278 aa, Zea mays subsp. mays
  peptide (1)..(278): Ceres Seq. ID no. 12341286
MPPYRAQNGWSPDAWNKIVSEFHKKHEYVTFNKIQIQEKERELKREYKILKEARKQSGVSWNEKRCMIIAEPTIWDNIITTFPRAKKFRKKSFPLFDALGELYDGHIAQGTWNITSTQPVQNSNDGEQLKTIEVEDEDTNEPEEDARIEQDEDIVIVERVEQRLPKRSGAPTVNQEKETKRVRKDALEGLIGRYLDVKTKQVADEAAQSAKVKDVAQDNDFSIKRCISVLKTMDMTRDEKVKAAEVFNIPNYRETFICFNDDEPEVALLWLRGKMDKL

SEQ ID NO: 12053 - protein, 212 aa, Zea mays subsp. mays
  peptide (1)..(212): Ceres Seq. ID no. 12341287
MIIAEPTIWDNIITTFPRAKKFRKKSFPLFDALGELYDGHIAQGTWNITSTQPVQNSNDGEQLKTIEVEDEDTNEPEEDARIEQDEDIVIVERVEQRLPKRSGAPTVNQEKETKRVRKDALEGLIGRYLDVKTKQVADEAAQSAKVKDVAQDNDFSIKRCISVLKTMDMTRDEKVKAAEVFNIPNYRETFICFNDDEPEVALLWLRGKMDKL

SEQ ID NO: 12054 - DNA, 803 bp, Zea mays subsp. mays
  misc_feature (1)..(803): Ceres Seq. ID no. 12413597
  misc_feature (1)..(803): Ortholog of  Ceres SEQ ID NO 15176693 as cited in SEQ ID NO 1078
  misc_feature (1)..(803): Ortholog of  Ceres SEQ ID NO 12615074 as cited in SEQ ID NO 62676
  misc_feature (1)..(803): Ortholog of  Ceres SEQ ID NO 13598819 as cited in SEQ ID NO 0
gcacgagaccattacctagaacatcctaatcgaaaagtggtgctagaagcaactgaaaacagccgagcgatctcctctccctctccctctccgatccattctccagcgcagcgaagtaaacatgtctgaccgggcaaagatgtcgtggcaggcgtacgtggacgagcacctgatgtgcgagatcgagggccaccacctcgcggcggcggccatcgtcggccacgacggtgccgcctgggcgcagagcacggcgttccccgagttcaagaccgaggacatggccaacatcatgaaggacttcgacgagccagggcacctcgcgccgacaggcctgttcctcggacctaccaagtacatggtcatccaaggcgagcctggtgccgtcatccgtggcaagaagggatcaggaggcatcaccgtgaagaagacagggcaggcactcgtcgttggcatctacgacgagccgatgacgcctggccagtgcaacatggtggtggaaaggctgggcgactacctgcttgaacagggcatgtaactactacgtaccagctggaatgcatgtcgacgacgatggtttcgagtttcgacttccaataatagtaacaacaaagcaaaggccttcctcccggcgtatttgctttgtctcttctcctccacgccataagatatctagcaattggtgactcgccttaattagttcgctttgcttttgaggttgactcgaccattttgctgtagcgtgaattgcatgcatggacatgcaacgctccaatggcctttggaatnnggaattttttttttcc

SEQ ID NO: 12055 - protein, 137 aa, Zea mays subsp. mays
  peptide (1)..(137): Ceres Seq. ID no. 12413598
MSDRAKMSWQAYVDEHLMCEIEGHHLAAAAIVGHDGAAWAQSTAFPEFKTEDMANIMKDFDEPGHLAPTGLFLGPTKYMVIQGEPGAVIRGKKGSGGITVKKTGQALVVGIYDEPMTPGQCNMVVERLGDYLLEQGM

SEQ ID NO: 12056 - protein, 131 aa, Zea mays subsp. mays
  peptide (1)..(131): Ceres Seq. ID no. 12413599
MSWQAYVDEHLMCEIEGHHLAAAAIVGHDGAAWAQSTAFPEFKTEDMANIMKDFDEPGHLAPTGLFLGPTKYMVIQGEPGAVIRGKKGSGGITVKKTGQALVVGIYDEPMTPGQCNMVVERLGDYLLEQGM

SEQ ID NO: 12057 - protein, 120 aa, Zea mays subsp. mays
  peptide (1)..(120): Ceres Seq. ID no. 12413600
MCEIEGHHLAAAAIVGHDGAAWAQSTAFPEFKTEDMANIMKDFDEPGHLAPTGLFLGPTKYMVIQGEPGAVIRGKKGSGGITVKKTGQALVVGIYDEPMTPGQCNMVVERLGDYLLEQGM

SEQ ID NO: 12058 - DNA, 1471 bp, Zea mays subsp. mays
  misc_feature (1)..(1471): Ceres Seq. ID no. 12579274
  misc_feature (1)..(1471): Ortholog of  Ceres SEQ ID NO 13645078 as cited in SEQ ID NO 51158
gcacgagaccattacctagaacatcctaatcgaaaaactgccgcgccgccaccctctacagataaggaagaggaggagggcaggatgtcgcaccgtaagttcgagcacccgaggcacggctccctcggcttccttcccaggaagcgctcctcccgtcaccgcggcaaggtgaagtcattccctagggatgacgccaagaagccttgccatctcactgccttccttggctacaaggctggcatgactcacattgtccgtgaggttgagaagccaggatccaaactccataagaaggaaacttgtgaggctgttaccatcattgaaacccctcctcttgtcattgttgggctcgtggcatatgtgaagactcctcgtggcctccgcacactcaactctgtttgggcccaacatcttagcgaagaagtgaggagaaggttctacaagaactggtgcaagagcaagaagaaggctttcacaaagtatgctctcaaatatgaaaatgatgctggcaagaaggaaattcagctgcagcttgagaagatgaagaaatatgcttctgttatccgtgtcattgctcatacccagattaggaagatgaagggtttgaagcagaagaaggctcacctgatggagattcaggtcaatggtggtaccattgctgacaaggtggactatggctacaaattctttgagaaagaggtccctgttgatgctgtcttccagaaggatgagatgattgacatcattggtgtgaccaaggggaaaggttatgagggtgtggtcactcgttggggtgtcacccggcttccccgcaagacccacaggggtctccgcaaagttgcttgtatcngtgcatggcatccggctagggtctcctanacggttgctcgtgctggtcagaatggggtaccaccaccgcactgagatgaacaagaaggtttacaagatcggcaaggctggacaagagacccacgatgcctccacagagtttgacaggactgagaaggacatcactcccatgggtggcttcccccattatggtatcgtgaagggtgactacctgatgatcaagggctgctgtgtgggtccaaagaagagggtggtgaccctccgccagtccctcctgaagcagacttcccggctggcgctggaggagatcaagctcaagtttcatcgacacatcgtccaaatttgggcacggtcgcttccagactaccgatgagaagcagaggttctttggcaagctcaaggcgtaaggtgctgcggtgcagcgaagtcccatttctcaaaatcatcaaactgtgatacttttgtttgtaaccttgctgtaccaagttttgtagccatggtccagtcgtctatggattgttccatgcttcagaactgcactgtctatgttttgtgctattttggttgtttaatgccccaatcattgcatatagattctaattgttttggtgtttgatgatcg

SEQ ID NO: 12059 - protein, 307 aa, Zea mays subsp. mays
  peptide (1)..(307): Ceres Seq. ID no. 12579275
  misc_feature (284)..(284): Xaa is any aa, unknown or other
  misc_feature (293)..(293): Xaa is any aa, unknown or other
ARDHYLEHPNRKTAAPPPSTDKEEEEGRMSHRKFEHPRHGSLGFLPRKRSSRHRGKVKSFPRDDAKKPCHLTAFLGYKAGMTHIVREVEKPGSKLHKKETCEAVTIIETPPLVIVGLVAYVKTPRGLRTLNSVWAQHLSEEVRRRFYKNWCKSKKKAFTKYALKYENDAGKKEIQLQLEKMKKYASVIRVIAHTQIRKMKGLKQKKAHLMEIQVNGGTIADKVDYGYKFFEKEVPVDAVFQKDEMIDIIGVTKGKGYEGVVTRWGVTRLPRKTHRGLRKVACIXAWHPARVSXTVARAGQNGVPPPH

SEQ ID NO: 12060 - protein, 279 aa, Zea mays subsp. mays
  peptide (1)..(279): Ceres Seq. ID no. 12579276
  misc_feature (256)..(256): Xaa is any aa, unknown or other
  misc_feature (265)..(265): Xaa is any aa, unknown or other
MSHRKFEHPRHGSLGFLPRKRSSRHRGKVKSFPRDDAKKPCHLTAFLGYKAGMTHIVREVEKPGSKLHKKETCEAVTIIETPPLVIVGLVAYVKTPRGLRTLNSVWAQHLSEEVRRRFYKNWCKSKKKAFTKYALKYENDAGKKEIQLQLEKMKKYASVIRVIAHTQIRKMKGLKQKKAHLMEIQVNGGTIADKVDYGYKFFEKEVPVDAVFQKDEMIDIIGVTKGKGYEGVVTRWGVTRLPRKTHRGLRKVACIXAWHPARVSXTVARAGQNGVPPPH

SEQ ID NO: 12061 - protein, 227 aa, Zea mays subsp. mays
  peptide (1)..(227): Ceres Seq. ID no. 12579277
  misc_feature (204)..(204): Xaa is any aa, unknown or other
  misc_feature (213)..(213): Xaa is any aa, unknown or other
MTHIVREVEKPGSKLHKKETCEAVTIIETPPLVIVGLVAYVKTPRGLRTLNSVWAQHLSEEVRRRFYKNWCKSKKKAFTKYALKYENDAGKKEIQLQLEKMKKYASVIRVIAHTQIRKMKGLKQKKAHLMEIQVNGGTIADKVDYGYKFFEKEVPVDAVFQKDEMIDIIGVTKGKGYEGVVTRWGVTRLPRKTHRGLRKVACIXAWHPARVSXTVARAGQNGVPPPH

SEQ ID NO: 12062 - DNA, 1167 bp, Zea mays subsp. mays
  misc_feature (1)..(1167): Ceres Seq. ID no. 12556567
  misc_feature (1)..(1167): Ortholog of  Ceres SEQ ID NO 13656436 as cited in SEQ ID NO 69154
gatggatgaagtataatataaagtcggtaggggttacctaagtattttatcgttccaccccaaacctccgacgttttgcatctccaagcagcatcgtctcctccccagatccatcaattcgttcggaccgcccttctcgtgtccccgttccaaagcgcggcaggctgagcggttccgtcagatttgagtcgtcatgaatcccgagtatgattaccttttcaaacttctgcttatcggtgattctggtgttggaaaatcatgcttgcttctcagatttgcagatgattcatatctggacagctacatcagcacaattggagttgactttaaaattaggacagtagagcaagacgggaagaccataaagcttcaaatttgggatactgctggacaagagcgcttcaggacaatcactagcagctactaccgcggagctcacggaatcattattgtatatgacgtgacagaccaagaaagcttcaataatgtcaagcaatggttaaacgagattgaccgttatgcaagtgacaatgttaacaagctccttgtgggaacaagagcgatctaactgctaacaaagttgtggcaaccgagacagcaaaggcgtttgctgatgagatgggcatcccattcatggagacgagtgccaaaaacgccatcaatgtggagcaggccttcatggctatggctgcatccatcaaggacaggatggccagccaaccagctgcggctaacgcaaggccagcgaccgtgcagatccgcggtcaacccgtcaaccagaagacgtcttgctgctcatcctaaggttgcctgatttttttttgtactttgtgtaaactcaaacacacaactactaccttttgtgtgcgcttgcaaatgtatttgcattattttcagaagacgctgctgatagcatctattcattgatcggacgattagggctagcttgtcgaattccatttttccaagggatttctatttttctaagagaaattatttttattttttcttaaaaaaataagaatttttttggaaaaatggagttaccaaactagctattagggagctgcaaatatgtaagcaggtacttggtgcactctcgactttccattcctttctaccctatcatacagcttcaccgtttataagccacgaattgcatttgtg

SEQ ID NO: 12063 - protein, 124 aa, Zea mays subsp. mays
  peptide (1)..(124): Ceres Seq. ID no. 12556568
MNPEYDYLFKLLLIGDSGVGKSCLLLRFADDSYLDSYISTIGVDFKIRTVEQDGKTIKLQIWDTAGQERFRTITSSYYRGAHGIIIVYDVTDQESFNNVKQWLNEIDRYASDNVNKLLVGTRAI

SEQ ID NO: 12064 - protein, 66 aa, Zea mays subsp. mays
  peptide (1)..(66): Ceres Seq. ID no. 12556569
MRWASHSWRRVPKTPSMWSRPSWLWLHPSRTGWPANQLRLTQGQRPCRSAVNPSTRRRLAAHPKVA

SEQ ID NO: 12065 - DNA, 1805 bp, Zea mays subsp. mays
  misc_feature (1)..(1805): Ceres Seq. ID no. 12374215
  misc_feature (1)..(1805): Ortholog of  Ceres SEQ ID NO 13597407 as cited in SEQ ID NO 64106
  misc_feature (1)..(1805): Ortholog of  Ceres SEQ ID NO 14303309 as cited in SEQ ID NO 67739
atcgattgttgtccgctgttctccttcctcctcgtcctccttcaggccagcgggcaagaagaagaagaagaaaaatcaaggcttgcggcgagaggctgtgcccggccgaccggcgagcgaacttcgtacgcgcgtcatgggtggcggcagcaacagaggcggcgccggcgccggcgaggagagcggcagcgaccacgacggtgtgctgcggaggccgctgctcaacacggggagctggtaccggatgagctcgcggcagtccagctttgccccggggacctcctccatggccgtcctgcgcgagtcccacgtctccgccttcctctgcacgctcatcgtcgcgctcggccccatccagttcggcttcaccagcggcttctcctccccgacccaggacgccatggttcgggacctcaacctctctatctccgagttctcggcgttcggatcgctgtccaacgtcggcggcatggtcggggcgatcgccagcgggcagatggccgagtacattggccgtaaagggtcgttgatgattgctgcaatcccaaatatcatcggttggcttgcgatctcctttgcaaaagatgcctcatttctatatatgggacgattgcttgaagggtttggtgtcgggatcatatcctacacggtaccggtatacatagcagagatatctcctcagaacatgaggggagctcttggttctgtgaaccagttgtctgtgacctttggcatattcttggcctatttgctcggcatgtttattccttggagacttcttgctgtgattggagccttgccctgcacaatgttgattcctgggctattcttcattccagaatctcccagatggctggcaaagatgaatttgatggaagattgtgagacgtccctacaagtgctgagggggtttgagactgacatcacaacagaagtgaatgatataaagagggcagtggcatcatcaagtaagaggaccacaatcagttttcaagaattaaaccaaaagaaataccgcacgccactacttctagggattggcctacttgtactgcaaaatcttagtggaatcaacggtgtactgttttatgcaagtagcatcttcaaagctgcaggggttacaaacagcgacttggccacctgttcacttggtgctattcaggtccttgctactggagttacaacatggctgttagacagagctggacgacgcatccttctcattatttctacctctggcatgactctatgccttcttgctgtttctgttgtattttttctcaaggataacatttcacaggattctaactcgtactacatcttaacaatgatctcccttgttggtattgtgtctttcgtcattaccttctcgtttggtatgggtgccattccatggctcatgatgtctgagatcctcccggttagcatcaagagccttggcggaagcatcgcaacactggccaactggctgacatccttcgccataacaatgacgacgaacttgatgctcacgtggagtgttggaggcacttttctctcgtacatggttgtgagcgccttcaccatcgtttttgttgtcctttgggtgccggagacgaaggggagaactctagaggagatacaattttcgtttcgctgagcattcagcgttagctgcaatggttgcccgagtgtttatcttagggcctgtttagatctcatgagctaaagcaaaaaggagctaaaatttagtcactttataaactaaagttccaatcaagaggagctaaaagtgaataaaattgtaaaagaatatccttttagcc

SEQ ID NO: 12066 - protein, 545 aa, Zea mays subsp. mays
  peptide (1)..(545): Ceres Seq. ID no. 12374216
SIVVRCSPSSSSSFRPAGKKKKKKNQGLRREAVPGRPASELRTRVMGGGSNRGGAGAGEESGSDHDGVLRRPLLNTGSWYRMSSRQSSFAPGTSSMAVLRESHVSAFLCTLIVALGPIQFGFTSGFSSPTQDAMVRDLNLSISEFSAFGSLSNVGGMVGAIASGQMAEYIGRKGSLMIAAIPNIIGWLAISFAKDASFLYMGRLLEGFGVGIISYTVPVYIAEISPQNMRGALGSVNQLSVTFGIFLAYLLGMFIPWRLLAVIGALPCTMLIPGLFFIPESPRWLAKMNLMEDCETSLQVLRGFETDITTEVNDIKRAVASSSKRTTISFQELNQKKYRTPLLLGIGLLVLQNLSGINGVLFYASSIFKAAGVTNSDLATCSLGAIQVLATGVTTWLLDRAGRRILLIISTSGMTLCLLAVSVVFFLKDNISQDSNSYYILTMISLVGIVSFVITFSFGMGAIPWLMMSEILPVSIKSLGGSIATLANWLTSFAITMTTNLMLTWSVGGTFLSYMVVSAFTIVFVVLWVPETKGRTLEEIQFSFR

SEQ ID NO: 12067 - protein, 500 aa, Zea mays subsp. mays
  peptide (1)..(500): Ceres Seq. ID no. 12374217
MGGGSNRGGAGAGEESGSDHDGVLRRPLLNTGSWYRMSSRQSSFAPGTSSMAVLRESHVSAFLCTLIVALGPIQFGFTSGFSSPTQDAMVRDLNLSISEFSAFGSLSNVGGMVGAIASGQMAEYIGRKGSLMIAAIPNIIGWLAISFAKDASFLYMGRLLEGFGVGIISYTVPVYIAEISPQNMRGALGSVNQLSVTFGIFLAYLLGMFIPWRLLAVIGALPCTMLIPGLFFIPESPRWLAKMNLMEDCETSLQVLRGFETDITTEVNDIKRAVASSSKRTTISFQELNQKKYRTPLLLGIGLLVLQNLSGINGVLFYASSIFKAAGVTNSDLATCSLGAIQVLATGVTTWLLDRAGRRILLIISTSGMTLCLLAVSVVFFLKDNISQDSNSYYILTMISLVGIVSFVITFSFGMGAIPWLMMSEILPVSIKSLGGSIATLANWLTSFAITMTTNLMLTWSVGGTFLSYMVVSAFTIVFVVLWVPETKGRTLEEIQFSFR

SEQ ID NO: 12068 - protein, 464 aa, Zea mays subsp. mays
  peptide (1)..(464): Ceres Seq. ID no. 12374218
MSSRQSSFAPGTSSMAVLRESHVSAFLCTLIVALGPIQFGFTSGFSSPTQDAMVRDLNLSISEFSAFGSLSNVGGMVGAIASGQMAEYIGRKGSLMIAAIPNIIGWLAISFAKDASFLYMGRLLEGFGVGIISYTVPVYIAEISPQNMRGALGSVNQLSVTFGIFLAYLLGMFIPWRLLAVIGALPCTMLIPGLFFIPESPRWLAKMNLMEDCETSLQVLRGFETDITTEVNDIKRAVASSSKRTTISFQELNQKKYRTPLLLGIGLLVLQNLSGINGVLFYASSIFKAAGVTNSDLATCSLGAIQVLATGVTTWLLDRAGRRILLIISTSGMTLCLLAVSVVFFLKDNISQDSNSYYILTMISLVGIVSFVITFSFGMGAIPWLMMSEILPVSIKSLGGSIATLANWLTSFAITMTTNLMLTWSVGGTFLSYMVVSAFTIVFVVLWVPETKGRTLEEIQFSFR

SEQ ID NO: 12069 - DNA, 1241 bp, Zea mays subsp. mays
  misc_feature (1)..(1241): Ceres Seq. ID no. 12387145
  misc_feature (1)..(1241): Ortholog of  Ceres SEQ ID NO 13660287 as cited in SEQ ID NO 67316
agtgatgttctcctacgtgtggtccttcacgctgcagatgtacctgcaggcgcagagcaagaacgcggtgatcacgtacctggccatgctgaacctcggcctccacctgctcctgtcctggctggccaccgccaggctccgcctcggcctcgccggcgtcatgggctccatggttgtcgccatgtggatccccgtgctcggccagctcgccttcgtcttcttcggcgggtgcccgcgcacctggaccggcttctcctccgccgccttcgccgacctcgccgccatcgtcaggctgtcgctgtcgtctggcgtcatgctctgtttggagctgtggtacaacaccatactggtgctgctcactgggtacatgaagaacgcagaggttgcgctggacgccctctcaatatgcctcaacatcaacggctgggagatgatgatttccatcggctttctggtggcaaccggagtacgggtggcgaacgagctgggagccgggagcgcgaggagggccaagttcgccatctacaacgtggtggccacctcctccatcatcgggtccgtgctgttcgtgctgttcctcctcttccgcggaggcctcgcctacatattcaccgacagccaggcggtggcggacgcagtcgccggcctctcgcccctgctggccttctccatactgctcaacagcgtccagccagtgctgtcaggcgtcgctgtcggcgcgggctggcagagcgtcgtcgcctacgttaacatcacttcgtactacctcatcggcatccctcttggagccgtgctgggctacgcgctggggcttcatgtgaagggcatctggatcggcatgctgctcggaacgctggtccagactgttgtgcttctcttcataacgttgaagaccgactgggaaaaacaggtggaggttgctcaagagaggctgaagagatggtacatggaagagaacagaagactccaggggtccagacgaaacccttaggccggccctcagctccactgtgtatctctagttttccactcaccacgagaacaaaacgagggagacgactgctccacgtacaggccgatcgaggctgaaggatcatctctgggctgtatggtattgtagacacaaataatcatctgggctgggctgggcatgcaggtaatagtggtgtgcactagttctgaggttatatctctgccttgttcatcttaattcgatctgccggtgtcttgttgatcagtgc

SEQ ID NO: 12070 - protein, 329 aa, Zea mays subsp. mays
  peptide (1)..(329): Ceres Seq. ID no. 12387146
VMFSYVWSFTLQMYLQAQSKNAVITYLAMLNLGLHLLLSWLATARLRLGLAGVMGSMVVAMWIPVLGQLAFVFFGGCPRTWTGFSSAAFADLAAIVRLSLSSGVMLCLELWYNTILVLLTGYMKNAEVALDALSICLNINGWEMMISIGFLVATGVRVANELGAGSARRAKFAIYNVVATSSIIGSVLFVLFLLFRGGLAYIFTDSQAVADAVAGLSPLLAFSILLNSVQPVLSGVAVGAGWQSVVAYVNITSYYLIGIPLGAVLGYALGLHVKGIWIGMLLGTLVQTVVLLFITLKTDWEKQVEVAQERLKRWYMEENRRLQGSRRNP

SEQ ID NO: 12071 - protein, 328 aa, Zea mays subsp. mays
  peptide (1)..(328): Ceres Seq. ID no. 12387147
MFSYVWSFTLQMYLQAQSKNAVITYLAMLNLGLHLLLSWLATARLRLGLAGVMGSMVVAMWIPVLGQLAFVFFGGCPRTWTGFSSAAFADLAAIVRLSLSSGVMLCLELWYNTILVLLTGYMKNAEVALDALSICLNINGWEMMISIGFLVATGVRVANELGAGSARRAKFAIYNVVATSSIIGSVLFVLFLLFRGGLAYIFTDSQAVADAVAGLSPLLAFSILLNSVQPVLSGVAVGAGWQSVVAYVNITSYYLIGIPLGAVLGYALGLHVKGIWIGMLLGTLVQTVVLLFITLKTDWEKQVEVAQERLKRWYMEENRRLQGSRRNP

SEQ ID NO: 12072 - protein, 317 aa, Zea mays subsp. mays
  peptide (1)..(317): Ceres Seq. ID no. 12387148
MYLQAQSKNAVITYLAMLNLGLHLLLSWLATARLRLGLAGVMGSMVVAMWIPVLGQLAFVFFGGCPRTWTGFSSAAFADLAAIVRLSLSSGVMLCLELWYNTILVLLTGYMKNAEVALDALSICLNINGWEMMISIGFLVATGVRVANELGAGSARRAKFAIYNVVATSSIIGSVLFVLFLLFRGGLAYIFTDSQAVADAVAGLSPLLAFSILLNSVQPVLSGVAVGAGWQSVVAYVNITSYYLIGIPLGAVLGYALGLHVKGIWIGMLLGTLVQTVVLLFITLKTDWEKQVEVAQERLKRWYMEENRRLQGSRRNP

SEQ ID NO: 12073 - DNA, 1467 bp, Zea mays subsp. mays
  misc_feature (1)..(1467): Ceres Seq. ID no. 12411666
  misc_feature (1)..(1467): Ortholog of  Ceres SEQ ID NO 14314823 as cited in SEQ ID NO 52565
  misc_feature (1)..(1467): Ortholog of  Ceres SEQ ID NO 14307324 as cited in SEQ ID NO 54131
  misc_feature (1)..(1467): Ortholog of  Ceres SEQ ID NO 14303336 as cited in SEQ ID NO 54567
  misc_feature (1)..(1467): Ortholog of  Ceres SEQ ID NO 13599083 as cited in SEQ ID NO 0
acatacctgactctcctccgatctctcagcacgctcctcttctgctaccttgctttccctgctgcgatccgttccttgccctattagtattagctagccggccggccggatcgacgatcgagcaaggagaggcgccccagcagtcctcgtcggatctatccatctcgtcgacagcgtcagcgcctcaggtggatcggagcggaggtggtggaccgggagctagtagctgccacacatttcggtcttcgaaaccacatatcatgatgtcgtcctcgtcctcgtcgtcggccgcctgctgcttcccgctggaccacctcgcgccgtcccccaccgagcagctctgctacgtgcactgcaactgctgcgacaccatcctcgccgtcggcgtgccctgcagcagcctgttcaagacggtgacggtgcgctgcggccactgcgccaacctactctccgtcaacctccgcggcctcctgctcccgcccgccgcgccggcgccgcccaaccatctcaacttcgctcactccttgctgtcacccacatccccgcatggcctcttggacgagttggctctccagcaggcgccgagcttcctgatggagcaggcgagtgccaacctgagcagcaccatgacgggccgcagcagcaacagcagctgcgccagcaacctgccgccgccggcgccgatgccggcagctcagcctgtgcagcaggaagccgaactgcccaagaccgccccgtcggtaaacaggcctccggagaagcggcagagagtcccgtcggcatacaaccggttcatcaaggacgagatccagcgcatcaaggccggcaacccggacatcacccaccgggaggcgttcagcgcagccgcaaagaattgggcccatttcccccacatccacttcggcctcatgccggaccagggcctcaagaagaccttcaagactcaggatggcgctgaagacatgctactcaaagacgatctctacgccgcagcggctgcagctgcagcagccaacatgggcatcactccattctaataactctggttaggcatgtgttctgaatcagctggcacgtcgtagtggctatcgccctttgtgctgcattctagggtttcgtctcagatcttgatctcaacatcgatcgtgtgtcgtttaattagagtactttccagtgtggggatagaaatggagaataatcaagttagagcgcgcacctagtaggccactgatgatccggtaggtacagacttgattgtctcctctaaatatcccttttcatttcatgttctctctgtttttcctattttttttgttcctggaccccttcaactcgccagtagagagctcgttgtgcctctctgatcccatgtttgcgtatgtctgctcaacaacatgtttttaccatggagaacaagttgaacatctgttagatctatcaacagtgtcatatatatgttccatcgtc

SEQ ID NO: 12074 - protein, 344 aa, Zea mays subsp. mays
  peptide (1)..(344): Ceres Seq. ID no. 12411667
IPDSPPISQHAPLLLPCFPCCDPFLALLVLASRPAGSTIEQGEAPQQSSSDLSISSTASAPQVDRSGGGGPGASSCHTFRSSKPHIMMSSSSSSSAACCFPLDHLAPSPTEQLCYVHCNCCDTILAVGVPCSSLFKTVTVRCGHCANLLSVNLRGLLLPPAAPAPPNHLNFAHSLLSPTSPHGLLDELALQQAPSFLMEQASANLSSTMTGRSSNSSCASNLPPPAPMPAAQPVQQEAELPKTAPSVNRPPEKRQRVPSAYNRFIKDEIQRIKAGNPDITHREAFSAAAKNWAHFPHIHFGLMPDQGLKKTFKTQDGAEDMLLKDDLYAAAAAAAAANMGITPF

SEQ ID NO: 12075 - protein, 258 aa, Zea mays subsp. mays
  peptide (1)..(258): Ceres Seq. ID no. 12411668
MMSSSSSSSAACCFPLDHLAPSPTEQLCYVHCNCCDTILAVGVPCSSLFKTVTVRCGHCANLLSVNLRGLLLPPAAPAPPNHLNFAHSLLSPTSPHGLLDELALQQAPSFLMEQASANLSSTMTGRSSNSSCASNLPPPAPMPAAQPVQQEAELPKTAPSVNRPPEKRQRVPSAYNRFIKDEIQRIKAGNPDITHREAFSAAAKNWAHFPHIHFGLMPDQGLKKTFKTQDGAEDMLLKDDLYAAAAAAAAANMGITPF

SEQ ID NO: 12076 - protein, 257 aa, Zea mays subsp. mays
  peptide (1)..(257): Ceres Seq. ID no. 12411669
MSSSSSSSAACCFPLDHLAPSPTEQLCYVHCNCCDTILAVGVPCSSLFKTVTVRCGHCANLLSVNLRGLLLPPAAPAPPNHLNFAHSLLSPTSPHGLLDELALQQAPSFLMEQASANLSSTMTGRSSNSSCASNLPPPAPMPAAQPVQQEAELPKTAPSVNRPPEKRQRVPSAYNRFIKDEIQRIKAGNPDITHREAFSAAAKNWAHFPHIHFGLMPDQGLKKTFKTQDGAEDMLLKDDLYAAAAAAAAANMGITPF

SEQ ID NO: 12077 - DNA, 1224 bp, Zea mays subsp. mays
  misc_feature (1)..(1224): Ceres Seq. ID no. 12425143
  misc_feature (1)..(1224): Ortholog of  Ceres SEQ ID NO 13581804 as cited in SEQ ID NO 51424
  misc_feature (1)..(1224): Ortholog of  Ceres SEQ ID NO 13663874 as cited in SEQ ID NO 67003
gcacgagaccattacctagaacatcctaatcgaaaaattttttggtgagtgccccctttcccttccctagaccagatcctcgccccgttttccacttttgcctccaccgccggcccaattcggataacaagctccctccgcctcgccgcgtctcctcccagccgcaggagccgccgccatccgatccggaagagggaggaggggggagggaggaggatctgtgtcccgattcgattggagctctcgtccccggcggtccaggatggtgcggggcaagacgcagatgaagcggatagagaacccggccagtcgccaggtcaccttctccaagcgccgcaacggcctgctcaagaaggcgttcgagctctccgtcctctgcgacgccgaggtcgcgctcgtcgtcttctccccgcgcggcaagctctacgaattcgccagcggaagtgcccagaaaacaattgaacgttatagaacgtacacaaaggataatgtcagcaacaagacagcacatcaggacattgagcaagtaaaagctgatgctgagggcctggcaaagaaactggaagcacttgaagcttacaaaagaaaacttttgggtgagaggttggaagaatgctcctttgaagaactgcacagtttggaagtgaaactcgaaaagagccttcattgcatcaggggaagaaagactcagctgctggaggagcaactccataagctgaaggagaaggagatgaatctgcgcaagagcaacgaagatttacgtgaaaagtgcaagaagcagccgccgccgccgccgcctatgctgatggctcctccgccgcctccagcgccggcagccatcgatcacacggggccgaaggatgtcgggatggacgtggagacggagctgtacataggattgcccggcagagattaccgctcaaacaacaaagacatgactgcacagtagctgtcaggtcaggtcaggtcaggctagccagcagtgcagagaataatcttagatctgtggtgcggagaactggagatgcaagccaagcccaagccaatcaacatgataaggatcatgagtgtcgcgtcgtgttttacaaacctgtccaccgtccgtcaaaggcacatgcgccagaacgtccgtcagagaacacttaccccctcatctccctctattagctanctgctccggcctgctcatgtcgaaaccttctgttcaagtatgttctcctcctg

SEQ ID NO: 12078 - protein, 228 aa, Zea mays subsp. mays
  peptide (1)..(228): Ceres Seq. ID no. 12425144
MVRGKTQMKRIENPASRQVTFSKRRNGLLKKAFELSVLCDAEVALVVFSPRGKLYEFASGSAQKTIERYRTYTKDNVSNKTAHQDIEQVKADAEGLAKKLEALEAYKRKLLGERLEECSFEELHSLEVKLEKSLHCIRGRKTQLLEEQLHKLKEKEMNLRKSNEDLREKCKKQPPPPPPMLMAPPPPPAPAAIDHTGPKDVGMDVETELYIGLPGRDYRSNNKDMTAQ

SEQ ID NO: 12079 - protein, 221 aa, Zea mays subsp. mays
  peptide (1)..(221): Ceres Seq. ID no. 12425145
MKRIENPASRQVTFSKRRNGLLKKAFELSVLCDAEVALVVFSPRGKLYEFASGSAQKTIERYRTYTKDNVSNKTAHQDIEQVKADAEGLAKKLEALEAYKRKLLGERLEECSFEELHSLEVKLEKSLHCIRGRKTQLLEEQLHKLKEKEMNLRKSNEDLREKCKKQPPPPPPMLMAPPPPPAPAAIDHTGPKDVGMDVETELYIGLPGRDYRSNNKDMTAQ

SEQ ID NO: 12080 - DNA, 1803 bp, Zea mays subsp. mays
  misc_feature (1)..(1803): Ceres Seq. ID no. 12342358
  misc_feature (1)..(1803): Ortholog of  Ceres SEQ ID NO 14311219 as cited in SEQ ID NO 56635
  misc_feature (1)..(1803): Ortholog of  Ceres SEQ ID NO 15169615 as cited in SEQ ID NO 66708
  misc_feature (1)..(1803): Ortholog of  Ceres SEQ ID NO 15169619 as cited in SEQ ID NO 67512
gcatcgccgccccccgtcccgacgaattggaatacggaaagcgaaagatgatggatctcgccgacccccagcagcagcagcggctcatcgccggcgcggcgctgctgctggcaaccgcggccttcctcaggctcctcctggagctcccgctcccggggcggcaagcgcctgccgcccaccatcccgggggcgccggtgatcggcggcctcgtcaagttcatgcgcgggcccatccccatgatccgggagcagtacgcccgcctcggcagcgtcttcaccgtccccatcatcacccgcaggatcacgttcctcgtcggccctgaggtgtccgcgcacttcttcaagggcaacgaggccgagatgagccagcaggaggtgtacaggttcaacgtgcccacgttcggcccccggggtcgtcttcgacgtcgactactccgtcaggcaggagcagttcaggttctttaccgaggcgctccgggcgaacaagctgcgcagctatgtcgaccagatggttgctgaggctgaggagtacttctcaaagtggggagaaagtggcactgttgatttgaagtatgagttggagcacctcatcatactgacagctagccggtgcttgctgggaagggaggtgcgagaaaagctgttcgacgatgtttctgctctcttccatgaccttgacaacgggatgcagccaatcagtgtactcttcccatacctcccaatccctgcacataagcgccgcgacagggcacgtgcacgtctggcagaaatctttgccaccatcatcaagtcccgcaaggcctctggacagtctgaagaagacatgctgcagtgcttcattgattccaagtacaagaatgggcgttccaccagtgagggcgaggtaaccgggctacttatcgcagcactcttcgctgggcagcacaccagctctatcacctcaacctggactggagcatacatgcttcggttcaagcagtacttcgcagaggctgtagaggagcagaaggatgtcatgaaacggcacggcgacaagattgatcatgacatcctcgcggagatggacgtcctctaccggtgcatcaaggaggccctccgtctccacccgccgctaatcatgttgcttcgtcaatcacacagcgacttcaccgtgacaacaaaggaaggcaaagtgtatgacatccccaagggccacatcgtcgcgacatcaccatccttcgccaacaggctgccccacatctacaagaaccctgactcatatgaccctgaccggttcggtcccggaagggaggaggacaaggctgcaggtgccttctcgtacatctccttcggtggtggcaggcatgggtgcctcggtgagcccttcgcctaccttcagatcaaggcgatctggacgcacctactgaggaactttgagttcgagctggtatcgccgttcccagagaacgactggaacgccatggtggttggcatcaagggcgaggtgatggttaactacaagaggcggaagcttgtcgtggacaactaagattgtggtcgccagtctctatctcttagatgcttgcttgcttctttttgattcgattgctttcacctgtctgtcagcatttgttcggtgcaagttctgctgcacacacgccagctttgtaggggtgtttctgttgtttaggattctgtaatttgcttcaccatgggggtctgccatgatgtgcaacatccgcttgttagctagcttcctagctcagcattccccttagtcaaatctgtaacctgtagcatctataagcgtgtggctttattgtc

SEQ ID NO: 12081 - protein, 339 aa, Zea mays subsp. mays
  peptide (1)..(339): Ceres Seq. ID no. 12342359
MVAEAEEYFSKWGESGTVDLKYELEHLIILTASRCLLGREVREKLFDDVSALFHDLDNGMQPISVLFPYLPIPAHKRRDRARARLAEIFATIIKSRKASGQSEEDMLQCFIDSKYKNGRSTSEGEVTGLLIAALFAGQHTSSITSTWTGAYMLRFKQYFAEAVEEQKDVMKRHGDKIDHDILAEMDVLYRCIKEALRLHPPLIMLLRQSHSDFTVTTKEGKVYDIPKGHIVATSPSFANRLPHIYKNPDSYDPDRFGPGREEDKAAGAFSYISFGGGRHGCLGEPFAYLQIKAIWTHLLRNFEFELVSPFPENDWNAMVVGIKGEVMVNYKRRKLVVDN

SEQ ID NO: 12082 - protein, 280 aa, Zea mays subsp. mays
  peptide (1)..(280): Ceres Seq. ID no. 12342360
MQPISVLFPYLPIPAHKRRDRARARLAEIFATIIKSRKASGQSEEDMLQCFIDSKYKNGRSTSEGEVTGLLIAALFAGQHTSSITSTWTGAYMLRFKQYFAEAVEEQKDVMKRHGDKIDHDILAEMDVLYRCIKEALRLHPPLIMLLRQSHSDFTVTTKEGKVYDIPKGHIVATSPSFANRLPHIYKNPDSYDPDRFGPGREEDKAAGAFSYISFGGGRHGCLGEPFAYLQIKAIWTHLLRNFEFELVSPFPENDWNAMVVGIKGEVMVNYKRRKLVVDN

SEQ ID NO: 12083 - protein, 234 aa, Zea mays subsp. mays
  peptide (1)..(234): Ceres Seq. ID no. 12342361
MLQCFIDSKYKNGRSTSEGEVTGLLIAALFAGQHTSSITSTWTGAYMLRFKQYFAEAVEEQKDVMKRHGDKIDHDILAEMDVLYRCIKEALRLHPPLIMLLRQSHSDFTVTTKEGKVYDIPKGHIVATSPSFANRLPHIYKNPDSYDPDRFGPGREEDKAAGAFSYISFGGGRHGCLGEPFAYLQIKAIWTHLLRNFEFELVSPFPENDWNAMVVGIKGEVMVNYKRRKLVVDN

SEQ ID NO: 12084 - DNA, 1968 bp, Zea mays subsp. mays
  misc_feature (1)..(1968): Ceres Seq. ID no. 12367168
  misc_feature (1)..(1968): Ortholog of  Ceres SEQ ID NO 14307843 as cited in SEQ ID NO 20508
  misc_feature (1)..(1968): Ortholog of  Ceres SEQ ID NO 15170811 as cited in SEQ ID NO 52649
  misc_feature (1)..(1968): Ortholog of  Ceres SEQ ID NO 13638331 as cited in SEQ ID NO 58047
  misc_feature (1)..(1968): Ortholog of  Ceres SEQ ID NO 15225845 as cited in SEQ ID NO 65125
  misc_feature (1)..(1968): Ortholog of  Ceres SEQ ID NO 15170135 as cited in SEQ ID NO 67647
gcacgagaccattacctagaacatcctaatcgaaaaagtcccgtactcccgtccaaggcagcagagaccagagagcgaaggaggccaaggccatcgctctcctagcctcggagacttgcctttgcatacacatccccccggagggcggtggccggagctgacccctgatcggacgcgcttagcgcctgagggcatggctgcaaccgtgaggagggctgcttcctccgtcctctctcgcttcctcctcacaaagccttcgccttcgcctgcttctgccgccggcaataattccgctctcctcggatcaggggctgctgctcttcacaggttcagcaccgcaccggcatccgcggccgcggccgcagaggagccgatccagcccgcggtggaggtgaagcacacccagctcctcatcaatggcaacttcgtcgacgctgcttctgggaagacgttcccgacgctggacccgcgcaccggcgaggtcatcgcgcgcgtcgccgagggcgacagcgaggacatcgaccgcgccgtggccgccgcccgcagggccttcgacgagggcccgtggccgaggatgaccgcctacgatcggtgccgcgtgctgctgcgcttcgcggacctgatcgagcggcacgcggaggaggtcgcggcgctggagacgtgggacaacggcaagacgctggcgcaggcggcgggggccgaggtgcccatggtggcgcggtgcgtccggtactacgccggctgggcggacaagatccacggcctggtggcgccggccgacggcgcgcaccacgtgcaggtgctgcacgagccggtcggcgtggccggccagatcatcccctggaacttcccgctgctcatgttcgcctggaaggtcggcccggcgctcgcctgcggcaacaccgtcgtcctcaagaccgccgagcagacgccgctctccgcgctctacgtggccaacctcctccacgaggctgggctccccgagggtgttctgaacgtggtgtccggcttcggcccgacggccggcgcagcgctctccagccacatgggtgtcgacaagcttgcgttcacgggatcgacgggcacggggcagatcgtgctcgagctggcggcgaggagcaaccttaagccggtgacgctggagctcggtggcaagtcccctttcatcgtcatggacgacgccgacgtcgaccaggccgtcgagctcgcgcaccaggcggtcttcttcaaccagggccaatgctgctgcgccgggtcgcggacgttcgtgcacgagcgcgtgtacgacgagttcgtggagaagtccaaggcccgcgccctgaagcgcgtcgtcggcgaccccttcagggacggggtcgaacaggggcctcagatcgacggcgagcaattcaacaagatcttgcggtacgtccagtccggcgtcgacagcggtgccaccctcgtcgccggcggcgacagggtaggcgacaggggcttctacatacagccgacggtgtttgccgacgccaaggacgaaatgaagatcgctcgggaggagatattcgggccggtgcaaaccattctcaagttcagcggcgtggaggaggtgatccggcgcgcgaacgcgacgccctacgggctggcggcgggggtgttcacgcggagcctggacgcggccaacaccctgtcgcgggcgctgcgggcgggcaccgtgtgggtgaactgctacgacgtgttcgacgccaccatcccgttcggcggctacaagatgagcggcgtcgggcgggagaagggcatctacgccctccgcaactacctccagacaaaggccgtcgtcacacccatcaagaaccccgcatggctgtaaatcacatcctccgtccttgcccgcacggcgctgcgccggttctcggagaacgtgacgaataaaacaaacggtttggttaaaaagacaaggacgacggaaaatgggtcatttttatctccccc

SEQ ID NO: 12085 - protein, 550 aa, Zea mays subsp. mays
  peptide (1)..(550): Ceres Seq. ID no. 12367169
MAATVRRAASSVLSRFLLTKPSPSPASAAGNNSALLGSGAAALHRFSTAPASAAAAAEEPIQPAVEVKHTQLLINGNFVDAASGKTFPTLDPRTGEVIARVAEGDSEDIDRAVAAARRAFDEGPWPRMTAYDRCRVLLRFADLIERHAEEVAALETWDNGKTLAQAAGAEVPMVARCVRYYAGWADKIHGLVAPADGAHHVQVLHEPVGVAGQIIPWNFPLLMFAWKVGPALACGNTVVLKTAEQTPLSALYVANLLHEAGLPEGVLNVVSGFGPTAGAALSSHMGVDKLAFTGSTGTGQIVLELAARSNLKPVTLELGGKSPFIVMDDADVDQAVELAHQAVFFNQGQCCCAGSRTFVHERVYDEFVEKSKARALKRVVGDPFRDGVEQGPQIDGEQFNKILRYVQSGVDSGATLVAGGDRVGDRGFYIQPTVFADAKDEMKIAREEIFGPVQTILKFSGVEEVIRRANATPYGLAAGVFTRSLDAANTLSRALRAGTVWVNCYDVFDATIPFGGYKMSGVGREKGIYALRNYLQTKAVVTPIKNPAWL

SEQ ID NO: 12086 - protein, 423 aa, Zea mays subsp. mays
  peptide (1)..(423): Ceres Seq. ID no. 12367170
MTAYDRCRVLLRFADLIERHAEEVAALETWDNGKTLAQAAGAEVPMVARCVRYYAGWADKIHGLVAPADGAHHVQVLHEPVGVAGQIIPWNFPLLMFAWKVGPALACGNTVVLKTAEQTPLSALYVANLLHEAGLPEGVLNVVSGFGPTAGAALSSHMGVDKLAFTGSTGTGQIVLELAARSNLKPVTLELGGKSPFIVMDDADVDQAVELAHQAVFFNQGQCCCAGSRTFVHERVYDEFVEKSKARALKRVVGDPFRDGVEQGPQIDGEQFNKILRYVQSGVDSGATLVAGGDRVGDRGFYIQPTVFADAKDEMKIAREEIFGPVQTILKFSGVEEVIRRANATPYGLAAGVFTRSLDAANTLSRALRAGTVWVNCYDVFDATIPFGGYKMSGVGREKGIYALRNYLQTKAVVTPIKNPAWL

SEQ ID NO: 12087 - protein, 378 aa, Zea mays subsp. mays
  peptide (1)..(378): Ceres Seq. ID no. 12367171
MVARCVRYYAGWADKIHGLVAPADGAHHVQVLHEPVGVAGQIIPWNFPLLMFAWKVGPALACGNTVVLKTAEQTPLSALYVANLLHEAGLPEGVLNVVSGFGPTAGAALSSHMGVDKLAFTGSTGTGQIVLELAARSNLKPVTLELGGKSPFIVMDDADVDQAVELAHQAVFFNQGQCCCAGSRTFVHERVYDEFVEKSKARALKRVVGDPFRDGVEQGPQIDGEQFNKILRYVQSGVDSGATLVAGGDRVGDRGFYIQPTVFADAKDEMKIAREEIFGPVQTILKFSGVEEVIRRANATPYGLAAGVFTRSLDAANTLSRALRAGTVWVNCYDVFDATIPFGGYKMSGVGREKGIYALRNYLQTKAVVTPIKNPAWL

SEQ ID NO: 12088 - DNA, 1624 bp, Zea mays subsp. mays
  misc_feature (1)..(1624): Ceres Seq. ID no. 13493048
  misc_feature (1)..(1624): Ortholog of  Ceres SEQ ID NO 12589728 as cited in SEQ ID NO 0
  misc_feature (1)..(1624): Ortholog of  Ceres SEQ ID NO 14302164 as cited in SEQ ID NO 0
cattacctagaacatcctaatcgaaaacaacagaagctagaaacagccagtactgaagaaaaggacatggttttttcagaaataatgcctcaagctctcacattgatgactgatgtatttggaaattatgttgtccaaaagttttttgagcatggaagcactacccagataaaggaattggctggtcagcttattggacgtgtccttgctcttagtcttcagatgtatgggtgccgggttatacagaaggctatagaagttgttgatttggatctgcagactaaaatggttgcggagctggagggccatgtcatgcgctgtgtacgtgatcaaaatgggaaccatgttatacagaaatgcatagagtgcattcctcagcatgctatcgagttcattgtctcgacattctatggccaagttgtaatgttatccactcatccatatggttgccgagttattcagagggttctagagcattgtgatgatcctaagacacagcaaataatgatggatgagattctccagtctgtttgcttgctagctcaggatcagtatggcaactatgtggttcagcatgttctggaacatggcaaaccccatgagagatcagccattattgagaagctaattggccaagttgtgcaaatgagccagcaaaagtttgcctcaaatgtcattgagaagtgcttagcctttggaaatcctgtagaacgtcaggttctgattggtgagatgcttggatccactagcgaaagcgaacctcttgaggtaatgatgaaagaccagtttgcaaactatgtggtgcagaaggtgctagaaacttgtgacgatcagcagagggagatgatcctaacaaggataaagacacacctgaacacactcaagaagtacacatacgggaagcacatagtagcgcgtgtagagaagcttgttgctgctggagagaagcgccttgggcttcaaccagcatgcaccgccgcctgaagggcaaactctctaagttgtacagctaacagttgctaggtttgcgctcatgtttttttctctactaaaaaccttatatgaaggccccttttggcctcgccaggaaaaaaaatactgtatgtttgcggggaagagtgtacattaattctttagcagaaagaccccccctacccatgcggcggaatcaagggaggagtgatgcgtgagtccgatcgatctgaaggctgctgtaaagaggaagatggaaggaaggagtgagaagcatgtcagttactctgctgctgtacaaattaaacttagctcttagagtgaggagaaagtaagctgttagctgtctgcctaaaggaaagaaaggaaaaaaaagaagctggaggccattggcaccctgtttcatgtgttggtatagctgctgtggctctcctgttgtctgtctggcctttgttgtaacataaagctgaggcgcactagcctgccttcgttttcacagttaagctgaagttattagtatcagctttcctgaactgcttggtatgtaatgtgactgtgttttcttccttgtactaatgcttgtctcatgtaatccattcccctaatgtctgaatgttttaatctcaattttcacctctgaaacgttttttct

SEQ ID NO: 12089 - protein, 327 aa, Zea mays subsp. mays
  peptide (1)..(327): Ceres Seq. ID no. 13493049
HYLEHPNRKQQKLETASTEEKDMVFSEIMPQALTLMTDVFGNYVVQKFFEHGSTTQIKELAGQLIGRVLALSLQMYGCRVIQKAIEVVDLDLQTKMVAELEGHVMRCVRDQNGNHVIQKCIECIPQHAIEFIVSTFYGQVVMLSTHPYGCRVIQRVLEHCDDPKTQQIMMDEILQSVCLLAQDQYGNYVVQHVLEHGKPHERSAIIEKLIGQVVQMSQQKFASNVIEKCLAFGNPVERQVLIGEMLGSTSESEPLEVMMKDQFANYVVQKVLETCDDQQREMILTRIKTHLNTLKKYTYGKHIVARVEKLVAAGEKRLGLQPACTAA

SEQ ID NO: 12090 - protein, 305 aa, Zea mays subsp. mays
  peptide (1)..(305): Ceres Seq. ID no. 13493050
MVFSEIMPQALTLMTDVFGNYVVQKFFEHGSTTQIKELAGQLIGRVLALSLQMYGCRVIQKAIEVVDLDLQTKMVAELEGHVMRCVRDQNGNHVIQKCIECIPQHAIEFIVSTFYGQVVMLSTHPYGCRVIQRVLEHCDDPKTQQIMMDEILQSVCLLAQDQYGNYVVQHVLEHGKPHERSAIIEKLIGQVVQMSQQKFASNVIEKCLAFGNPVERQVLIGEMLGSTSESEPLEVMMKDQFANYVVQKVLETCDDQQREMILTRIKTHLNTLKKYTYGKHIVARVEKLVAAGEKRLGLQPACTAA

SEQ ID NO: 12091 - protein, 299 aa, Zea mays subsp. mays
  peptide (1)..(299): Ceres Seq. ID no. 13493051
MPQALTLMTDVFGNYVVQKFFEHGSTTQIKELAGQLIGRVLALSLQMYGCRVIQKAIEVVDLDLQTKMVAELEGHVMRCVRDQNGNHVIQKCIECIPQHAIEFIVSTFYGQVVMLSTHPYGCRVIQRVLEHCDDPKTQQIMMDEILQSVCLLAQDQYGNYVVQHVLEHGKPHERSAIIEKLIGQVVQMSQQKFASNVIEKCLAFGNPVERQVLIGEMLGSTSESEPLEVMMKDQFANYVVQKVLETCDDQQREMILTRIKTHLNTLKKYTYGKHIVARVEKLVAAGEKRLGLQPACTAA

SEQ ID NO: 12092 - DNA, 1296 bp, Zea mays subsp. mays
  misc_feature (1)..(1296): Ceres Seq. ID no. 12360769
  misc_feature (1)..(1296): Ortholog of  Ceres SEQ ID NO 15224330 as cited in SEQ ID NO 58808
gcacgagaccattacctagaacatcctaatcgaaaaagtcctctaatcctctctcgctcgctctctagtctcttttcttctctggtctcgcgttctccctcctctgttcgccgctttataccgcccgcccgcccaccagaacgacatacatcctcctcccccgtcccctccaatggggaacccgccggagctgtaccacaagatcctcaacatccccaaggacacctctccgcaggaactccgcgccgcgtacaagagcctcgtcaagaaatggcaccccgacaagcacccgccgtcgtccaggccggaggccgaggcgcgcttcaaggccatcagcgaggcctacgaggcgctcctggaccagcaagagaacagggccgtgttcgggccgtgcaacggcgaccgggcgggtggaggcgccggggcgcgcgtggagaggacgcgcagtgacggtttctgcgcgaggagcgcgcccggcaccccggccagggagttgaagaaggtgtacagcgccggcaaccccggcgggcgccccgccttcgccgagttctccagttccatcgtgcgcaaggcgccgccgctggagcgcaggctcgagtgcaccctcgaggagctctgccgcggatgcagcaaggaggtcacgttcacccgcgacgtcgtcaccaggaacgggtcgatcgtgaagaaggaggtgacgcagacggtgcaggtgaagccagggtggaggaaagggaagcaggtggtgctggaaggcatgggggacgagcggccggggtgcctgccgggcgacgccgtcctgacggtgtccgagaggaggcacccggcgttcaagcgggtgggcgacgacctggtgctcagggcggaggtgccgctggcgggcgcgctcaccggctggtccctctcgttccggctcctcggcggccggaaggtgacctgctcgttcgaggacgaggtcatccgccccgggcacgagagggtgatccgcggcgagggcatgccggtccccgggcggaaggacggcgcgcgcggcgacctcagggtgaagctcgaggtcgtgttccccacggagctctccgacgagcagcgcgccggcctcgccgagatcctcagagggtcctgctgatcggtcggtgtcgccgtcggtccaattaagtcctatcgtatcaagttttcttgggcgtgtgaccgtgtccgatgagtaactgagtacataaagagagatggtcgacgttcgttgtacatacgggttgtctatgtatatgtcgatatatatgaaacgtgaggcaagccttgtgc

SEQ ID NO: 12093 - protein, 316 aa, Zea mays subsp. mays
  peptide (1)..(316): Ceres Seq. ID no. 12360770
MGNPPELYHKILNIPKDTSPQELRAAYKSLVKKWHPDKHPPSSRPEAEARFKAISEAYEALLDQQENRAVFGPCNGDRAGGGAGARVERTRSDGFCARSAPGTPARELKKVYSAGNPGGRPAFAEFSSSIVRKAPPLERRLECTLEELCRGCSKEVTFTRDVVTRNGSIVKKEVTQTVQVKPGWRKGKQVVLEGMGDERPGCLPGDAVLTVSERRHPAFKRVGDDLVLRAEVPLAGALTGWSLSFRLLGGRKVTCSFEDEVIRPGHERVIRGEGMPVPGRKDGARGDLRVKLEVVFPTELSDEQRAGLAEILRGSC

SEQ ID NO: 12094 - protein, 175 aa, Zea mays subsp. mays
  peptide (1)..(175): Ceres Seq. ID no. 12360771
MQQGGHVHPRRRHQERVDREEGGDADGAGEARVEEREAGGAGRHGGRAAGVPAGRRRPDGVREEAPGVQAGGRRPGAQGGGAAGGRAHRLVPLVPAPRRPEGDLLVRGRGHPPRAREGDPRRGHAGPRAEGRRARRPQGEARGRVPHGALRRAARRPRRDPQRVLLIGRCRRRSN

SEQ ID NO: 12095 - DNA, 1101 bp, Zea mays subsp. mays
  misc_feature (1)..(1101): Ceres Seq. ID no. 12413114
  misc_feature (1)..(1101): Ortholog of  Ceres SEQ ID NO 12594806 as cited in SEQ ID NO 0
attttcaatcccagaacagggcccgagcgagagcccacgaacgaagggctccttctctctcctctcgttgctgcagttgcagacttgcagtgttgcagataattttggatgccattcaagcgttctacggctccaatttctctgacttctccctgagcctttgcggccggctggagctggacggtccccgggcagcgcaggcagccggactgcgggagtcacctccatggcctcggctgctactgcaaccctccccaaggttcagttgaggccaagatgcaacagctactttcaggtgaccggtcaagtccatgcccacaccaaaacatgcgttgcctgcaagtgtccgacccatatccacgggttgcttgtttcagctggaggaaggaggacattcctgccggtgtctgcagttggatcaggtcagggctcatcggtcactgaggccgacaggaagagcgatttgtcgctggagaacgtcaagacgtccgttgtatcccgcgacgatgaaaagattaatgtacgagtgcagttgcctggaaaggcgacgcaaaaggtgtttgatgaggctctgacgttcttggcccgtgatgcgccaccggttcctggttttaggaagtccaaaggagggaaaacatcaaatatacccagcagcatcctgctgcagatgcttggcaagagccgggtcaccaaattcgttcttcaggaaatactgagcatcaccattgaagaatttgtcaagaaggaaaacctgaaggtgaaacctgagatccagacaacccagtccgaaggcgagatggagtccgcgttcgcgccgggatcagcatttgggttcaatgttgtccttcagctcgagacacctgactctgatgatccagaggagaaacctggctctgatgacgatttacaggaggaatctggttcctcagagtagaaagaaatgcatatcgcctgcatgcatctatcaaccttcttcatgtgccattccttatgaatgaatgtactgaatggaaagccgttgcaaccgttttgagttgagagttgcaactgaaacatttctgaagatatgagtggccgactcgcctctcttaacatgttggc

SEQ ID NO: 12096 - protein, 235 aa, Zea mays subsp. mays
  peptide (1)..(235): Ceres Seq. ID no. 12413115
MASAATATLPKVQLRPRCNSYFQVTGQVHAHTKTCVACKCPTHIHGLLVSAGGRRTFLPVSAVGSGQGSSVTEADRKSDLSLENVKTSVVSRDDEKINVRVQLPGKATQKVFDEALTFLARDAPPVPGFRKSKGGKTSNIPSSILLQMLGKSRVTKFVLQEILSITIEEFVKKENLKVKPEIQTTQSEGEMESAFAPGSAFGFNVVLQLETPDSDDPEEKPGSDDDLQEESGSSE

SEQ ID NO: 12097 - DNA, 1426 bp, Zea mays subsp. mays
  misc_feature (1)..(1426): Ceres Seq. ID no. 12411646
  misc_feature (1)..(1426): Ortholog of  Ceres SEQ ID NO 14303313 as cited in SEQ ID NO 64389
gaaagggaagagaatgaatctattaactagttctcaacactccttcgtggggcgtgctcgctcctagaatcctagggtcctcttctgcgtcaccgatcggtagtaagcacagagtcaccgcaccgccgcgtctaggtcaccgccatggccggggactggcaggagctgggccaagcggcggccatcggcctcctcttcgccttcctggtcgccaagctcatctccaccgtgatcgccttcaaggaggacaacctccgcatcacgcgctcccctccgacctcccccactgccgccgccgcagccgcgcctcccgtcccctcccactacggctccaccgacggaggcagcggcagcgacagcgactgggagggcgtggagagcaccgagctcgatgaggagttcagcgccgcctccgccttcatcgcggcctccgccgcctccggcaccagcgtccccgaggaagcgcagctgcgcctctacggcctctacaagatcgccaccgaggggccctgcaccgcgccccagccgtccgcgctcaagctcaaggcccgtgccaaatggaatgcttggcataagctgggtgctatgcctacagaagaagctatgcaagggtacatcacaattgttcaggacctattccctaactgggatgcaggtgcaagtgcgaaaaggaaagatgaagatagcattgcttccgcatcagcttcaaaggggcccatgggacctgtgtttagcagtttaatgtatgaggaagacgaaggaaatgaatcagaacttggtgacatccatgtttcagcaagggaaggggcgactgatgacatagtgaagcttctggcagctggtgttgaggtcaacgtgagagataccgaaggtagaagtccgttgcactgggctgttgatcgtggccatcttagtgctgtcgaggttcttgcaaatgcaaatgcagatctgaatgctaaggacaatgaagggcaaacggcactccactatgctgctgtttgtgaaagagaagacattgcagagttgcttgtcaagcatcatgctgatcttcggatcaaggacgaggacgggaacacggcacatgacttgtgcccttcgagctggtcttttatgaaccaggcaaactgataacacgaatatacggatatgcttgaaggtgtcatctgccaagaaacatgctagctgtatcctaaagcccatacggcacatatggtgtatcttagtgtcatgtgtgacgtgtgggaaatcaggcaggttgtttgcgtacgtggtgccctctctgaaatcagatgagttgttttatcgtcctcatcgaaccagttgtcaaaggatagtattagtgttgggaagatacatgtattgctttaatcaaaagaatcatgctggacaccaatgcaagcccaaatgggaagaaaaggatgtgcgg

SEQ ID NO: 12098 - protein, 327 aa, Zea mays subsp. mays
  peptide (1)..(327): Ceres Seq. ID no. 12411647
MAGDWQELGQAAAIGLLFAFLVAKLISTVIAFKEDNLRITRSPPTSPTAAAAAAPPVPSHYGSTDGGSGSDSDWEGVESTELDEEFSAASAFIAASAASGTSVPEEAQLRLYGLYKIATEGPCTAPQPSALKLKARAKWNAWHKLGAMPTEEAMQGYITIVQDLFPNWDAGASAKRKDEDSIASASASKGPMGPVFSSLMYEEDEGNESELGDIHVSAREGATDDIVKLLAAGVEVNVRDTEGRSPLHWAVDRGHLSAVEVLANANADLNAKDNEGQTALHYAAVCEREDIAELLVKHHADLRIKDEDGNTAHDLCPSSWSFMNQAN

SEQ ID NO: 12099 - protein, 180 aa, Zea mays subsp. mays
  peptide (1)..(180): Ceres Seq. ID no. 12411648
MPTEEAMQGYITIVQDLFPNWDAGASAKRKDEDSIASASASKGPMGPVFSSLMYEEDEGNESELGDIHVSAREGATDDIVKLLAAGVEVNVRDTEGRSPLHWAVDRGHLSAVEVLANANADLNAKDNEGQTALHYAAVCEREDIAELLVKHHADLRIKDEDGNTAHDLCPSSWSFMNQAN

SEQ ID NO: 12100 - protein, 174 aa, Zea mays subsp. mays
  peptide (1)..(174): Ceres Seq. ID no. 12411649
MQGYITIVQDLFPNWDAGASAKRKDEDSIASASASKGPMGPVFSSLMYEEDEGNESELGDIHVSAREGATDDIVKLLAAGVEVNVRDTEGRSPLHWAVDRGHLSAVEVLANANADLNAKDNEGQTALHYAAVCEREDIAELLVKHHADLRIKDEDGNTAHDLCPSSWSFMNQAN

SEQ ID NO: 12101 - DNA, 1791 bp, Zea mays subsp. mays
  misc_feature (1)..(1791): Ceres Seq. ID no. 12368040
  misc_feature (1)..(1791): Ortholog of  Ceres SEQ ID NO 13638402 as cited in SEQ ID NO 60300
  misc_feature (1)..(1791): Ortholog of  Ceres SEQ ID NO 12618349 as cited in SEQ ID NO 64838
  misc_feature (1)..(1791): Ortholog of  Ceres SEQ ID NO 15176161 as cited in SEQ ID NO 0
agatatatgcaagaaaagaaaagagaagagcctctgtggatagtggtgggtgctggatcactgggcggagcagcttctcatatcggatcgatcgattaattaatatatactataaacatacaatcaattacatacatatacgccaagagaagaggaacgccggcccgtttcacttgtctccttcctccgatccctcccggcggccggccgggctcgggcgtttttccccttttgtttcccatggaggacgccaagatggggaacggcgccaccatccgcgcggtgctcgccatcctccagtggtggggattcaacgtcaccgtcatcatcatcaacaagtggatcttccaggtcccgtccctcgcgcttgctcttgtttaaatcctggtcttctttttttgtttcaattcaatttccagagatggccatgtatgtagttatatatatattcattcaaggggatttaggggtggatccgtcaggacaaccaagagatttcgtctctttttagttcttgccttcatccaatcgttcgataggtgcagattaatcgcccccatgatgttgtcgtctttttcttcagtgatttggtaggaacataaaggaatcatccttttttttttgtccgactgaaaagaaaattacttacttgaaccggtggtggttcgtagattggatttccagatttaattgtaatcatggtaagaagagcctgttcttatcctgtgacgctgactctgtgtggggttgtcagaaactggagttcaagttcccccctgacggtgtcgtgcgtccacttcatatgttcctccatcggagcctacatcgcgatcaaagtcctgagaacgaagccgctgatcgaggtggcctcggaggaccggtggaggaggatattccccatgtcgttggtgttctgcgtcaacatcgtgctggggaacgtgagcctgaggtacataccagtgtcattcatgcagacgatcaagtcgttcactccggcaacgacagtggttcttcagtggctggtttggaggaaatactttgagtggcgcatctgggcgtccttggtgcccatcgttggaggaatccttgtcacctccgtgacggagctgagcttcaacacggctggcttctgcgccgcgctggtggggtgcctggccacgtccaccaagaccatcctggcagagtcgctgctccacggctacaagttcgacagcatcaacacggtgtactacatggctccgctggccacgctgatcctgtcggtgccggccgtggcgctggagggcggcgccgtgctggggtggctgcggacgcacgagtccgtgggaccggcgctggcggtcgtcgtcacctccggggtgctggccttctgcctcaacttctccatcttctacgtcatccactccacgacggcagtcaccttcaacgtggccggcaacctcaaggtggccgtggcggtgctggcgtcctggatggtgttccggaaccccatctccgccatgaacgcactcggctgcggcgtcacgctcgtcggatgcaccttctacggctacgtcaggcaccgactctcgcagaaccaggcgcccagagcccgcttggagatgctgccgctcaccgccgtcgacaagcaaggcgacaagatataaaaagtcttttcgaataaaccatctgattctttctgatccacctagcctaaccgccgatcgagaatgcatccaccatcagagatgacaggaaattattttttgttggcagccagattttgataatgagtcagttcagttgttgctt

SEQ ID NO: 12102 - protein, 315 aa, Zea mays subsp. mays
  peptide (1)..(315): Ceres Seq. ID no. 12368041
MVRRACSYPVTLTLCGVVRNWSSSSPLTVSCVHFICSSIGAYIAIKVLRTKPLIEVASEDRWRRIFPMSLVFCVNIVLGNVSLRYIPVSFMQTIKSFTPATTVVLQWLVWRKYFEWRIWASLVPIVGGILVTSVTELSFNTAGFCAALVGCLATSTKTILAESLLHGYKFDSINTVYYMAPLATLILSVPAVALEGGAVLGWLRTHESVGPALAVVVTSGVLAFCLNFSIFYVIHSTTAVTFNVAGNLKVAVAVLASWMVFRNPISAMNALGCGVTLVGCTFYGYVRHRLSQNQAPRARLEMLPLTAVDKQGDKI

SEQ ID NO: 12103 - protein, 248 aa, Zea mays subsp. mays; identical to SEQ ID NO: 4930
  peptide (1)..(248): Ceres Seq. ID no. 12368042

SEQ ID NO: 12104 - protein, 225 aa, Zea mays subsp. mays
  peptide (1)..(225): Ceres Seq. ID no. 12368043
MQTIKSFTPATTVVLQWLVWRKYFEWRIWASLVPIVGGILVTSVTELSFNTAGFCAALVGCLATSTKTILAESLLHGYKFDSINTVYYMAPLATLILSVPAVALEGGAVLGWLRTHESVGPALAVVVTSGVLAFCLNFSIFYVIHSTTAVTFNVAGNLKVAVAVLASWMVFRNPISAMNALGCGVTLVGCTFYGYVRHRLSQNQAPRARLEMLPLTAVDKQGDKI

SEQ ID NO: 12105 - DNA, 1352 bp, Zea mays subsp. mays
  misc_feature (1)..(1352): Ceres Seq. ID no. 12566161
  misc_feature (1)..(1352): Ortholog of  Ceres SEQ ID NO 12635907 as cited in SEQ ID NO 525
  misc_feature (1)..(1352): Ortholog of  Ceres SEQ ID NO 13503463 as cited in SEQ ID NO 65057
aaaagaccaaaaaccctcacgaaattctgagatccatccagaaacgtcgctccatggcgattatctccgacttcaaggaggacgagaccccgcagcagccggcggcggtcggccccggcgtcgaggagaccctggtggcagcgctagagaggaccggcggtgcactcccctttctccaggcggccatcgatgtcgctcaccgcaggtctggcctgttccgcgacccttcggcggtgagcaaggttaccgcgatggcggcggccgtcagggcgcaggtggagaccgaggagagggcagccagagaggtcaagaggaaggcggaggaggccgagaggaaggctgcggccgaggcgcagaagcctgacatggaggcggcgacggcgacggcggaggagaagctggagaaggaccgtatggatgcggataaggcggaggaaggcaacgttagacaaccaaatgctggcaatggtcttgatttggagaagtactcatggactcaacagttgcctgaggttaacatcactattcctgttcctcaaggaacaaaatcaagatttgtggtcgttgatataaagaagaaccatctgaaggttgttctgaagggccagccacctatcattgatggtgagctctataagccagttaaggttgatgattgcttctggagcatagaggatggaaaaactctttccatattgcttacaaagcacaaccaaatggagtggtggaagtctgttataaagggtggccctgaagttgatacccaaaaggtggaacctgagaacagcaaactctctgatttggatcctgagactagacaaactgtggagaagatgatgtttgaccagcgccagaagcagatgggccttccgacaagtgatgaaatgcaaaagcaagaaattctcaagaagttcatgtctgagcacccggagatggacttctctagagcgaaaatgccttgaggatttgttcgggcagttatttctaccagtctgcttaggttgtctttgagtctggtatcggtgtcaaacaaatcttcatctgttttttttttgtaatgcgtcaggaatatcaggcttgttctttttcatctcaatccatatgcattggaaacgtttgggtgggtttaaatccatagtaggtcaaaagctttactaaattttccaatccaatccattccattggtcacgtggcttgaggatttgttcgggcagttatttctaccagtctgcttaggttgtctttgtgtgattgtgtctggtgttagtgtggaacagatgtctttgtgtgattgtgtctggtgttagtgtggaacagatcatctttttttagtagcgtcagaaatatcattt

SEQ ID NO: 12106 - protein, 319 aa, Zea mays subsp. mays
  peptide (1)..(319): Ceres Seq. ID no. 12566162
KTKNPHEILRSIQKRRSMAIISDFKEDETPQQPAAVGPGVEETLVAALERTGGALPFLQAAIDVAHRRSGLFRDPSAVSKVTAMAAAVRAQVETEERAAREVKRKAEEAERKAAAEAQKPDMEAATATAEEKLEKDRMDADKAEEGNVRQPNAGNGLDLEKYSWTQQLPEVNITIPVPQGTKSRFVVVDIKKNHLKVVLKGQPPIIDGELYKPVKVDDCFWSIEDGKTLSILLTKHNQMEWWKSVIKGGPEVDTQKVEPENSKLSDLDPETRQTVEKMMFDQRQKQMGLPTSDEMQKQEILKKFMSEHPEMDFSRAKMP

SEQ ID NO: 12107 - protein, 302 aa, Zea mays subsp. mays
  peptide (1)..(302): Ceres Seq. ID no. 12566163
MAIISDFKEDETPQQPAAVGPGVEETLVAALERTGGALPFLQAAIDVAHRRSGLFRDPSAVSKVTAMAAAVRAQVETEERAAREVKRKAEEAERKAAAEAQKPDMEAATATAEEKLEKDRMDADKAEEGNVRQPNAGNGLDLEKYSWTQQLPEVNITIPVPQGTKSRFVVVDIKKNHLKVVLKGQPPIIDGELYKPVKVDDCFWSIEDGKTLSILLTKHNQMEWWKSVIKGGPEVDTQKVEPENSKLSDLDPETRQTVEKMMFDQRQKQMGLPTSDEMQKQEILKKFMSEHPEMDFSRAKMP

SEQ ID NO: 12108 - protein, 236 aa, Zea mays subsp. mays
  peptide (1)..(236): Ceres Seq. ID no. 12566164
MAAAVRAQVETEERAAREVKRKAEEAERKAAAEAQKPDMEAATATAEEKLEKDRMDADKAEEGNVRQPNAGNGLDLEKYSWTQQLPEVNITIPVPQGTKSRFVVVDIKKNHLKVVLKGQPPIIDGELYKPVKVDDCFWSIEDGKTLSILLTKHNQMEWWKSVIKGGPEVDTQKVEPENSKLSDLDPETRQTVEKMMFDQRQKQMGLPTSDEMQKQEILKKFMSEHPEMDFSRAKMP

SEQ ID NO: 12109 - DNA, 1719 bp, Zea mays subsp. mays
  misc_feature (1)..(1719): Ceres Seq. ID no. 12406579
  misc_feature (1)..(1719): Ortholog of  Ceres SEQ ID NO 15175507 as cited in SEQ ID NO 20619
  misc_feature (1)..(1719): Ortholog of  Ceres SEQ ID NO 13639663 as cited in SEQ ID NO 57850
  misc_feature (1)..(1719): Ortholog of  Ceres SEQ ID NO 15224330 as cited in SEQ ID NO 58808
  misc_feature (1)..(1719): Ortholog of  Ceres SEQ ID NO 14302150 as cited in SEQ ID NO 0
actcttcgcttctaactccgctgggccaccagctttgaccgccgcctcccttcccctccgctactgctcctccccaccccactcccccgcaggagcggcggcggcggcggcgaggtcgtaccccacatcggcgagcggcggcggcaccgccggaggcaaaggcaagatgttcgggcgcgcgccgaagaagagcgacaacaccaagtactacgagatcctcggggtgcccaagtcggcgtcccaggacgatctcaagaaggcctaccgcaaggctgctatcaagaaccaccccgacaagggcggtgaccccgagaagttcaaggagctcgcacaagcctatgaggttttgagtgatccagagaaacgtgagatttatgatcagtatggtgaagatgcccttaaggaaggaatgggcggtggaggatcccatgttgatccatttgacatcttctcatcattttttggaccctcttttggaggaggtggtggaagcagcaggggaagaaggcaaaggaggggagaagatgtagttcacccacttaaagtttctctggaagatctttacaatggcacctcaaagaagctctctctttcgcgcaatgtcatctgctccaagtgcaagggcaagggctcgaagtctggtgcctcaatgaggtgccctggttgccagggctcaggcatgaaagtcactattcgtcagctgggcccttccatgatacagcagatgcagcagccttgcaatgagtgcaaggggactggagagagcatcaatgagaaggaccgctgtccagggtgcaagggtgagaaggtcattcaagagaagaaggttcttgaggttcatgttgagaaggggatgcaacacaaccagaagatcaccttccctggtgaagctgatgaagcgcctgatactgtcactggagacattgtattcgtcctccagcagaaggatcactccaaattcaaaagaaagggtgaagatctcttctatgagcacaccttgtctctgaccgaagcactatgtgggttccaatttgttcttacacatctggacaacaggcagcttctcatcaaatcagaccctggtgaagttgttaaacctgaccaattcaaggcgattaatgatgaggggatgccaatttaccagaggcctttcatgaaggggaagctgtacatccatttcacggtggagttccctgactcgttggcaccagagcagtgcaaggctctcgagacagtacttccaccaaggccttcatccaagctgacagacatggagatagatgaatgcgaggagacgactatgcatgatgtgaacaacatcgaggaagagatgcgcaggaagcaagctcacgctgcccaggaggcgtacgaggaggacgacgagatgccgggcggagcccagagagtgcagtgcgcgcaacagtaagcagactatcatcaaggcaattgggaggggtggtgcccttaaagcatgggagtgatctctggttttgctgtcgccgagctgggaaataggaagctgaatcgacctcgcaagcggggaatgtatccttttttgctgcaacataaaaaatgctacccaggcatagctgggtaccttttaacttctgtttgtgggatttgctagagtgatggtttcgatatatagggggacttgaatgtctggaatgctacggtataacgcacatttgggtgcaatgtctgttgcattgctgtctg

SEQ ID NO: 12110 - protein, 474 aa, Zea mays subsp. mays
  peptide (1)..(474): Ceres Seq. ID no. 12406580
LFASNSAGPPALTAASLPLRYCSSPPHSPAGAAAAAARSYPTSASGGGTAGGKGKMFGRAPKKSDNTKYYEILGVPKSASQDDLKKAYRKAAIKNHPDKGGDPEKFKELAQAYEVLSDPEKREIYDQYGEDALKEGMGGGGSHVDPFDIFSSFFGPSFGGGGGSSRGRRQRRGEDVVHPLKVSLEDLYNGTSKKLSLSRNVICSKCKGKGSKSGASMRCPGCQGSGMKVTIRQLGPSMIQQMQQPCNECKGTGESINEKDRCPGCKGEKVIQEKKVLEVHVEKGMQHNQKITFPGEADEAPDTVTGDIVFVLQQKDHSKFKRKGEDLFYEHTLSLTEALCGFQFVLTHLDNRQLLIKSDPGEVVKPDQFKAINDEGMPIYQRPFMKGKLYIHFTVEFPDSLAPEQCKALETVLPPRPSSKLTDMEIDECEETTMHDVNNIEEEMRRKQAHAAQEAYEEDDEMPGGAQRVQCAQQ

SEQ ID NO: 12111 - protein, 419 aa, Zea mays subsp. mays
  peptide (1)..(419): Ceres Seq. ID no. 12406581
MFGRAPKKSDNTKYYEILGVPKSASQDDLKKAYRKAAIKNHPDKGGDPEKFKELAQAYEVLSDPEKREIYDQYGEDALKEGMGGGGSHVDPFDIFSSFFGPSFGGGGGSSRGRRQRRGEDVVHPLKVSLEDLYNGTSKKLSLSRNVICSKCKGKGSKSGASMRCPGCQGSGMKVTIRQLGPSMIQQMQQPCNECKGTGESINEKDRCPGCKGEKVIQEKKVLEVHVEKGMQHNQKITFPGEADEAPDTVTGDIVFVLQQKDHSKFKRKGEDLFYEHTLSLTEALCGFQFVLTHLDNRQLLIKSDPGEVVKPDQFKAINDEGMPIYQRPFMKGKLYIHFTVEFPDSLAPEQCKALETVLPPRPSSKLTDMEIDECEETTMHDVNNIEEEMRRKQAHAAQEAYEEDDEMPGGAQRVQCAQQ

SEQ ID NO: 12112 - protein, 338 aa, Zea mays subsp. mays
  peptide (1)..(338): Ceres Seq. ID no. 12406582
MGGGGSHVDPFDIFSSFFGPSFGGGGGSSRGRRQRRGEDVVHPLKVSLEDLYNGTSKKLSLSRNVICSKCKGKGSKSGASMRCPGCQGSGMKVTIRQLGPSMIQQMQQPCNECKGTGESINEKDRCPGCKGEKVIQEKKVLEVHVEKGMQHNQKITFPGEADEAPDTVTGDIVFVLQQKDHSKFKRKGEDLFYEHTLSLTEALCGFQFVLTHLDNRQLLIKSDPGEVVKPDQFKAINDEGMPIYQRPFMKGKLYIHFTVEFPDSLAPEQCKALETVLPPRPSSKLTDMEIDECEETTMHDVNNIEEEMRRKQAHAAQEAYEEDDEMPGGAQRVQCAQQ

SEQ ID NO: 12113 - DNA, 1152 bp, Zea mays subsp. mays
  misc_feature (1)..(1152): Ceres Seq. ID no. 12341292
  misc_feature (1)..(1152): Ortholog of  Ceres SEQ ID NO 14306627 as cited in SEQ ID NO 53023
  misc_feature (1)..(1152): Ortholog of  Ceres SEQ ID NO 15174917 as cited in SEQ ID NO 53650
  misc_feature (1)..(1152): Ortholog of  Ceres SEQ ID NO 14304034 as cited in SEQ ID NO 53878
  misc_feature (1)..(1152): Ortholog of  Ceres SEQ ID NO 14307559 as cited in SEQ ID NO 54006
  misc_feature (1)..(1152): Ortholog of  Ceres SEQ ID NO 13663874 as cited in SEQ ID NO 67003
aacccaatcgtctctccaccacccaactcctcctgcctgtgctctcctcctttttctccactccgcttttgcttggttccatcgggccggagagggagaagctagctagctagcagcagctctgttggtgtgtgtgtgtgtgtgtgtgtggagggtagctgcagctggggctagctggaaaggtcgggagccatggggaggggccgggtggagctgaagcggatcgagaacaagatcaaccgccaggtcaccttcgccaagcgccgcaacggcctgctcaagaaggcgtacgagctctccgtgctctgcgacgccgaagtcgcgctcatcatcttctccaaccgcggcaagctctacgagttctgcagcggacagagcattaccaaaacacttgagaggtatgaaaaaaacagttatggaggaccagatactgctgtacagaacaaggagaacgagttagtccagagcagtcgtaatgagtacctcaagctgaaagcgagggtggataatttacagaggactcagaggaatttgcttggtgaagatctgggttcacttggtgtcaaagagcttgatcagcttgagaagcaaattgattcatccttaagtcacataagatccacaaggacacagcatatgcttgatcagctcactgatcttcagaggagggagcaaatgatgtgtgaagcaaataagtgccttagaagaaagctggaggagaccagcaaccaggtgcatggccaagtgtgggagcacggtgccaacttattactcggctacgagcggcactcctcgccacagcaagccccatcacatgttggcaatggattattctttcatcccctggaagctgcagcagagccaaccctgcagatcgggttcgctcccgagcatatgaataacttcatgccggcatggctaccctgaagatggatctttgaggcaaagggaataaataaagatgcgatggcagaatcatattgtactgcaagagtgacaattgtgtgttccactcacatatatgacctagttttgtgtgtctatatgtcgaaacccatatgtctgtgattttattatatgttatgtaagcacaaatgaaacatgccggactagttgcttttgcttgtctatgtatttgtatctgttctgtgt

SEQ ID NO: 12114 - protein, 244 aa, Zea mays subsp. mays
  peptide (1)..(244): Ceres Seq. ID no. 12341293
MGRGRVELKRIENKINRQVTFAKRRNGLLKKAYELSVLCDAEVALIIFSNRGKLYEFCSGQSITKTLERYEKNSYGGPDTAVQNKENELVQSSRNEYLKLKARVDNLQRTQRNLLGEDLGSLGVKELDQLEKQIDSSLSHIRSTRTQHMLDQLTDLQRREQMMCEANKCLRRKLEETSNQVHGQVWEHGANLLLGYERHSSPQQAPSHVGNGLFFHPLEAAAEPTLQIGFAPEHMNNFMPAWLP

SEQ ID NO: 12115 - DNA, 1240 bp, Zea mays subsp. mays
  misc_feature (1)..(1240): Ceres Seq. ID no. 12350926
  misc_feature (1)..(1240): Ortholog of  Ceres SEQ ID NO 13595668 as cited in SEQ ID NO 56792
aactagtgcattttaaatcccaagacgtctctcactcttcagccgctttacaactccccaccccatcccatccacacacacttcacccagcgcggcggccgccggccgccggcaatggaggccgtggcgcacagcggcgactacctttggcggttcgtggcggagacagagtggtacaacgaggttgtcctcagcgccgtggcgccaggcgactggtggcgcggcctgccgcacccggtgcagtcatggatgcgcaactgcgtcggcggttacctcctctatttcatctctggtttcctctggtgcttcgtcatctactactggaagcgccacgcctacatccccaaagatgccatccccacaaatgacgctatgaagaagcaaatagttgtagcatcgaaggctatgcctttttactgcgctcttccaactttatctgaatatatgattgagagcggatggactcagtgctacttcaatatcagcgaaattggtttttctatgtacctctgttatatggctatgtatctcatctttgtggagtttggaatttactggatgcacagggagttgcatgacataaaaccattatacaaatatctgcatgcaacccaccatatttacaacaaggagaataccttgtctccatttgctggacttgcatttcatccactggatggtattctgcaagcaataccacatgtgttcgcgctcttcctctttccaacgcacttcaggacacatattgcactcttgttcctagaggctgtgtggacaacaaacatccacgactgcattcatggcaagatatggccagtcatgggtgctggatatcacaccattcaccatacgacttaccgtcacaactatggccactacaccatctggatggactggatgtttggtacgctcaatgagccagaagatatcctcaagaaggcttgagtttctcggagctgtggtattcctatggtgctgctgctggaactgctcgatctgttcccagtgtttctaatccgttgagcctgttcagcactgtctgtttatgtaggcatcagtgtgttaattactttgctaggttcatatggctttgtgcttattctgtaatttagcgatgtttgtctcatgacgcaacggagttcaggacgaataaaactttgctagacacattctggattccagttgcttgtacaatgttggaactcaactgtcaatataggatgtaaaacggattccttcg

SEQ ID NO: 12116 - protein, 276 aa, Zea mays subsp. mays; identical to SEQ ID NO: 6861
  peptide (1)..(276): Ceres Seq. ID no. 12350927

SEQ ID NO: 12117 - protein, 231 aa, Zea mays subsp. mays; identical to SEQ ID NO: 6862
  peptide (1)..(231): Ceres Seq. ID no. 12350928

SEQ ID NO: 12118 - protein, 190 aa, Zea mays subsp. mays
  peptide (1)..(190): Ceres Seq. ID no. 12350929
MKKQIVVASKAMPFYCALPTLSEYMIESGWTQCYFNISEIGFSMYLCYMAMYLIFVEFGIYWMHRELHDIKPLYKYLHATHHIYNKENTLSPFAGLAFHPLDGILQAIPHVFALFLFPTHFRTHIALLFLEAVWTTNIHDCIHGKIWPVMGAGYHTIHHTTYRHNYGHYTIWMDWMFGTLNEPEDILKKA

SEQ ID NO: 12119 - DNA, 1231 bp, Zea mays subsp. mays
  misc_feature (1)..(1231): Ceres Seq. ID no. 13494457
  misc_feature (1)..(1231): Ortholog of  Ceres SEQ ID NO 13581804 as cited in SEQ ID NO 51424
  misc_feature (1)..(1231): Ortholog of  Ceres SEQ ID NO 14310890 as cited in SEQ ID NO 54290
  misc_feature (1)..(1231): Ortholog of  Ceres SEQ ID NO 13663874 as cited in SEQ ID NO 67003
ctcacatcctctttcagttccctctctggatctcttcctgaagagaggcactactgccacaccaccacgccacccatgctcaacatgatgaccgatctgagctgcgggccgtcgtccaaggcggcgaaaggagggcagccggcagcgacgacgggctccggcggcgacaggcaggggaggggcaagatcgagatcaagcgcatcgagaacacgacgaaccggcaggtcaccttctgcaagcgccgcaacggcctgctcaagaaggcgtacgagctctcggtgctctgcgacgccgaggtcgcgctcgtcgtcttctccagccgcggccgcctctacgagtacgccaacaacagtgtgaagtccaccattgagaggtacaagaaggccaacagtgacacctccaactctggcacagttgcagaagtcaatgctcagcactaccagcaggagtcctccaagctgcgccaggcgatcgatagcttgcaaaacgcaaacaggaccatagtgggagattcaatccacaccatgggcctcagggagcttaagcagatggagggcaagctggagaaggccataaacaagattagagctagaaagaatgagctcttgtatgctgaagttgaatatatgcaaaaaagggagatggatctgcagactgacaacatgtacctgaggagcaagatcgccgagaataatgaaacggggcagccaccgatgaacatgattggattgccgtcgacgagcgagtacgatcacatggccccgtttgttgactcgagaaactttcttcaggtgaacatgcagcagcagcctcagcactactcccatctatcagctgcaaccaacgaccctccaactcggatgatgaaattaagaatcttcggccaacaatccatgcacgcaagcacgcagtaaatcatgtgtccaattcagataaaaaaatctactctagcgtttgtataattattaataatcgtgactagtaaactgttatatatatagccatgtgtgtgtggcgcctacatatatgtcatgtggctgtacggcgagtttttctttttcacaagcgtttgcagcagcatttggtgttgctcatcgatcaattaatcgcaagaaattaaacttgtcaccactgtgtgtgcattatttgtacgtgttaatgcagttgttgtatctgttaattgtaccctccatcagataaacgcgggtgcgcgtatgcatatttatgtgt

SEQ ID NO: 12120 - protein, 304 aa, Zea mays subsp. mays
  peptide (1)..(304): Ceres Seq. ID no. 13494458
LTSSFSSLSGSLPEERHYCHTTTPPMLNMMTDLSCGPSSKAAKGGQPAATTGSGGDRQGRGKIEIKRIENTTNRQVTFCKRRNGLLKKAYELSVLCDAEVALVVFSSRGRLYEYANNSVKSTIERYKKANSDTSNSGTVAEVNAQHYQQESSKLRQAIDSLQNANRTIVGDSIHTMGLRELKQMEGKLEKAINKIRARKNELLYAEVEYMQKREMDLQTDNMYLRSKIAENNETGQPPMNMIGLPSTSEYDHMAPFVDSRNFLQVNMQQQPQHYSHLSAATNDPPTRMMKLRIFGQQSMHASTQ

SEQ ID NO: 12121 - protein, 279 aa, Zea mays subsp. mays
  peptide (1)..(279): Ceres Seq. ID no. 13494459
MLNMMTDLSCGPSSKAAKGGQPAATTGSGGDRQGRGKIEIKRIENTTNRQVTFCKRRNGLLKKAYELSVLCDAEVALVVFSSRGRLYEYANNSVKSTIERYKKANSDTSNSGTVAEVNAQHYQQESSKLRQAIDSLQNANRTIVGDSIHTMGLRELKQMEGKLEKAINKIRARKNELLYAEVEYMQKREMDLQTDNMYLRSKIAENNETGQPPMNMIGLPSTSEYDHMAPFVDSRNFLQVNMQQQPQHYSHLSAATNDPPTRMMKLRIFGQQSMHASTQ

SEQ ID NO: 12122 - protein, 276 aa, Zea mays subsp. mays
  peptide (1)..(276): Ceres Seq. ID no. 13494460
MMTDLSCGPSSKAAKGGQPAATTGSGGDRQGRGKIEIKRIENTTNRQVTFCKRRNGLLKKAYELSVLCDAEVALVVFSSRGRLYEYANNSVKSTIERYKKANSDTSNSGTVAEVNAQHYQQESSKLRQAIDSLQNANRTIVGDSIHTMGLRELKQMEGKLEKAINKIRARKNELLYAEVEYMQKREMDLQTDNMYLRSKIAENNETGQPPMNMIGLPSTSEYDHMAPFVDSRNFLQVNMQQQPQHYSHLSAATNDPPTRMMKLRIFGQQSMHASTQ

SEQ ID NO: 12123 - DNA, 1316 bp, Zea mays subsp. mays; identical to SEQ ID NO: 4106
  misc_feature (1)..(1316): Ceres Seq. ID no. 12358113
  misc_feature (1)..(1316): Ortholog of  Ceres SEQ ID NO 14314050 as cited in SEQ ID NO 59952
  misc_feature (1)..(1316): Ortholog of  Ceres SEQ ID NO 13596474 as cited in SEQ ID NO 62169
  misc_feature (1)..(1316): Ortholog of  Ceres SEQ ID NO 13598714 as cited in SEQ ID NO 62656
  misc_feature (1)..(1316): Ortholog of  Ceres SEQ ID NO 15225685 as cited in SEQ ID NO 63616
  misc_feature (1)..(1316): Ortholog of  Ceres SEQ ID NO 13597519 as cited in SEQ ID NO 64759
  misc_feature (1)..(1316): Ortholog of  Ceres SEQ ID NO 14302388 as cited in SEQ ID NO 65655
  misc_feature (1)..(1316): Ortholog of  Ceres SEQ ID NO 13595926 as cited in SEQ ID NO 67778
  misc_feature (1)..(1316): Ortholog of  Ceres SEQ ID NO 13587054 as cited in SEQ ID NO 0

SEQ ID NO: 12124 - protein, 371 aa, Zea mays subsp. mays; identical to SEQ ID NO: 4107
  peptide (1)..(371): Ceres Seq. ID no. 12358114

SEQ ID NO: 12125 - protein, 347 aa, Zea mays subsp. mays; identical to SEQ ID NO: 4108
  peptide (1)..(347): Ceres Seq. ID no. 12358115

SEQ ID NO: 12126 - protein, 298 aa, Zea mays subsp. mays; identical to SEQ ID NO: 4109
  peptide (1)..(298): Ceres Seq. ID no. 12358116

SEQ ID NO: 12127 - DNA, 1655 bp, Zea mays subsp. mays
  misc_feature (1)..(1655): Ceres Seq. ID no. 12343676
  misc_feature (1)..(1655): Ortholog of  Ceres SEQ ID NO 14313155 as cited in SEQ ID NO 54706
  misc_feature (1)..(1655): Ortholog of  Ceres SEQ ID NO 13639022 as cited in SEQ ID NO 59811
aaataaaactgaaatagcgaggaagggacgggttcggcctctctgcccgaattcccgattgcgcctcctccgactccgagattccgtcagccatggacgggctcctgtcgaagctccgcagcctggacgcgtaccccaaggtgaacgaggacttctacagccgcaccctctccggcggcatcatcacgctcgtctcctctgctgtcatgctcctcctcttcgtctccgagctccgattatatctccatgcagttactgagacaacactaagggttgatacttcaaggggagaaacacttcgcataaattttgatgtcacctttccagcccttcaatgttctataattagcctggatgcaatggacatcagtggacaggagcacctagatgtgaaacatgatgtattcaagcagcgaattgatgcccatggcaatgttattgcgactaggcaagatgtagttggtgggatgaagatggaggcacctctacaacatcatggtggaaggcttgaacacaatgaaacctattgtggctcttgttatggtgcacaagaatctgatgatcaatgttgtaacacatgtgaagatgttcgtgaagcctataggaaaaaaggttggggtgtatcgaatccagatttgcttgaccagtgcaaaagggagggctttcttcaaagtataaaggacgaagaaggcgaaggatgcaatatttatggttttattgaagttaataaggttgctgggaatttccattttgctccagggaaaagtttccagcagtcaaatgtgcacgttcatgacttgctcccgttccagaaggacagcttcaatgtcagtcataagataaacagactaagttttggagaatactttccaggtgttgttaatccacttgatggggcaaattgggtgcagcattcatcatatggaatgtatcaatacttcatcaaggttgttcctacagtctacacggacataaatgaacacattattctctctaatcagttctctgtaacggaacattttagaagtggtgagagtggtcggatgcaggctcttcctggtgtgttcttcttttatgacctttctccaatcaaggtcacattcacggaacaacatgtgtcatttttacactttttaactaatgtttgcgctattgttggaggtgtgttcaccgtttctggaatcatagattcgtttgtataccatagtcaaagagcaatcaagaagaagatggaaatcggcaaattcaactgatgttgccttactattgctgcaattaagtagctcctgttgcagctccaagatccagaaatgcaatgtggcttttcctcgaactcttggcacagttgcgtagttgacaaacaattgctcatcagataactcttgatgtgcttgccaacttgcttccggcaaagataccagcgagcaagatggtcatcttgtatacttcgatgttacatttttgtacgcttagtctgacaagaaaacattttacttcctccagctgcaggtgttcgtgtactgttgtaaatttgtggtagagggagcctatctgtagttttttttacaattatgtgtttgtaccagtttttctgagacatttgtagcttagacaggtaaaggttgtttgaaatacatataaaccatttttgaagc

SEQ ID NO: 12128 - protein, 386 aa, Zea mays subsp. mays
  peptide (1)..(386): Ceres Seq. ID no. 12343677
MDGLLSKLRSLDAYPKVNEDFYSRTLSGGIITLVSSAVMLLLFVSELRLYLHAVTETTLRVDTSRGETLRINFDVTFPALQCSIISLDAMDISGQEHLDVKHDVFKQRIDAHGNVIATRQDVVGGMKMEAPLQHHGGRLEHNETYCGSCYGAQESDDQCCNTCEDVREAYRKKGWGVSNPDLLDQCKREGFLQSIKDEEGEGCNIYGFIEVNKVAGNFHFAPGKSFQQSNVHVHDLLPFQKDSFNVSHKINRLSFGEYFPGVVNPLDGANWVQHSSYGMYQYFIKVVPTVYTDINEHIILSNQFSVTEHFRSGESGRMQALPGVFFFYDLSPIKVTFTEQHVSFLHFLTNVCAIVGGVFTVSGIIDSFVYHSQRAIKKKMEIGKFN

SEQ ID NO: 12129 - protein, 348 aa, Zea mays subsp. mays
  peptide (1)..(348): Ceres Seq. ID no. 12343678
MLLLFVSELRLYLHAVTETTLRVDTSRGETLRINFDVTFPALQCSIISLDAMDISGQEHLDVKHDVFKQRIDAHGNVIATRQDVVGGMKMEAPLQHHGGRLEHNETYCGSCYGAQESDDQCCNTCEDVREAYRKKGWGVSNPDLLDQCKREGFLQSIKDEEGEGCNIYGFIEVNKVAGNFHFAPGKSFQQSNVHVHDLLPFQKDSFNVSHKINRLSFGEYFPGVVNPLDGANWVQHSSYGMYQYFIKVVPTVYTDINEHIILSNQFSVTEHFRSGESGRMQALPGVFFFYDLSPIKVTFTEQHVSFLHFLTNVCAIVGGVFTVSGIIDSFVYHSQRAIKKKMEIGKFN

SEQ ID NO: 12130 - protein, 297 aa, Zea mays subsp. mays
  peptide (1)..(297): Ceres Seq. ID no. 12343679
MDISGQEHLDVKHDVFKQRIDAHGNVIATRQDVVGGMKMEAPLQHHGGRLEHNETYCGSCYGAQESDDQCCNTCEDVREAYRKKGWGVSNPDLLDQCKREGFLQSIKDEEGEGCNIYGFIEVNKVAGNFHFAPGKSFQQSNVHVHDLLPFQKDSFNVSHKINRLSFGEYFPGVVNPLDGANWVQHSSYGMYQYFIKVVPTVYTDINEHIILSNQFSVTEHFRSGESGRMQALPGVFFFYDLSPIKVTFTEQHVSFLHFLTNVCAIVGGVFTVSGIIDSFVYHSQRAIKKKMEIGKFN

SEQ ID NO: 12131 - DNA, 1639 bp, Zea mays subsp. mays
  misc_feature (1)..(1639): Ceres Seq. ID no. 12367070
  misc_feature (1)..(1639): Ortholog of  Ceres SEQ ID NO 13596932 as cited in SEQ ID NO 62984
gcacgagaccattacctagaacatcctaatcgaaaaaaagccactcgctgactcatctccatccacaacatcacatactcgctccaacagtcccacccacgctacctagacagtagacacgtgtaccatggtgttcttcaaggcgcgtcgcatggatcctgagttggtgttgccggcgcggccgacgccggccgagacgaaagcgctctccgacctcgacgaccagcggacgctgaggtactacgagacggtgatcgccttcttccgcagccggcgtggctacagcagccacagacgacggccagacgatccagccaaggccatcaaggcggccctcgcggaggcgctcgtgtactactaccccatcgccgggcggctcagggaggccgccggtgggaagctggtggtggattgcaccgcgcagggggtggtgtttgtggaggccgatgcggatgtncggctggaggagctgggcaggcctctgttgccgccgtacccgtgtgtggaggaactgctgtgcgatgcgggtgaaacaagagcggtgattggcaagccattagtcctcatgcaggtgacgaggctcaaatgtggcggatttgtcattggattccacatgtgccatagcattgcagatggattcggcatggttcaattcttcagatgtgtcgccgaactagctcgcggtgaaaaagtgcccacacttttgcccgtgtggagaagagagctcctaacacgacacaggtcaaatactactgcatataatcacacagccacggttaggtccgagtccgactccgacgactacaaatctgacgacgtcatgctgtcaactccaatggacgacatggtagtccagtacttcctcttcgggccaagggagatcgcaaccctacgaagccacctgaggggagacgaccagctgctgctcgccacctccgctacatccttcgagctgctagcggccgtcatgtggcggtgccgcaccttggcgctgggctacgagtcccatcggcgcgttcgcctcatggttaccatgaacgcgcgcgggaagtggaaccagcacacgcccatcccgcggggttactacggcaacgcgcacgtgtcccccatggcggaggccaccgccggcgagctctgcagccagccgctcgcccgcacggtcgatctcgtgcgcaggaccaagctcagcgtcaccaaggaacgcatggagtcgatggtggacacgatcgcttcgacgcgccagtggccgcctccgacgatggacaggatctacgaggtttctgacaccaagtggattgccaccaatgcgacgcagtttgggtgggccgagctggtgggtggtgggataccactggctggcgaccttgcctccaagctgggaagcgaccacatgagctgcaggaaccaggatggcgaccactcgaccatcgtgtcgatgcttctgcccaagccggcgatggacaagtttagcagtgagctgtctgtttggttgaacaacaagcatgatcacaagaacttggttatactcagttctctctagtctaccaacagatttaaacaatattaatgtacctacaatttgttgtacgaaagagaaatgattggctcaatgagaatgaaataatttcggtgttcttct

SEQ ID NO: 12132 - protein, 470 aa, Zea mays subsp. mays
  peptide (1)..(470): Ceres Seq. ID no. 12367071
  misc_feature (110)..(110): Xaa is any aa, unknown or other
MVFFKARRMDPELVLPARPTPAETKALSDLDDQRTLRYYETVIAFFRSRRGYSSHRRRPDDPAKAIKAALAEALVYYYPIAGRLREAAGGKLVVDCTAQGVVFVEADADXRLEELGRPLLPPYPCVEELLCDAGETRAVIGKPLVLMQVTRLKCGGFVIGFHMCHSIADGFGMVQFFRCVAELARGEKVPTLLPVWRRELLTRHRSNTTAYNHTATVRSESDSDDYKSDDVMLSTPMDDMVVQYFLFGPREIATLRSHLRGDDQLLLATSATSFELLAAVMWRCRTLALGYESHRRVRLMVTMNARGKWNQHTPIPRGYYGNAHVSPMAEATAGELCSQPLARTVDLVRRTKLSVTKERMESMVDTIASTRQWPPPTMDRIYEVSDTKWIATNATQFGWAELVGGGIPLAGDLASKLGSDHMSCRNQDGDHSTIVSMLLPKPAMDKFSSELSVWLNNKHDHKNLVILSSL

SEQ ID NO: 12133 - protein, 462 aa, Zea mays subsp. mays
  peptide (1)..(462): Ceres Seq. ID no. 12367072
  misc_feature (102)..(102): Xaa is any aa, unknown or other
MDPELVLPARPTPAETKALSDLDDQRTLRYYETVIAFFRSRRGYSSHRRRPDDPAKAIKAALAEALVYYYPIAGRLREAAGGKLVVDCTAQGVVFVEADADXRLEELGRPLLPPYPCVEELLCDAGETRAVIGKPLVLMQVTRLKCGGFVIGFHMCHSIADGFGMVQFFRCVAELARGEKVPTLLPVWRRELLTRHRSNTTAYNHTATVRSESDSDDYKSDDVMLSTPMDDMVVQYFLFGPREIATLRSHLRGDDQLLLATSATSFELLAAVMWRCRTLALGYESHRRVRLMVTMNARGKWNQHTPIPRGYYGNAHVSPMAEATAGELCSQPLARTVDLVRRTKLSVTKERMESMVDTIASTRQWPPPTMDRIYEVSDTKWIATNATQFGWAELVGGGIPLAGDLASKLGSDHMSCRNQDGDHSTIVSMLLPKPAMDKFSSELSVWLNNKHDHKNLVILSSL

SEQ ID NO: 12134 - protein, 324 aa, Zea mays subsp. mays
  peptide (1)..(324): Ceres Seq. ID no. 12367073
MQVTRLKCGGFVIGFHMCHSIADGFGMVQFFRCVAELARGEKVPTLLPVWRRELLTRHRSNTTAYNHTATVRSESDSDDYKSDDVMLSTPMDDMVVQYFLFGPREIATLRSHLRGDDQLLLATSATSFELLAAVMWRCRTLALGYESHRRVRLMVTMNARGKWNQHTPIPRGYYGNAHVSPMAEATAGELCSQPLARTVDLVRRTKLSVTKERMESMVDTIASTRQWPPPTMDRIYEVSDTKWIATNATQFGWAELVGGGIPLAGDLASKLGSDHMSCRNQDGDHSTIVSMLLPKPAMDKFSSELSVWLNNKHDHKNLVILSSL

SEQ ID NO: 12135 - DNA, 1642 bp, Zea mays subsp. mays
  misc_feature (1)..(1642): Ceres Seq. ID no. 13498894
  misc_feature (1)..(1642): Ortholog of  Ceres SEQ ID NO 14314896 as cited in SEQ ID NO 54010
  misc_feature (1)..(1642): Ortholog of  Ceres SEQ ID NO 13655744 as cited in SEQ ID NO 64032
  misc_feature (1)..(1642): Ortholog of  Ceres SEQ ID NO 13590394 as cited in SEQ ID NO 66581
agacaccagacgcagtcggctgccgcagggctggtagtagccggcgcgccgtcaccgtatcctcagatcagcggcgagcagaaaccacaccactctactgacgcccgacgagccatgggtaaggagaagactcacatcaacattgtggtcattggccatgtcgactctggcaagtcgaccaccactggccacctgatctacaagcttggaggtattgacaagcgagtgattgagaggttcgagaaagaggctgccgagatgaacaagcggtcattcaagtatgcgtgggtgcttgacaagctcaaggctgagcgtgagagaggtattacaattgatattgccctgtggaagttcgagaccaccaagtactactgcactgttattgatgccccgggacaccgtgacttcatcaagaatatgatcactggcacttcccaagctgactgtgctgttcttatcattgactcaaccactggtggttttgaggctggtatctccaaggatggccagacccgtgagcatgctctccttgctttcacacttggtgtgaagcagatgatttgctgctgcaacaagatggatgctactacacccaagtattcaaaggcccgttatgatgagattgtgaaggaagtctcttcctacctgaagaaggttggatacaaccctgataagatccacttcgttccaatctctggttttgaaggtgacaacatgattgagaggtccaccaaccttgactggtacaagggcccaaccctacttgaggctctggacttgatcaatgagccaaagaggccttcagacaagcccctgcgtctcccccttcaggatgtgtacaagattggtggtattggaactgtccctgttggacgtgttgagactggtgtcattaagcctggtatggttgttacttttgggcctactggtcttactactgaggttaagtccgttgagatgcaccatgaggctctccaggaggcccttcccggtgacaatgttggcttcaacgtgaagaatgttgctgtgaaggatctgaagcgtgggtatgtggcctccaactccaaggatgaccctgccaaggaggctgctagcttcacctcccaggtcatcatcatgaaccaccctggccagattggcaatggctatgccccagttctggactgccacacctcacacattgctgtcaagtttgctgagctcgttaccaagattgataggcgatccggcaaggagctggagaaggagcccaaatttctcaagaacggtgatgctggtatggtgaagatggttcccactaagcccatggtggtggagaccttttctcagtatcctcctcttggtcgatttgctgtccgtgacatgaggcaaacggtggctgtcggagtcatcaagagtgtggagaagaaggacccaactggagccaaggtgacgaaggctgctgccaagaagaaatgatctatctggctggtgctgtgcttgcttgttggttacctcgtggaagcttaaaatatctcgtcttgttgacatccttgcagttgtcgcgtgaacaagtaatctatgatggcaatgtttgcctggtcatgaagtattattactttcgttgaaaccgtgatgctattaagacttaatttttttatgg

SEQ ID NO: 12136 - protein, 485 aa, Zea mays subsp. mays
  peptide (1)..(485): Ceres Seq. ID no. 13498895
RHQTQSAAAGLVVAGAPSPYPQISGEQKPHHSTDARRAMGKEKTHINIVVIGHVDSGKSTTTGHLIYKLGGIDKRVIERFEKEAAEMNKRSFKYAWVLDKLKAERERGITIDIALWKFETTKYYCTVIDAPGHRDFIKNMITGTSQADCAVLIIDSTTGGFEAGISKDGQTREHALLAFTLGVKQMICCCNKMDATTPKYSKARYDEIVKEVSSYLKKVGYNPDKIHFVPISGFEGDNMIERSTNLDWYKGPTLLEALDLINEPKRPSDKPLRLPLQDVYKIGGIGTVPVGRVETGVIKPGMVVTFGPTGLTTEVKSVEMHHEALQEALPGDNVGFNVKNVAVKDLKRGYVASNSKDDPAKEAASFTSQVIIMNHPGQIGNGYAPVLDCHTSHIAVKFAELVTKIDRRSGKELEKEPKFLKNGDAGMVKMVPTKPMVVETFSQYPPLGRFAVRDMRQTVAVGVIKSVEKKDPTGAKVTKAAAKKK

SEQ ID NO: 12137 - protein, 447 aa, Zea mays subsp. mays
  peptide (1)..(447): Ceres Seq. ID no. 13498896
MGKEKTHINIVVIGHVDSGKSTTTGHLIYKLGGIDKRVIERFEKEAAEMNKRSFKYAWVLDKLKAERERGITIDIALWKFETTKYYCTVIDAPGHRDFIKNMITGTSQADCAVLIIDSTTGGFEAGISKDGQTREHALLAFTLGVKQMICCCNKMDATTPKYSKARYDEIVKEVSSYLKKVGYNPDKIHFVPISGFEGDNMIERSTNLDWYKGPTLLEALDLINEPKRPSDKPLRLPLQDVYKIGGIGTVPVGRVETGVIKPGMVVTFGPTGLTTEVKSVEMHHEALQEALPGDNVGFNVKNVAVKDLKRGYVASNSKDDPAKEAASFTSQVIIMNHPGQIGNGYAPVLDCHTSHIAVKFAELVTKIDRRSGKELEKEPKFLKNGDAGMVKMVPTKPMVVETFSQYPPLGRFAVRDMRQTVAVGVIKSVEKKDPTGAKVTKAAAKKK

SEQ ID NO: 12138 - protein, 399 aa, Zea mays subsp. mays
  peptide (1)..(399): Ceres Seq. ID no. 13498897
MNKRSFKYAWVLDKLKAERERGITIDIALWKFETTKYYCTVIDAPGHRDFIKNMITGTSQADCAVLIIDSTTGGFEAGISKDGQTREHALLAFTLGVKQMICCCNKMDATTPKYSKARYDEIVKEVSSYLKKVGYNPDKIHFVPISGFEGDNMIERSTNLDWYKGPTLLEALDLINEPKRPSDKPLRLPLQDVYKIGGIGTVPVGRVETGVIKPGMVVTFGPTGLTTEVKSVEMHHEALQEALPGDNVGFNVKNVAVKDLKRGYVASNSKDDPAKEAASFTSQVIIMNHPGQIGNGYAPVLDCHTSHIAVKFAELVTKIDRRSGKELEKEPKFLKNGDAGMVKMVPTKPMVVETFSQYPPLGRFAVRDMRQTVAVGVIKSVEKKDPTGAKVTKAAAKKK

SEQ ID NO: 12139 - DNA, 883 bp, Zea mays subsp. mays
  misc_feature (1)..(883): Ceres Seq. ID no. 12348783
  misc_feature (1)..(883): Ortholog of  Ceres SEQ ID NO 12624653 as cited in SEQ ID NO 61262
  misc_feature (1)..(883): Ortholog of  Ceres SEQ ID NO 12579223 as cited in SEQ ID NO 0
  misc_feature (1)..(883): Ortholog of  Ceres SEQ ID NO 12635708 as cited in SEQ ID NO 0
ctctcgcccgtctcgatcccacaggatccgagagacctcacaagccgccacgccaggtccccatcccatcgcggcgcctgccccacccccgccctgctcccgcccggtagtagtagcagagcctcgccgccgctgccgagaatagatggggttcgtgtccttcgtcgggcgggtgctcttcgtcgccgctttcctcctctccgcctaccaggagtttaatgaatttggcgctgatggtgggccagcagctaaggcccttcagcccaagttcaatgtgtttgtaaaaaatatctctgcacatctgggagtagctgtcccgcacattgagttgaagcatgtgattgctgctacaattgctcttaagggacttggaagtctcctttttattttgaccagctccctcggtgcttatctcctgctgctgtacctcgctctgatcagtcctatcgttcacgacttctacaactacgacacggggaaggaagaattcgcgcggctgtttgcgaagttcacccaggacgtggcgctagttggagctctcctcgtcttcctgggcatgaagaactccaccccgaagcggcagggcaagaagaaggctcacaaggcgaagacgaactagtaagaggttgctcgctcggcctcaggcgggtgtcaggagacgaatagtggcccagtgcgaagcagtcgatgcgcatcgagctgtcggctgcgcttttacatgtatcggatattcagattccattttgcggggcgcggcccgaacgaaggtgtgactagtgggcggcgggttaggcgacacgacacggtcatgtatgtgattgcgattggttggttggtttcttgaactgggctgacggtggttaatcttttcgatttgattagc

SEQ ID NO: 12140 - protein, 157 aa, Zea mays subsp. mays
  peptide (1)..(157): Ceres Seq. ID no. 12348784
MGFVSFVGRVLFVAAFLLSAYQEFNEFGADGGPAAKALQPKFNVFVKNISAHLGVAVPHIELKHVIAATIALKGLGSLLFILTSSLGAYLLLLYLALISPIVHDFYNYDTGKEEFARLFAKFTQDVALVGALLVFLGMKNSTPKRQGKKKAHKAKTN

SEQ ID NO: 12141 - DNA, 1334 bp, Zea mays subsp. mays
  misc_feature (1)..(1334): Ceres Seq. ID no. 12374355
  misc_feature (1)..(1334): Ortholog of  Ceres SEQ ID NO 14302705 as cited in SEQ ID NO 56264
acgactctcttctctgagaaaacccaacaaaaaccctcgctcgcctcacttgttcgctcacctcggtgcggcgcgtcgttcggacacggagatacagcggcgattccggcgatggagtacgtgaaccccctcaccggcttccgcgtcgacggccgccgccccaacgagatgcggcaactcaagggcgaggtcggcgtcgttgtgcgcgcagacgggtcggcgctgtttgagatgggcaacaccagagtcatcgccgccgtctacggcccgcgagaggttcagaacaaaggtcagcaagtaaacagcaaggaggctttggttcgttgtgagtacaggatggcagagtttagtacaggagatcggaggagaaaaccgaagggtgacaggcgatcaacagaaatttctcttgttattcgacagacaatggaggcaagcatattaacacatttaatgccacactcacagattgatatatatgtccaagttcttcaagctgatggtggaacaaggtcagcttgcataaatgctgcaacactagctcttgcagatgctgggattccaatgcgagacattgccacatcatgtagtgctggttatctgtgttctactcctttgctcgatctgaattacctcgaagacagtgctgggggttccgatgtcactgttggcattcttgcaaagatggacaaagtgactttgcttcagatggatgcaaaattaccaattgatacatttgaaaatgtaatgggacttgcaatagaagggtgcaaagcaattgcaacttacatccgagaggtgctattggagaatacaaagaagcttgagtgtcagcgtggttaaccttaggagtgcaggcaggttgatgacctgaacctacccaacaccggacatcacacagccattaagggcttgttcggttagctcttaatccatgtggattgagtgggattggatgagtttgaatcccaaacaattcaaacttcttaagaattttttccaatcccatccaatccatgtgtattgggaataaccaaacaaggcctaaaaggtttactggttgtggttgtgggtggctggctctggtgcagttcacaggaacttccaacggagttgtgggtggctggcttctgttcaaggcatcttgtcatcatcaccagggatacaagacatgcttcctcagtaaggtgttatcggaatttttcagttcctgtaaactgatataaatcgatggtggcactgtactgataatcttccgtatggtgttattggaatttgtgtgacagttcctgtaaactaatgcaaagagagagatccagcggggctcctgcctcctg

SEQ ID NO: 12142 - protein, 279 aa, Zea mays subsp. mays
  peptide (1)..(279): Ceres Seq. ID no. 12374356
TTLFSEKTQQKPSLASLVRSPRCGASFGHGDTAAIPAMEYVNPLTGFRVDGRRPNEMRQLKGEVGVVVRADGSALFEMGNTRVIAAVYGPREVQNKGQQVNSKEALVRCEYRMAEFSTGDRRRKPKGDRRSTEISLVIRQTMEASILTHLMPHSQIDIYVQVLQADGGTRSACINAATLALADAGIPMRDIATSCSAGYLCSTPLLDLNYLEDSAGGSDVTVGILAKMDKVTLLQMDAKLPIDTFENVMGLAIEGCKAIATYIREVLLENTKKLECQRG

SEQ ID NO: 12143 - protein, 242 aa, Zea mays subsp. mays
  peptide (1)..(242): Ceres Seq. ID no. 12374357
MEYVNPLTGFRVDGRRPNEMRQLKGEVGVVVRADGSALFEMGNTRVIAAVYGPREVQNKGQQVNSKEALVRCEYRMAEFSTGDRRRKPKGDRRSTEISLVIRQTMEASILTHLMPHSQIDIYVQVLQADGGTRSACINAATLALADAGIPMRDIATSCSAGYLCSTPLLDLNYLEDSAGGSDVTVGILAKMDKVTLLQMDAKLPIDTFENVMGLAIEGCKAIATYIREVLLENTKKLECQRG

SEQ ID NO: 12144 - protein, 223 aa, Zea mays subsp. mays
  peptide (1)..(223): Ceres Seq. ID no. 12374358
MRQLKGEVGVVVRADGSALFEMGNTRVIAAVYGPREVQNKGQQVNSKEALVRCEYRMAEFSTGDRRRKPKGDRRSTEISLVIRQTMEASILTHLMPHSQIDIYVQVLQADGGTRSACINAATLALADAGIPMRDIATSCSAGYLCSTPLLDLNYLEDSAGGSDVTVGILAKMDKVTLLQMDAKLPIDTFENVMGLAIEGCKAIATYIREVLLENTKKLECQRG

SEQ ID NO: 12145 - DNA, 1758 bp, Zea mays subsp. mays
  misc_feature (1)..(1758): Ceres Seq. ID no. 12406812
  misc_feature (1)..(1758): Ortholog of  Ceres SEQ ID NO 13659759 as cited in SEQ ID NO 67663
aagtagtacgagtaaccaacaatccaatggacgcggcgaaatattggcacccggcagcacacccccaccaatcccgtgtccccacgatccagatcagaaacgcaaaggacaatcgacacggacgcgacgcgaaggcgacgcaccagcaccacctaaaattctaaaaaggcaggggccgtttctccgaccaccgcccgacgaatcagcgcgtccgctacaactccggcgacccccgccggcggcgaccccccagggcagcgatccacgcaggcgaacaacgatgggcggccgcaagatcgcgctgctggtgggcatcaactacccgggcaccaaggccgagctcaagggctgctacaacgacgtcgaccgcatgcgccgctgcctcgtcgaccgcttcggcttccgacgaggccgacatccgagtcctcagcgacgccgaccgatccgcgccgcagcccacgggggctaacatccgccgcgccctcgcccgcctcgtcggggatgcccgccccggggacttcctcttcttccactacagcggccacggcacgcgcctgccagccgagacggggcagcacgacgacaccggctacgacgagtgcatcgtgccctgcgacatgaacctcatcacagatcaggatttcagggaactcgtgcagaaggtccctgaaggttgcctattcaccatcgtctctgactcatgccatagtggtggcctgctggacagtgctaaggagcagataggtaatagcaccaagcagaataagacccagtcccgtgaacctgatgagcctcgtcattctggttctggcagcggcttccggtcatttctcaaagagactgtccgcgatgtgttcgagtctgaggggattcacatccctcatagtcgtcgccatggggatgatgaccaggacgacggttacgcacagccaactggaaatggccgcaccaaaaaccgctccctgccactctcgaccctgatagagatgctcaaggaacaaactggaaaggatgacattgatgtgggttctatccggatgacgctgttcaacatctttggtgatgatgccagcccaaagattaagaagttcatgaaggtcatgctcggaaagttccaccagggccagtcaggtgagcaaggcagtggtggtggtggtgtctttggcatggttggtgcccttgctcaggagttcttgaaggctaagcttgaagggaaggaggaagaggctttcaaacctgcattagagcaagaggttcacagtgttgacgaggtgtacgccgggagtaaggcctgggcaccaaacaatggcattctgatcagtgggtgccagactaaccaaacatcagcggatgcaactacaccgcagggtgtctcctttggtgctctgagcaatgctatccaaaccattcttgcagacaagcacgggaaggtgacgaataaggatctcgtgatgaaagcacgtgagctgctgtctaagcaagggtacactcaacagcctggactatactgcagcgatgagcatgttcatgtcgctttcatatgctaaaacttggattgttacagcgattgctttcctccatccttttgtgttgatcggtgcaccagaggttgaagtttttcttcccatgtatgttacagttatattgtatcagtgtttgttgcttgaggatatgtttcaatggactatgtcaatattgaaataactttgagaaatgtttctatatatgaataatatacacacttgtatcgtgatctgt

SEQ ID NO: 12146 - protein, 309 aa, Zea mays subsp. mays
  peptide (1)..(309): Ceres Seq. ID no. 12406813
MNLITDQDFRELVQKVPEGCLFTIVSDSCHSGGLLDSAKEQIGNSTKQNKTQSREPDEPRHSGSGSGFRSFLKETVRDVFESEGIHIPHSRRHGDDDQDDGYAQPTGNGRTKNRSLPLSTLIEMLKEQTGKDDIDVGSIRMTLFNIFGDDASPKIKKFMKVMLGKFHQGQSGEQGSGGGGVFGMVGALAQEFLKAKLEGKEEEAFKPALEQEVHSVDEVYAGSKAWAPNNGILISGCQTNQTSADATTPQGVSFGALSNAIQTILADKHGKVTNKDLVMKARELLSKQGYTQQPGLYCSDEHVHVAFIC

SEQ ID NO: 12147 - protein, 186 aa, Zea mays subsp. mays
  peptide (1)..(186): Ceres Seq. ID no. 12406814
MLKEQTGKDDIDVGSIRMTLFNIFGDDASPKIKKFMKVMLGKFHQGQSGEQGSGGGGVFGMVGALAQEFLKAKLEGKEEEAFKPALEQEVHSVDEVYAGSKAWAPNNGILISGCQTNQTSADATTPQGVSFGALSNAIQTILADKHGKVTNKDLVMKARELLSKQGYTQQPGLYCSDEHVHVAFIC

SEQ ID NO: 12148 - protein, 169 aa, Zea mays subsp. mays
  peptide (1)..(169): Ceres Seq. ID no. 12406815
MTLFNIFGDDASPKIKKFMKVMLGKFHQGQSGEQGSGGGGVFGMVGALAQEFLKAKLEGKEEEAFKPALEQEVHSVDEVYAGSKAWAPNNGILISGCQTNQTSADATTPQGVSFGALSNAIQTILADKHGKVTNKDLVMKARELLSKQGYTQQPGLYCSDEHVHVAFIC

SEQ ID NO: 12149 - DNA, 1093 bp, Zea mays subsp. mays
  misc_feature (1)..(1093): Ceres Seq. ID no. 12381286
  misc_feature (1)..(1093): Ortholog of  Ceres SEQ ID NO 15172862 as cited in SEQ ID NO 51943
  misc_feature (1)..(1093): Ortholog of  Ceres SEQ ID NO 12784852 as cited in SEQ ID NO 61543
gccgcctcctccccactgcctcgtgtggccgtcgtctcccgttcggaacgcccccccccctccggcgaaatggcccccaagcgaggtggcagggcgccggtgccggccaagaagaagacggataaagtgacgaaccctctattcgagaagaggccgaagcagttcggcatcggcggcgcgttgccgcccaagaaggacctgcaccggttcgtcaagtggcccaaggtcgtgcgtatccagcggcagcgccgcatcctcaagcagcgcctcaaggtaccaccggcgctcaaccagttcacccgcaccctcgacaagaacctcgctacgaacctgtttaagatgcttctcaagtaccggcctgaagacaaggctgccaagaaggagaggcttctgaagagggcccaagctgagaatgaaggaaaaactgttgagtcgaagaaaccaattgttgtgaagtatggccttaaccatgtgacttacctcattgagcagaacaaggctcagcttgttgtcatcgctcacgacgtggatccgatcgaacttgttgtgtggcttccagccctgtgcaggaagatggaggtcccttactgcattgttaaaggaaaggctcgccttggatcgattgttcacaagaagaatgcatcagtcttgtgtctgaccactgtcaagaacgaggataagcttgagttcagcaagatcttggaggctattaaggcaaacttcaacgacaagttcgatgaggtcaggaagaagtggggaggtggcatcatgggatccaagtcgcaggccaagaccaaggcccgggaaaagttgctcgccaaggaggctgcgcagcggatgacctagattgtctattgtctactgctgtgtctgccctgtagtttgacggggaagaactgatgaactcgtattgtggtttttctgaatctagtttcatatgtttctgtccaccagaccatgtttagaagctttgcaagacagagttaccatgtttagaagctttgcaagacagagttacagtgtttatgtgatacctcagatccatgcagctttgcttctatttgcctaagagcaaccccaaaagtatttcatg

SEQ ID NO: 12150 - protein, 281 aa, Zea mays subsp. mays
  peptide (1)..(281): Ceres Seq. ID no. 12381287
AASSPLPRVAVVSRSERPPPSGEMAPKRGGRAPVPAKKKTDKVTNPLFEKRPKQFGIGGALPPKKDLHRFVKWPKVVRIQRQRRILKQRLKVPPALNQFTRTLDKNLATNLFKMLLKYRPEDKAAKKERLLKRAQAENEGKTVESKKPIVVKYGLNHVTYLIEQNKAQLVVIAHDVDPIELVVWLPALCRKMEVPYCIVKGKARLGSIVHKKNASVLCLTTVKNEDKLEFSKILEAIKANFNDKFDEVRKKWGGGIMGSKSQAKTKAREKLLAKEAAQRMT

SEQ ID NO: 12151 - protein, 258 aa, Zea mays subsp. mays
  peptide (1)..(258): Ceres Seq. ID no. 12381288
MAPKRGGRAPVPAKKKTDKVTNPLFEKRPKQFGIGGALPPKKDLHRFVKWPKVVRIQRQRRILKQRLKVPPALNQFTRTLDKNLATNLFKMLLKYRPEDKAAKKERLLKRAQAENEGKTVESKKPIVVKYGLNHVTYLIEQNKAQLVVIAHDVDPIELVVWLPALCRKMEVPYCIVKGKARLGSIVHKKNASVLCLTTVKNEDKLEFSKILEAIKANFNDKFDEVRKKWGGGIMGSKSQAKTKAREKLLAKEAAQRMT

SEQ ID NO: 12152 - protein, 168 aa, Zea mays subsp. mays
  peptide (1)..(168): Ceres Seq. ID no. 12381289
MLLKYRPEDKAAKKERLLKRAQAENEGKTVESKKPIVVKYGLNHVTYLIEQNKAQLVVIAHDVDPIELVVWLPALCRKMEVPYCIVKGKARLGSIVHKKNASVLCLTTVKNEDKLEFSKILEAIKANFNDKFDEVRKKWGGGIMGSKSQAKTKAREKLLAKEAAQRMT

SEQ ID NO: 12153 - DNA, 842 bp, Zea mays subsp. mays
  misc_feature (1)..(842): Ceres Seq. ID no. 12413106
  misc_feature (1)..(842): Ortholog of  Ceres SEQ ID NO 15179609 as cited in SEQ ID NO 0
aaaacccaatccatccaaacccatttccctcgctcccatcccgtcccgccccttgtctcttccgcttccccccgaccccgcgcgccgcggaccagcagccatgtcgtgctcccacctctccaccgcctggtcctcctcggcgctcgccagcagcgcctccaccacccgacggcgctcccccccgcgctcgggtctcctggtgcggtgttccctccgtgagctccgcacccgcatcgactccgtcaggaacacgcagaagatcacggaggccatgaagctggtggccgccgccaaggtccggcgcgcgcaggaggccgtcgtctcctctcgccctttctcggaggcgctggtggaggtgctctacaacatgaaccaggagatccagacggaggacatcgacctgcccctcacccgcacccgccccgtcaagaaggtggccctcgtggtcctgaccggcgagcgcggcctctgcgggagcttcaacaacaacgtgctcaagaaggcggaaacccgcatcgatgagctcaagcagctgggcctccagtacaccgtcgtcagcgtggggaagaagggcaacgcctacttccagcgccgcccctacatcccgttggagcgcgatctagaggactgccactggctcaacatcgctgcccggcctgatggcctcatgtgtggcaagcacgcctagttatagtatctgtgggagaaacgggactcacgtatatatgtgtgctgtgtatatagtgcggtgatgccatcttgtttgcttgcatatgcatactactgaacatatgatgatgaataaggtcatgccaactttagggcaaaaaataaacatactt

SEQ ID NO: 12154 - protein, 228 aa, Zea mays subsp. mays
  peptide (1)..(228): Ceres Seq. ID no. 12413107
KPNPSKPISLAPIPSRPLSLPLPPDPARRGPAAMSCSHLSTAWSSSALASSASTTRRRSPPRSGLLVRCSLRELRTRIDSVRNTQKITEAMKLVAAAKVRRAQEAVVSSRPFSEALVEVLYNMNQEIQTEDIDLPLTRTRPVKKVALVVLTGERGLCGSFNNNVLKKAETRIDELKQLGLQYTVVSVGKKGNAYFQRRPYIPLERDLEDCHWLNIAARPDGLMCGKHA

SEQ ID NO: 12155 - protein, 195 aa, Zea mays subsp. mays
  peptide (1)..(195): Ceres Seq. ID no. 12413108
MSCSHLSTAWSSSALASSASTTRRRSPPRSGLLVRCSLRELRTRIDSVRNTQKITEAMKLVAAAKVRRAQEAVVSSRPFSEALVEVLYNMNQEIQTEDIDLPLTRTRPVKKVALVVLTGERGLCGSFNNNVLKKAETRIDELKQLGLQYTVVSVGKKGNAYFQRRPYIPLERDLEDCHWLNIAARPDGLMCGKHA

SEQ ID NO: 12156 - protein, 138 aa, Zea mays subsp. mays
  peptide (1)..(138): Ceres Seq. ID no. 12413109
MKLVAAAKVRRAQEAVVSSRPFSEALVEVLYNMNQEIQTEDIDLPLTRTRPVKKVALVVLTGERGLCGSFNNNVLKKAETRIDELKQLGLQYTVVSVGKKGNAYFQRRPYIPLERDLEDCHWLNIAARPDGLMCGKHA

SEQ ID NO: 12157 - DNA, 773 bp, Zea mays subsp. mays
  misc_feature (1)..(773): Ceres Seq. ID no. 13492259
  misc_feature (1)..(773): Ortholog of  Ceres SEQ ID NO 13654583 as cited in SEQ ID NO 68599
aagtcagtctcactcaagtaaagtggacgccaagtcagtcacactcacaccaccgtagcacacaccagtacaccacacactcgcctttccgatcccatccctctccagccaccttcctccgctcgccgtgcttctgcttcctccgccaccaccgccggcatggctgcgcgctgcccctacttcgccgtcgaggagtcctcccgcggcatccgctcgggggagtccccggccgcggcgctccgccggatcctcgcgacgcctggtgcgcaccaggcgccctgctgctacgacgcgctcggcgcgcgcctcgtcgagcgcgcggggtttccgatcgggttcatgggcggtttctgtgtttctgccgcgcgacttggcttgcctgatgttggcctcatttcctatggagaaatggtagatcaagggcgtctcatcaatgaagctgtttcaatcccagtgattggtgatggagacaatggttacggaaactctatgaatatcaagagaaccataaaaggatatatcaatgctggttttgctggaattatgcttgaggatcaggtggcacctaaagcatgtggacatactgaaggaaggaaagtcatatcaagggaggaagctgtcatgcacataaaagctgctgtagatgctaggaaagagagtggtagtagggggcacgagtaaggaggggtttatacaatgatctaatctagtgtgttaagtctgggtgcaatttatttggtggatttagtggagcttgagtgagatgatttggt

SEQ ID NO: 12158 - protein, 173 aa, Zea mays subsp. mays
  peptide (1)..(173): Ceres Seq. ID no. 13492260
MAARCPYFAVEESSRGIRSGESPAAALRRILATPGAHQAPCCYDALGARLVERAGFPIGFMGGFCVSAARLGLPDVGLISYGEMVDQGRLINEAVSIPVIGDGDNGYGNSMNIKRTIKGYINAGFAGIMLEDQVAPKACGHTEGRKVISREEAVMHIKAAVDARKESGSRGHE

SEQ ID NO: 12159 - protein, 126 aa, Zea mays subsp. mays
  peptide (1)..(126): Ceres Seq. ID no. 13492261
VSLTQVKWTPSQSHSHHRSTHQYTTHSPFRSHPSPATFLRSPCFCFLRHHRRHGCALPLLRRRGVLPRHPLGGVPGRGAPPDPRDAWCAPGALLLRRARRAPRRARGVSDRVHGRFLCFCRATWLA

SEQ ID NO: 12160 - protein, 113 aa, Zea mays subsp. mays
  peptide (1)..(113): Ceres Seq. ID no. 13492262
MGGFCVSAARLGLPDVGLISYGEMVDQGRLINEAVSIPVIGDGDNGYGNSMNIKRTIKGYINAGFAGIMLEDQVAPKACGHTEGRKVISREEAVMHIKAAVDARKESGSRGHE

SEQ ID NO: 12161 - DNA, 1619 bp, Zea mays subsp. mays
  misc_feature (1)..(1619): Ceres Seq. ID no. 12414375
  misc_feature (1)..(1619): Ortholog of  Ceres SEQ ID NO 13596013 as cited in SEQ ID NO 61990
gggtcgacaacaatttgccgggcacacccaagacccgcggaagcccacgacgacaagcctccatcgcctcttgttgtttgcgggccccatacgtcagagaccacaagcccgaggcttaactctccctgccgctaatccctcgcgccgccggagggaagcaagagatagatctgtccgcggccatggcggcggcggcggcggcggcggagcaaggcgtggacgccgcgaggaaagaggaggaggaggagcaggtagtgaatccgtgggaggtgtcggcggggaagggcggcatcgactacgacaagctcgtggaccagttcggctgccagcgcatcgacgacgcgctcgtggaccgcatcgcacgcctcaccgcccgaccaccgcactgcttcctccgccgaggcctcttcttcgcccaccgtgatttgaacgagatactggatttgtatgagaacgggcagaagttctacctctacacggggagggggccctcgtcggaggccctgcacctcggccacctcatccccttcatgttcacaaaatacttgcaggaggcttttaaggtgcccctagttatacaactgactgacgatgagaagtacttgtggaaaaacttgactattcaggaaagtaaaaggcttgcccgtgaaaatgctaaagatattatagcatgtggttttgacattgaaagaacattcattttctctgatttttcttttgttggaggtgctttttatgaaaacatgatgcaagttgccagatgtgtaactatgaataaggctattggaatatttgggttcaatcttgaggatcacataagaaaggttagctttcctccagtgcaggcagtcccatcattcccttcttcatttccccatctcttcgctggcaaggaccaactgcggtgtcttatcccatgtgcaatagatcaggatccatattttaggatgactcgtgatgttgctcctagaattggttatcagaaaccatcactgattgaatctagattttttcctgctcttcagggggagaacacaaaaatgtcagctagtgacgcaaattcggcgatatacgtgacagatagtgctaaagaaataaagacaaaggtgaataaatatgccttctcaggtggccaggactcaatagagttccatagaaaacttggcgctaaccttgatgtggatgtcccaatcaaatacctgaacttcttccttgaagatgatgacgagcttgcgcacataaaaaaggagtacaaggagggaaggatgttgactggtgaagtgaagcaacggcttattgcagttctatctgagattgttgctagacaccagagagctagagctcaagtgaccgaagagatggtcgatgcattcatggcagtgaggcctcttcccaatatgtttggctgagcatcacggcgacaacttgaacaaacatttttgttatcagggagaattttaagagtctttagaattgtcgtgccaccataagtatcccctgtgttttacttcttcgggatttaggcaaacctggccaaacatcccatgtggtggctgtggttgattttgtaaactcatacttgatatggtatcaatgattcaattcagacattttttttc

SEQ ID NO: 12162 - protein, 408 aa, Zea mays subsp. mays
  peptide (1)..(408): Ceres Seq. ID no. 12414376
MAAAAAAAEQGVDAARKEEEEEQVVNPWEVSAGKGGIDYDKLVDQFGCQRIDDALVDRIARLTARPPHCFLRRGLFFAHRDLNEILDLYENGQKFYLYTGRGPSSEALHLGHLIPFMFTKYLQEAFKVPLVIQLTDDEKYLWKNLTIQESKRLARENAKDIIACGFDIERTFIFSDFSFVGGAFYENMMQVARCVTMNKAIGIFGFNLEDHIRKVSFPPVQAVPSFPSSFPHLFAGKDQLRCLIPCAIDQDPYFRMTRDVAPRIGYQKPSLIESRFFPALQGENTKMSASDANSAIYVTDSAKEIKTKVNKYAFSGGQDSIEFHRKLGANLDVDVPIKYLNFFLEDDDELAHIKKEYKEGRMLTGEVKQRLIAVLSEIVARHQRARAQVTEEMVDAFMAVRPLPNMFG

SEQ ID NO: 12163 - protein, 292 aa, Zea mays subsp. mays
  peptide (1)..(292): Ceres Seq. ID no. 12414377
MFTKYLQEAFKVPLVIQLTDDEKYLWKNLTIQESKRLARENAKDIIACGFDIERTFIFSDFSFVGGAFYENMMQVARCVTMNKAIGIFGFNLEDHIRKVSFPPVQAVPSFPSSFPHLFAGKDQLRCLIPCAIDQDPYFRMTRDVAPRIGYQKPSLIESRFFPALQGENTKMSASDANSAIYVTDSAKEIKTKVNKYAFSGGQDSIEFHRKLGANLDVDVPIKYLNFFLEDDDELAHIKKEYKEGRMLTGEVKQRLIAVLSEIVARHQRARAQVTEEMVDAFMAVRPLPNMFG

SEQ ID NO: 12164 - protein, 221 aa, Zea mays subsp. mays
  peptide (1)..(221): Ceres Seq. ID no. 12414378
MMQVARCVTMNKAIGIFGFNLEDHIRKVSFPPVQAVPSFPSSFPHLFAGKDQLRCLIPCAIDQDPYFRMTRDVAPRIGYQKPSLIESRFFPALQGENTKMSASDANSAIYVTDSAKEIKTKVNKYAFSGGQDSIEFHRKLGANLDVDVPIKYLNFFLEDDDELAHIKKEYKEGRMLTGEVKQRLIAVLSEIVARHQRARAQVTEEMVDAFMAVRPLPNMFG

SEQ ID NO: 12165 - DNA, 1254 bp, Zea mays subsp. mays
  misc_feature (1)..(1254): Ceres Seq. ID no. 12411619
  misc_feature (1)..(1254): Ortholog of  Ceres SEQ ID NO 14303263 as cited in SEQ ID NO 1224
  misc_feature (1)..(1254): Ortholog of  Ceres SEQ ID NO 13593955 as cited in SEQ ID NO 54278
  misc_feature (1)..(1254): Ortholog of  Ceres SEQ ID NO 14314092 as cited in SEQ ID NO 62788
  misc_feature (1)..(1254): Ortholog of  Ceres SEQ ID NO 13597380 as cited in SEQ ID NO 64054
  misc_feature (1)..(1254): Ortholog of  Ceres SEQ ID NO 12625474 as cited in SEQ ID NO 64169
  misc_feature (1)..(1254): Ortholog of  Ceres SEQ ID NO 13597502 as cited in SEQ ID NO 64681
atggaaccgtacctccagtggttagggatacagctcatggagctcggcggtaccgcaatgtcgctgctgctgctgctcgtgctcgccgcgtcgccattgcagcaggccagggcggttggcggcggcaggccgcgggtgccggccatcctggtgttcggcgactccatcgtggacacgggcaacaacaacgccgtcctcacgctcaccaagtccaacttcaggccatacggcaaggacctcaacggcggcgtacccaccggacgcttctccaacggccggattccgacggacttcgtagcttcacggctcggcttgaaagatctggttccggcgtatctcggcaccgacctcagcgacgacgacctctgcacgggcgtcagcttcgcgtctgggggcaccggctacgacccgctcacctccactctcgtggaggagctcaacatgttcgcggagtacaaggagaggctcgcaggggtcgtcggagacgaggccgccgccgcaggaatcgtggccgaaagcctgttccttgtctgcgccgggtcggacgacatcgccaacaactactacctcgcccccgtcagacctctgcagtacgacatctcggcgtacgtggatttccttgtggagcaggcctgcgacttcattaggcaactgtaccagcaaggggccaggaggatcgcggtcctggggatgccgccggtcgggtgcgtgccctcgcagcggaccctcgccggcggcctagccagggactgcgaccccgctcgcaaccacgcggcgcagctgtacaactccaggctgaaggaggaggtagtgctgctccagaaggagctggcgtgccagagaatcggctacgtggatatctacgacgtcctgcaggacatgatcacgaacccctgcaaatacggcttcgaggtctccacgagaggatgctgcggcaccggggacttggaggtgtcgctcctgtgcaaccagctgacggcgccgacgtgccctgacgaccggaaatacgtcttctgggacagcttccatcccaccgagaaagcatacgagatcatcgtggactacctgttcccgagatacatagagaacctgctataattacttctgctttaccgtcgcttctttaattcgatcgtttctagttgttgtcaagtttagacatgccgtctttgtttcccaatttaagcttttgctttaaaactcaagacttttcaaggaaatgaaatgacacctgctagcttgttgcaagctgtt

SEQ ID NO: 12166 - protein, 365 aa, Zea mays subsp. mays
  peptide (1)..(365): Ceres Seq. ID no. 12411620
MEPYLQWLGIQLMELGGTAMSLLLLLVLAASPLQQARAVGGGRPRVPAILVFGDSIVDTGNNNAVLTLTKSNFRPYGKDLNGGVPTGRFSNGRIPTDFVASRLGLKDLVPAYLGTDLSDDDLCTGVSFASGGTGYDPLTSTLVEELNMFAEYKERLAGVVGDEAAAAGIVAESLFLVCAGSDDIANNYYLAPVRPLQYDISAYVDFLVEQACDFIRQLYQQGARRIAVLGMPPVGCVPSQRTLAGGLARDCDPARNHAAQLYNSRLKEEVVLLQKELACQRIGYVDIYDVLQDMITNPCKYGFEVSTRGCCGTGDLEVSLLCNQLTAPTCPDDRKYVFWDSFHPTEKAYEIIVDYLFPRYIENLL

SEQ ID NO: 12167 - protein, 353 aa, Zea mays subsp. mays
  peptide (1)..(353): Ceres Seq. ID no. 12411621
MELGGTAMSLLLLLVLAASPLQQARAVGGGRPRVPAILVFGDSIVDTGNNNAVLTLTKSNFRPYGKDLNGGVPTGRFSNGRIPTDFVASRLGLKDLVPAYLGTDLSDDDLCTGVSFASGGTGYDPLTSTLVEELNMFAEYKERLAGVVGDEAAAAGIVAESLFLVCAGSDDIANNYYLAPVRPLQYDISAYVDFLVEQACDFIRQLYQQGARRIAVLGMPPVGCVPSQRTLAGGLARDCDPARNHAAQLYNSRLKEEVVLLQKELACQRIGYVDIYDVLQDMITNPCKYGFEVSTRGCCGTGDLEVSLLCNQLTAPTCPDDRKYVFWDSFHPTEKAYEIIVDYLFPRYIENLL

SEQ ID NO: 12168 - protein, 346 aa, Zea mays subsp. mays
  peptide (1)..(346): Ceres Seq. ID no. 12411622
MSLLLLLVLAASPLQQARAVGGGRPRVPAILVFGDSIVDTGNNNAVLTLTKSNFRPYGKDLNGGVPTGRFSNGRIPTDFVASRLGLKDLVPAYLGTDLSDDDLCTGVSFASGGTGYDPLTSTLVEELNMFAEYKERLAGVVGDEAAAAGIVAESLFLVCAGSDDIANNYYLAPVRPLQYDISAYVDFLVEQACDFIRQLYQQGARRIAVLGMPPVGCVPSQRTLAGGLARDCDPARNHAAQLYNSRLKEEVVLLQKELACQRIGYVDIYDVLQDMITNPCKYGFEVSTRGCCGTGDLEVSLLCNQLTAPTCPDDRKYVFWDSFHPTEKAYEIIVDYLFPRYIENLL

SEQ ID NO: 12169 - DNA, 958 bp, Zea mays subsp. mays; identical to SEQ ID NO: 4183
  misc_feature (1)..(958): Ceres Seq. ID no. 13571162
  misc_feature (1)..(958): Ortholog of  Ceres SEQ ID NO 15179952 as cited in SEQ ID NO 1063

SEQ ID NO: 12170 - protein, 231 aa, Zea mays subsp. mays; identical to SEQ ID NO: 4184
  peptide (1)..(231): Ceres Seq. ID no. 13571163

SEQ ID NO: 12171 - protein, 211 aa, Zea mays subsp. mays; identical to SEQ ID NO: 4185
  peptide (1)..(211): Ceres Seq. ID no. 13571164

SEQ ID NO: 12172 - protein, 195 aa, Zea mays subsp. mays; identical to SEQ ID NO: 4186
  peptide (1)..(195): Ceres Seq. ID no. 13571165

SEQ ID NO: 12173 - DNA, 1617 bp, Zea mays subsp. mays
  misc_feature (1)..(1617): Ceres Seq. ID no. 12411615
  misc_feature (1)..(1617): Ortholog of  Ceres SEQ ID NO 14310896 as cited in SEQ ID NO 53480
  misc_feature (1)..(1617): Ortholog of  Ceres SEQ ID NO 13660685 as cited in SEQ ID NO 67678
aaccggacaaatcaccccgtcgtctcgtcccgtagtcactcgcagagtcgcagtcgcagcccctgcgcccaccgggatcgtgatggagagctgggtccgcgcggtgggtggaggccatccactcctctcgctcccagacagtcatctacctcgccgggcggtgcatcccaggcgctcggttggctcctctccgtgcccggcgcttcgggcaccgtcctcgaggtcgtcgtgccatactctagggcctccatggcgcagctccttggcaagatgcccctgcaattcactagcaagcaggctgcagaggacatggcactggccgcatacaatcgagcactcaagctttctggaccaggtctgcaagttatgggtgttggatttactgggtcactggcgagctcacgtccaaaacatggtgaccacaggttttacgtgtcaacatggacacataattgtctcaggacatcacatgttaccttgtcgaagggtttacggagtagggaggaagaagacaaggtttcaagctactttttgcttaaggcaatagcagatacctgcagagtttctgcaaccattcagtcagacattcacaaatctgaaattccagaagaaatcatggaacaatttgatgaagatcaagaactccagcaagttattaatgggcaagtttgcatgaaagtatataattttgctgctccggcggaaagtaacttgaacagaaaaataattctgcctggttcgttcaaccccttgcacgatggtcaccttagattgctagaagctgcagtaagcatgtgtgatgatgggcttccattctttgagatatcagcaattaatgctgataaacctccactatctattgcagaaattaagaggcgtgttgagcaatttagaaaagcagggaagaatgtgattatatctaaccagccatacttctataagaaagcagaacttttcccaggaagcgcttttataattggtgcagacactgcagcaaggcttgttaatcctaagtactatggaggagattacaacagaatgctggagatacttctcgaatgtaagagcatagggactacttttcttgttggtggtcgaaagattgaaggagatttcaaggtccttgagaacttagacattccagaagagctgagagaaatgttcatttctattccggaggaaaagtttcgcatagatatttcatctactgaaataagaaagagccaagggctctgatgtatcaagtggtcgtattctacagcagatttgggatgattctccacgactatagaagattatgataggtccattcatgcatccttgcaaaggaactgttgatgtattctcagggagaatattttatttaacttttgtcttgactgggccccttggtattttgttcagcaaattggaatcaatcctcttgtagaacctcttgatgtcttcactaccccttgcggctaggtggtcaacctctgtctcatatctttggtacaacgctggcaaagtgtgggcgcagagaaatcctgtggatggaatataagaattgttaaatgtatgtcacaactgctttatatattgtcttgccttgttataaaagtcacatttttctgcgct

SEQ ID NO: 12174 - protein, 411 aa, Zea mays subsp. mays
  peptide (1)..(411): Ceres Seq. ID no. 12411616
NRTNHPVVSSRSHSQSRSRSPCAHRDRDGELGPRGGWRPSTPLAPRQSSTSPGGASQALGWLLSVPGASGTVLEVVVPYSRASMAQLLGKMPLQFTSKQAAEDMALAAYNRALKLSGPGLQVMGVGFTGSLASSRPKHGDHRFYVSTWTHNCLRTSHVTLSKGLRSREEEDKVSSYFLLKAIADTCRVSATIQSDIHKSEIPEEIMEQFDEDQELQQVINGQVCMKVYNFAAPAESNLNRKIILPGSFNPLHDGHLRLLEAAVSMCDDGLPFFEISAINADKPPLSIAEIKRRVEQFRKAGKNVIISNQPYFYKKAELFPGSAFIIGADTAARLVNPKYYGGDYNRMLEILLECKSIGTTFLVGGRKIEGDFKVLENLDIPEELREMFISIPEEKFRIDISSTEIRKSQGL

SEQ ID NO: 12175 - protein, 328 aa, Zea mays subsp. mays
  peptide (1)..(328): Ceres Seq. ID no. 12411617
MAQLLGKMPLQFTSKQAAEDMALAAYNRALKLSGPGLQVMGVGFTGSLASSRPKHGDHRFYVSTWTHNCLRTSHVTLSKGLRSREEEDKVSSYFLLKAIADTCRVSATIQSDIHKSEIPEEIMEQFDEDQELQQVINGQVCMKVYNFAAPAESNLNRKIILPGSFNPLHDGHLRLLEAAVSMCDDGLPFFEISAINADKPPLSIAEIKRRVEQFRKAGKNVIISNQPYFYKKAELFPGSAFIIGADTAARLVNPKYYGGDYNRMLEILLECKSIGTTFLVGGRKIEGDFKVLENLDIPEELREMFISIPEEKFRIDISSTEIRKSQGL

SEQ ID NO: 12176 - protein, 321 aa, Zea mays subsp. mays
  peptide (1)..(321): Ceres Seq. ID no. 12411618
MPLQFTSKQAAEDMALAAYNRALKLSGPGLQVMGVGFTGSLASSRPKHGDHRFYVSTWTHNCLRTSHVTLSKGLRSREEEDKVSSYFLLKAIADTCRVSATIQSDIHKSEIPEEIMEQFDEDQELQQVINGQVCMKVYNFAAPAESNLNRKIILPGSFNPLHDGHLRLLEAAVSMCDDGLPFFEISAINADKPPLSIAEIKRRVEQFRKAGKNVIISNQPYFYKKAELFPGSAFIIGADTAARLVNPKYYGGDYNRMLEILLECKSIGTTFLVGGRKIEGDFKVLENLDIPEELREMFISIPEEKFRIDISSTEIRKSQGL

SEQ ID NO: 12177 - DNA, 1320 bp, Zea mays subsp. mays
  misc_feature (1)..(1320): Ceres Seq. ID no. 12357862
  misc_feature (1)..(1320): Ortholog of  Ceres SEQ ID NO 12557361 as cited in SEQ ID NO 72
acccgttccgcgcccgtcctcgaccctcccacctattcgctcgctcgctcgccgtccgcgcccgcgcgggccgcgagatctaggccagtcgccgcggccgtggccgcgggctgacgggatctctgtcctcccgacacgacgaacctctaggaaggcgcctaagacgaggaggaagcgggggctatggaggcgtcttcctgggacgccgttcgcaagcaggcaaggaggttggaagctcatttagatgaccaaatgattgcataccgtaaattggtttctatgaaatcagacggttcagaggacaacattgagtctgatatagaaagatcactgaagcagttacagcaagtgaattcgcaaatgcaaacttgggtatcatcaggaggttctgaagttctttctcatactctgactcgtcatatggagattttgcaagaccttactcaggaattctatcggcttcgatcaagtctcagggcaaaacaacagcatacttctctccttgacttgagagattttgacagagcaaagtttgatgttgaggagccgtcagactcagctgatcaagttcttctcagggaacaagctgcgattggcaggagtactggacagatggataacgtgatatcacaagctcaggcaacacttggttctctcatgacccaacggtcaacattcggtggcatcactacaaagataagcaacgtcagcagccagcttccaacaattaaccacgtcctctcatcgatcagaaggaagaaatccatggataccatcattctttcgctcgttgcatctgtctgcacgtttctcatcttcatctactggctgtcgaagtaggtttaccagagcaaagatattacagtgttgtaagcttgggaccacaccaccagtaccggtacagatagtcttcattggtgtttgtacaatattattggttgattgaatgctgttacgattcgggcgtgctgtagccaccgtgtctccagctgtgcaactgctgccaatactgtgaactgaactctgtacctcgtgtacttcggcataactaagggtggagcaactggcgttgctttagctgccccatgttggcatgttgctcagatgtcggcttaaaggtggatcttcacctatgactatagttgacaatataggctctatattttatacaataaaatataaggatgaggctctatttgtttttatttttgaactaaaaataatttagaaccctatcaatttgtaaagaaacatttggatcacgatctattaccacccctacctatgtcgtaagcctctgttatcagacattttcgagtc

SEQ ID NO: 12178 - protein, 218 aa, Zea mays subsp. mays
  peptide (1)..(218): Ceres Seq. ID no. 12357863
MEASSWDAVRKQARRLEAHLDDQMIAYRKLVSMKSDGSEDNIESDIERSLKQLQQVNSQMQTWVSSGGSEVLSHTLTRHMEILQDLTQEFYRLRSSLRAKQQHTSLLDLRDFDRAKFDVEEPSDSADQVLLREQAAIGRSTGQMDNVISQAQATLGSLMTQRSTFGGITTKISNVSSQLPTINHVLSSIRRKKSMDTIILSLVASVCTFLIFIYWLSK

SEQ ID NO: 12179 - protein, 195 aa, Zea mays subsp. mays
  peptide (1)..(195): Ceres Seq. ID no. 12357864
MIAYRKLVSMKSDGSEDNIESDIERSLKQLQQVNSQMQTWVSSGGSEVLSHTLTRHMEILQDLTQEFYRLRSSLRAKQQHTSLLDLRDFDRAKFDVEEPSDSADQVLLREQAAIGRSTGQMDNVISQAQATLGSLMTQRSTFGGITTKISNVSSQLPTINHVLSSIRRKKSMDTIILSLVASVCTFLIFIYWLSK

SEQ ID NO: 12180 - protein, 186 aa, Zea mays subsp. mays
  peptide (1)..(186): Ceres Seq. ID no. 12357865
MKSDGSEDNIESDIERSLKQLQQVNSQMQTWVSSGGSEVLSHTLTRHMEILQDLTQEFYRLRSSLRAKQQHTSLLDLRDFDRAKFDVEEPSDSADQVLLREQAAIGRSTGQMDNVISQAQATLGSLMTQRSTFGGITTKISNVSSQLPTINHVLSSIRRKKSMDTIILSLVASVCTFLIFIYWLSK

SEQ ID NO: 12181 - DNA, 1229 bp, Zea mays subsp. mays
  misc_feature (1)..(1229): Ceres Seq. ID no. 12367074
  misc_feature (1)..(1229): Ortholog of  Ceres SEQ ID NO 12609518 as cited in SEQ ID NO 51887
  misc_feature (1)..(1229): Ortholog of  Ceres SEQ ID NO 13638980 as cited in SEQ ID NO 55975
  misc_feature (1)..(1229): Ortholog of  Ceres SEQ ID NO 13597466 as cited in SEQ ID NO 65077
  misc_feature (1)..(1229): Ortholog of  Ceres SEQ ID NO 13654590 as cited in SEQ ID NO 68615
cctggccaccaaagaagcaaaagtcttccaggttctcccacccacacggccacacgcccacacccactgctcctctaatctcacatgctcatgcatcctcctaatgtaacctgaagctttaagaaaacaaagtgctcccggaagactccaagctgcagctaccggccttcctctcccccattccaattccgagaacaggggcggcggagtcaaccaggtacgatgtgctcggtagcgaggctggcgtttgtgcttgcactggccatagccgcctcatcaattacggttgcggagagcagagattttaatatctttgctcagggcagcttgcctgatgcaaccaagggatcgtcaggtctagctgcaaccagtggaaagttgtgtcagttatgcgagcagtactcatccgaggcgctcctctatctcacacaaaacgagacccagactgagattcttagcattctacaccatgaatgtgccagccttgccccactcaagcagcagtgcatcacgctggttgactactacgtaccccttttcttcttggaggtctccatggttacccctgagaagttctgcgagtcgatgcatctctgcaagaaggggatgaagattagcctacccacccgggagggtacttgtggtttgtgccaccatgttgttgttgagattcttatcatgcttaaagaccccaacatgcagctggaagtaatcgacctactcaccaaaacatgcagcaaggcgcagaactatgaacagcagtgcaagcggctggtcctcaagtatattccactgattctggtgaagggccagaaattccttgagacaacggatgtctgctctgtgatacatgcatgcaaagcaggcacacaagcatcaatggaagccatgcctctgtctgccatgttgtgaaggtgatgcgaatcagaataaggcttatttgcctaggagatcaaattggggagaaacgatgaaaagtcagatgactgttttaagctctcttcctctattgctgaaacactattgatcggtgaaaattcgtctgtgtaaaattcttgtgtaaatttgggggtatatccagtgtttctctgaagtatacagcaactgcagctacaccaatctcttcggcattgggttgagaagttctaagcagtaattgcattttactgtatcatctatttgtttgtaactactgagagttattaattccttgtttctctgttgctctg

SEQ ID NO: 12182 - protein, 229 aa, Zea mays subsp. mays
  peptide (1)..(229): Ceres Seq. ID no. 12367075
MCSVARLAFVLALAIAASSITVAESRDFNIFAQGSLPDATKGSSGLAATSGKLCQLCEQYSSEALLYLTQNETQTEILSILHHECASLAPLKQQCITLVDYYVPLFFLEVSMVTPEKFCESMHLCKKGMKISLPTREGTCGLCHHVVVEILIMLKDPNMQLEVIDLLTKTCSKAQNYEQQCKRLVLKYIPLILVKGQKFLETTDVCSVIHACKAGTQASMEAMPLSAML

SEQ ID NO: 12183 - protein, 118 aa, Zea mays subsp. mays
  peptide (1)..(118): Ceres Seq. ID no. 12367076
MVTPEKFCESMHLCKKGMKISLPTREGTCGLCHHVVVEILIMLKDPNMQLEVIDLLTKTCSKAQNYEQQCKRLVLKYIPLILVKGQKFLETTDVCSVIHACKAGTQASMEAMPLSAML

SEQ ID NO: 12184 - DNA, 1541 bp, Zea mays subsp. mays
  misc_feature (1)..(1541): Ceres Seq. ID no. 12348785
  misc_feature (1)..(1541): Ortholog of  Ceres SEQ ID NO 13646499 as cited in SEQ ID NO 20565
accccccgcggggacaccgagcgctcgccgccgccttcgagttcggagcggagccacagccacgcatgccaatggccgtctccgctgttaccgcctcccatctcgctctctcttttccagcacgtagtcgccggagacgcgctgcgccccgcgccgcggcaggcggcctaacggctcgcgcacggcggctgcgctgcgagttcgtcgccggtggtgggaacggggcgctctccggagaggacgaccctcgcctcgtcgaccgccaaaaagttcttgatgccgctatgaatgacataaacaactcttttggaaaaggaagtgttacaagattaggcagtgctggtggtgcttttgttgagacattcccaagtggttgtctaacactagattttgctctgggtggcggtcttccaaaaggaagagtagtggaggtatatggtccagaaagcagtggaaagactaccctagctttgcatgcaattgctgaaatacagaagcttggaggaaatgccatgcttgtcgatgcagagcatgcttttgatccagcttattcaaaagctcttggggtagatattgaaaatctgattgtctgccagcctgacaacggagagatggcactagaaattgcggaccgtatgtgcagatctggagcaatagatcttatctgtattgattcggtgtcagcgctcaccccacgtgcagaaattgaaggtgagataggaatgcagcagatgggtctacaagctcgtctgatgagtcaagcattgagaaaaatgtcaggcaatgcctcaaaggctggctgtactcttatgttcttgaatcaaataagatacaagattggagtgttctatgggaatcctgaagtcactagtggagggatagccttgaaattctttgcatctgtccgtcttgagatacggctcattgggaagataaaatctgccaagggagatgaagatgttggtgtgaaggttcgtgtcagagtgcagaagagtaaagtatctaggccctacaagcaagctgaatttgaaatcatttttggggagggtgttagtaaattggggtgcgttcttgattgtgctgagctgatggatgtagttgcaaagaagggttcgtggtacagctacaaagatataagattgggccaaggcagagagaaggcactgcagtatctccgagagagcccaaccacctgcgatgagatagaaaaggtggttcgagctatgataccagaaggatccagacatatgagcctactagctttcgggcagtcatcatcaactgaagatgaacaggcgtatgatgaacaataatggtacatgaggttccgaagatggaacacttgtgaaaccgtcaagctctggcttgtgtcccttgcggataacagaaaagatcagagctggaacgattccgggtgcaatccgacggaaacgaacaaggcctaatgttgtacgtgtactgtggcatggcagaaccgtccggtttaacccaatttcgggcacacctgccagctatttatcactaagtgcaccagagattat

SEQ ID NO: 12185 - protein, 436 aa, Zea mays subsp. mays
  peptide (1)..(436): Ceres Seq. ID no. 12348786
PPRGHRALAAAFEFGAEPQPRMPMAVSAVTASHLALSFPARSRRRRAAPRAAAGGLTARARRLRCEFVAGGGNGALSGEDDPRLVDRQKVLDAAMNDINNSFGKGSVTRLGSAGGAFVETFPSGCLTLDFALGGGLPKGRVVEVYGPESSGKTTLALHAIAEIQKLGGNAMLVDAEHAFDPAYSKALGVDIENLIVCQPDNGEMALEIADRMCRSGAIDLICIDSVSALTPRAEIEGEIGMQQMGLQARLMSQALRKMSGNASKAGCTLMFLNQIRYKIGVFYGNPEVTSGGIALKFFASVRLEIRLIGKIKSAKGDEDVGVKVRVRVQKSKVSRPYKQAEFEIIFGEGVSKLGCVLDCAELMDVVAKKGSWYSYKDIRLGQGREKALQYLRESPTTCDEIEKVVRAMIPEGSRHMSLLAFGQSSSTEDEQAYDEQ

SEQ ID NO: 12186 - protein, 415 aa, Zea mays subsp. mays
  peptide (1)..(415): Ceres Seq. ID no. 12348787
MPMAVSAVTASHLALSFPARSRRRRAAPRAAAGGLTARARRLRCEFVAGGGNGALSGEDDPRLVDRQKVLDAAMNDINNSFGKGSVTRLGSAGGAFVETFPSGCLTLDFALGGGLPKGRVVEVYGPESSGKTTLALHAIAEIQKLGGNAMLVDAEHAFDPAYSKALGVDIENLIVCQPDNGEMALEIADRMCRSGAIDLICIDSVSALTPRAEIEGEIGMQQMGLQARLMSQALRKMSGNASKAGCTLMFLNQIRYKIGVFYGNPEVTSGGIALKFFASVRLEIRLIGKIKSAKGDEDVGVKVRVRVQKSKVSRPYKQAEFEIIFGEGVSKLGCVLDCAELMDVVAKKGSWYSYKDIRLGQGREKALQYLRESPTTCDEIEKVVRAMIPEGSRHMSLLAFGQSSSTEDEQAYDEQ

SEQ ID NO: 12187 - protein, 413 aa, Zea mays subsp. mays
  peptide (1)..(413): Ceres Seq. ID no. 12348788
MAVSAVTASHLALSFPARSRRRRAAPRAAAGGLTARARRLRCEFVAGGGNGALSGEDDPRLVDRQKVLDAAMNDINNSFGKGSVTRLGSAGGAFVETFPSGCLTLDFALGGGLPKGRVVEVYGPESSGKTTLALHAIAEIQKLGGNAMLVDAEHAFDPAYSKALGVDIENLIVCQPDNGEMALEIADRMCRSGAIDLICIDSVSALTPRAEIEGEIGMQQMGLQARLMSQALRKMSGNASKAGCTLMFLNQIRYKIGVFYGNPEVTSGGIALKFFASVRLEIRLIGKIKSAKGDEDVGVKVRVRVQKSKVSRPYKQAEFEIIFGEGVSKLGCVLDCAELMDVVAKKGSWYSYKDIRLGQGREKALQYLRESPTTCDEIEKVVRAMIPEGSRHMSLLAFGQSSSTEDEQAYDEQ

SEQ ID NO: 12188 - DNA, 1765 bp, Zea mays subsp. mays
  misc_feature (1)..(1765): Ceres Seq. ID no. 12411611
  misc_feature (1)..(1765): Ortholog of  Ceres SEQ ID NO 14316239 as cited in SEQ ID NO 54472
  misc_feature (1)..(1765): Ortholog of  Ceres SEQ ID NO 13654809 as cited in SEQ ID NO 62798
gtttttcggtcctattcgacccccaaactccggacgagccttccgcgcgacgctgcacggctccgccagccacccgtaaaaccctagacggctagccggcgcacggaagcgggcagcggagcggaggtgagcctctcctgcgtcggattgtccccgcccccgctaggcgccatgaagctgacggtgaagaccctcaagggaacgcacttcgagatccgggtgcagcccaacgacacgattatggctgtgaagaagaatattgaagagatacaagggaaagacagctatccatggggccaacaactgctgattttcaatggaaaggtcttgaaagatgaaagtacattggaagagaataaagtcaatgaggatgggtttctagttgtcatgcttagtaagggtaaaacatctggttcaactggaacttcatcttcccagcactcaaacactcctgcaacaaggcaggcacctcctctagaggccccacaacaagctcctcaacccccggtggcaccaattacaacttctcagcctgaaggacttcctgcacaggcacctaacacacatgacaatgcggcatcaaatcttctgtctggaaggaatgttgacacaataattaaccagctaatggagatgggtgggggcagttgggacaaagataaagtccaaagggctctccgtgccgcttacaacaaccccgaacgtgctgttgaatacctctactctggtattccagtaacagctgaaattgctgttccaattggtggtcaaggggcaaacacaactgatcgagctcctactggggaagctggtctctctgggattccaaacaccgctccactagatcttttcccgcagggggcttccaatgctggaggtggtgctggtggtggaccacttgattttcttagaaacaatccacagtttcaagcagttcgggaaatggtccatacaaatccacaaattttgcagcctatgctcgttgagttgagcaagcagaatcctcaaattctaaggttgattgaggagaatcatgatgagtttcttcagttactaaatgagccctttgaaggcggagagggggatttcttagaccaacctgaggaggatgaaatgcctcatgccattagtgttacaccagaggagcaggaggccattggacggcttgagtccatggggttcgacagagcacgcgttatcgaagcattcttagcctgcgataggaacgaggagctagcagcaaactatctccttgagcatgctggtgaggaagattaagcgggagtagttttcatacgattttttttagtaccgagtgacgaagagttgatatggagctgacgatcatttgaattgatttcgttgtgcaagacttgtattacataaacatttaaatacatgtagctgaacatttcagtagaaatgctacggttgtggtctcccatcgttgactttcattagcgtggtggtaaacatcggttctgctcctgtcctgtattaacacaagcttggcttgggaggaagcacaaggagctattgctacctagcaaaaggataaaagggaggatgatgaattggcgatgtgtttgtgacacgctgccctcaagtgtggatgatgagtgcagatatgttgatgactgttccaaggctgtcaagtgtgtaaacgaacgctgccttcgtagttctgacaactgcgacagttctgtagctagacctatttgctatctttatgataaaattatctaaatgggacggtccttgaccg

SEQ ID NO: 12189 - protein, 368 aa, Zea mays subsp. mays
  peptide (1)..(368): Ceres Seq. ID no. 12411612
MKLTVKTLKGTHFEIRVQPNDTIMAVKKNIEEIQGKDSYPWGQQLLIFNGKVLKDESTLEENKVNEDGFLVVMLSKGKTSGSTGTSSSQHSNTPATRQAPPLEAPQQAPQPPVAPITTSQPEGLPAQAPNTHDNAASNLLSGRNVDTIINQLMEMGGGSWDKDKVQRALRAAYNNPERAVEYLYSGIPVTAEIAVPIGGQGANTTDRAPTGEAGLSGIPNTAPLDLFPQGASNAGGGAGGGPLDFLRNNPQFQAVREMVHTNPQILQPMLVELSKQNPQILRLIEENHDEFLQLLNEPFEGGEGDFLDQPEEDEMPHAISVTPEEQEAIGRLESMGFDRARVIEAFLACDRNEELAANYLLEHAGEED

SEQ ID NO: 12190 - protein, 345 aa, Zea mays subsp. mays
  peptide (1)..(345): Ceres Seq. ID no. 12411613
MAVKKNIEEIQGKDSYPWGQQLLIFNGKVLKDESTLEENKVNEDGFLVVMLSKGKTSGSTGTSSSQHSNTPATRQAPPLEAPQQAPQPPVAPITTSQPEGLPAQAPNTHDNAASNLLSGRNVDTIINQLMEMGGGSWDKDKVQRALRAAYNNPERAVEYLYSGIPVTAEIAVPIGGQGANTTDRAPTGEAGLSGIPNTAPLDLFPQGASNAGGGAGGGPLDFLRNNPQFQAVREMVHTNPQILQPMLVELSKQNPQILRLIEENHDEFLQLLNEPFEGGEGDFLDQPEEDEMPHAISVTPEEQEAIGRLESMGFDRARVIEAFLACDRNEELAANYLLEHAGEED

SEQ ID NO: 12191 - protein, 296 aa, Zea mays subsp. mays
  peptide (1)..(296): Ceres Seq. ID no. 12411614
MLSKGKTSGSTGTSSSQHSNTPATRQAPPLEAPQQAPQPPVAPITTSQPEGLPAQAPNTHDNAASNLLSGRNVDTIINQLMEMGGGSWDKDKVQRALRAAYNNPERAVEYLYSGIPVTAEIAVPIGGQGANTTDRAPTGEAGLSGIPNTAPLDLFPQGASNAGGGAGGGPLDFLRNNPQFQAVREMVHTNPQILQPMLVELSKQNPQILRLIEENHDEFLQLLNEPFEGGEGDFLDQPEEDEMPHAISVTPEEQEAIGRLESMGFDRARVIEAFLACDRNEELAANYLLEHAGEED

SEQ ID NO: 12192 - DNA, 1340 bp, Zea mays subsp. mays
  misc_feature (1)..(1340): Ceres Seq. ID no. 12413195
  misc_feature (1)..(1340): Ortholog of  Ceres SEQ ID NO 13585458 as cited in SEQ ID NO 60907
  misc_feature (1)..(1340): Ortholog of  Ceres SEQ ID NO 13598678 as cited in SEQ ID NO 61508
  misc_feature (1)..(1340): Ortholog of  Ceres SEQ ID NO 12625392 as cited in SEQ ID NO 63315
  misc_feature (1)..(1340): Ortholog of  Ceres SEQ ID NO 13598319 as cited in SEQ ID NO 68758
aaccactgctcgcactcactcacagtcgccgccgctgcccagtgcccactgctcgccgctagaggaatctgagagagagaggggaaagggcgaaggaggcgcaggcaggcatgggctccccttcctccctccccgccgcggcggcgctcgtgctcctggccctgctcgccggagcccagtgccgcgaggcccagttcgacgccgcggacgccggcgcggagaacttcaacaccagcgaggccgccgtgtactggggcccctggcagaaggcccgggccacctggtacggccagcccaacggcgccggcccggacgacaacggtggtgcgtgcggcttcaagcacaccaaccagtaccccttcatgtccatgggctcctgcggaaaccagccattgttcaaggacggcaagggatgcggctcctgctacaagattcggtgcaggaaggacccgtcctgctccgggcggacggagacggtgatcatcaccgacatgaactactacccggtgtccaagtaccacttcgacctcagcggcacggcgttcggcaggctggccaagcccggcctcaacgacaagctccgccactcgggcatcatcgacatcgagttcaccagggtgccgtgcgagttccctggcctcaagatcgggttccacgtggaggagtactcgagccccgtctacttcgcggtgctggtggagtacgaggacggcgacggcgacgtggtgcaggtggacctgatggagtccaagacggcgcgcgggccgccgacggggcggtgggcgccgatgcgcgagtcctggggctccatctggcgcatggacaccaaccaccgcatgcagccgcccttctccatccgcatccgcaacgagtccggcaagacgctcgtcgccaggaacgtcatcccggccaactggaggcccaacaccttctaccgctccttcgtccagtacagctagctagctggtttgcgccctcgggccgctcggtcaccaccacccaccactactaccaccaccacccactagactactgcttctgctaccaaatactacggcggaacggaacggctggttgccgccgccgccgtcgtccttggaaaggttgaggcgtctcttggtcatccgtatcgttaccgttgtcatggtcctttgagtcgttgcaaccctgattgcaagccggcaagggggaaaaaaccaacaaagccgtgtgggaaaatggaggaggcaggcgtacaatgtacgctctcccgcccactgttgctttataatctctatatcatcatcatcttcttcttctccattccgatcggtgattaatcgaaaagtatattgtaatgt

SEQ ID NO: 12193 - protein, 368 aa, Zea mays subsp. mays
  peptide (1)..(368): Ceres Seq. ID no. 12413196
TTARTHSQSPPLPSAHCSPLEESERERGKGEGGAGRHGLPFLPPRRGGARAPGPARRSPVPRGPVRRRGRRRGELQHQRGRRVLGPLAEGPGHLVRPAQRRRPGRQRWCVRLQAHQPVPLHVHGLLRKPAIVQGRQGMRLLLQDSVQEGPVLLRADGDGDHHRHELLPGVQVPLRPQRHGVRQAGQARPQRQAPPLGHHRHRVHQGAVRVPWPQDRVPRGGVLEPRLLRGAGGVRGRRRRRGAGGPDGVQDGARAADGAVGADARVLGLHLAHGHQPPHAAALLHPHPQRVRQDARRQERHPGQLEAQHLLPLLRPVQLASWFAPSGRSVTTTHHYYHHHPLDYCFCYQILRRNGTAGCRRRRRPWKG

SEQ ID NO: 12194 - protein, 282 aa, Zea mays subsp. mays
  peptide (1)..(282): Ceres Seq. ID no. 12413197
MGSPSSLPAAAALVLLALLAGAQCREAQFDAADAGAENFNTSEAAVYWGPWQKARATWYGQPNGAGPDDNGGACGFKHTNQYPFMSMGSCGNQPLFKDGKGCGSCYKIRCRKDPSCSGRTETVIITDMNYYPVSKYHFDLSGTAFGRLAKPGLNDKLRHSGIIDIEFTRVPCEFPGLKIGFHVEEYSSPVYFAVLVEYEDGDGDVVQVDLMESKTARGPPTGRWAPMRESWGSIWRMDTNHRMQPPFSIRIRNESGKTLVARNVIPANWRPNTFYRSFVQYS

SEQ ID NO: 12195 - protein, 231 aa, Zea mays subsp. mays
  peptide (1)..(231): Ceres Seq. ID no. 12413198
MRLLLQDSVQEGPVLLRADGDGDHHRHELLPGVQVPLRPQRHGVRQAGQARPQRQAPPLGHHRHRVHQGAVRVPWPQDRVPRGGVLEPRLLRGAGGVRGRRRRRGAGGPDGVQDGARAADGAVGADARVLGLHLAHGHQPPHAAALLHPHPQRVRQDARRQERHPGQLEAQHLLPLLRPVQLASWFAPSGRSVTTTHHYYHHHPLDYCFCYQILRRNGTAGCRRRRRPWKG

SEQ ID NO: 12196 - DNA, 1274 bp, Zea mays subsp. mays
  misc_feature (1)..(1274): Ceres Seq. ID no. 12408122
  misc_feature (1)..(1274): Ortholog of  Ceres SEQ ID NO 13597715 as cited in SEQ ID NO 65577
  misc_feature (1)..(1274): Ortholog of  Ceres SEQ ID NO 15178668 as cited in SEQ ID NO 68301
gcgcagagccagccaagccaaccagccagtcagaagaggaaccggggagcggcagctgcagcggccgagggcggagcacgcgaggttcaagattatccggtttaaagacatcagaagaggctgtggcatggatagataccaaagggtagagaagcctcggaatgacacgccaatcagccagaatgagatcagaatcactactcaggggaggatgaggaactatatcagctatgggatgtcgctgcttgaggaaaatggacatgatgagattagtatcaaggccatgggacgggccataaataagacagttatggttgttgaattgatcaagagaagggttggaggtcttcatcagaacactgctactgaatctgttgatatcacagacacatgggaacctttggaagaaggccttctcccactagagacaactcgccatgtgtcgatgatcactgtgacactgtcaaagaaccctctggatacatcatctccaggataccagccacctatcccagctgaagaggtgaaacctgcttttgactatgatcatgaagaatcgtatcccactggtcgtggaagaggacgtggtggtggcagaagaggcaggggaagaggcatgagcaatggcccccctccacctgcttatggttacaacgaagagtgggaggaggaaggagattattataacagagggcgcgggagagggcggctacgtggacgaggagggagagggcgtggtggctactacggaggtgggaggcgtggtggctacggttatgattatggctatgcccccagaggcgggtactatgaagagcaagacgaatactatgatgagcccgaggaatatgctcctccccctggccgcggacgtggcagagggagaaggggcggcatgccttggcgtgggcgtggaggccgcgggccaccgcgcggtggccgagggagctactactaggcgcgagaaatgcgacgtgccgaatgcgtgtgcttattagttatctgttagcgtttgctgcagtgctcttctatggagctccgaccccggactggaattatctcgtaggcccttccaggtgctactctacttcagctgctgtccctgtgcaactcgtccgggcaagttttgtggctcgctcgtggttttgtagctaggttaagcgagtgaagttacactcggtagcgcagtatttcctgcgagattgtttattcttctgttaatgtacctaccttactatttcgtttggattatggatactgggtgcatccgttcc

SEQ ID NO: 12197 - protein, 318 aa, Zea mays subsp. mays
  peptide (1)..(318): Ceres Seq. ID no. 12408123
RRASQANQPVRRGTGERQLQRPRAEHARFKIIRFKDIRRGCGMDRYQRVEKPRNDTPISQNEIRITTQGRMRNYISYGMSLLEENGHDEISIKAMGRAINKTVMVVELIKRRVGGLHQNTATESVDITDTWEPLEEGLLPLETTRHVSMITVTLSKNPLDTSSPGYQPPIPAEEVKPAFDYDHEESYPTGRGRGRGGGRRGRGRGMSNGPPPPAYGYNEEWEEEGDYYNRGRGRGRLRGRGGRGRGGYYGGGRRGGYGYDYGYAPRGGYYEEQDEYYDEPEEYAPPPGRGRGRGRRGGMPWRGRGGRGPPRGGRGSYY

SEQ ID NO: 12198 - protein, 276 aa, Zea mays subsp. mays
  peptide (1)..(276): Ceres Seq. ID no. 12408124
MDRYQRVEKPRNDTPISQNEIRITTQGRMRNYISYGMSLLEENGHDEISIKAMGRAINKTVMVVELIKRRVGGLHQNTATESVDITDTWEPLEEGLLPLETTRHVSMITVTLSKNPLDTSSPGYQPPIPAEEVKPAFDYDHEESYPTGRGRGRGGGRRGRGRGMSNGPPPPAYGYNEEWEEEGDYYNRGRGRGRLRGRGGRGRGGYYGGGRRGGYGYDYGYAPRGGYYEEQDEYYDEPEEYAPPPGRGRGRGRRGGMPWRGRGGRGPPRGGRGSYY

SEQ ID NO: 12199 - protein, 248 aa, Zea mays subsp. mays
  peptide (1)..(248): Ceres Seq. ID no. 12408125
MRNYISYGMSLLEENGHDEISIKAMGRAINKTVMVVELIKRRVGGLHQNTATESVDITDTWEPLEEGLLPLETTRHVSMITVTLSKNPLDTSSPGYQPPIPAEEVKPAFDYDHEESYPTGRGRGRGGGRRGRGRGMSNGPPPPAYGYNEEWEEEGDYYNRGRGRGRLRGRGGRGRGGYYGGGRRGGYGYDYGYAPRGGYYEEQDEYYDEPEEYAPPPGRGRGRGRRGGMPWRGRGGRGPPRGGRGSYY

SEQ ID NO: 12200 - DNA, 1086 bp, Zea mays subsp. mays
  misc_feature (1)..(1086): Ceres Seq. ID no. 12413899
  misc_feature (1)..(1086): Ortholog of  Ceres SEQ ID NO 12589502 as cited in SEQ ID NO 603
  misc_feature (1)..(1086): Ortholog of  Ceres SEQ ID NO 13589024 as cited in SEQ ID NO 68078
agtcacggtactccaccgctaaaaccttcggaaagaatccccaaatctcgcacacctcgaagccttcgaggcccgaaaccctagctcctcggcctccccgccgcttccacccatggctccaggactgcagcgcttcactgacattgcggacgacggcacgccccagctcgacgccgcgtccggcgaggagctggtccgtgtggaccgcaccgtggctgtcgcccttggcccccgctcgccggagtccccggggactctgttcgtcaccaccaggagggtgatttggctcagcgaagcggagaagggcaagggctacgcggtggacttcctcgccatctcgcttcacgctgtgtcgcgcgacctcgaggcgtacccctcgccctgtatctacactcagattgaggcacagttggtacagaagaggaggctggggaatcaaatcctgaagcaaatgaactagagctatctagagtatctgaaatgaggctcatactagcggaccccggtcaactggatgcactttttgatgtcttctgtcattgtgctgaactgaatcctgaccctaatgctgagtgcaatggggagaatggctggatccgtggtgaagatatgtctaatggtgactggattcgtgatgatgtggacatggttgatgaaaatgtcccgcagtttttcaatgccaatccgataggtcaaaatggtggatatgaccttagtcgttcagtatttgagcttcaaatcaacgaccaacgttttgaggatgcagaggaggaacaggagagccatgaaaataatggacattagaaacagagacatgttcctcgagagcatcatgtgatttattttgttgtaaatcactaccgatgcagctcggtttgcctactgtttcatctacactttctcttcctttttccttgatgttataggattaacatcactgggtgactttctggaattgcatcgatggttccttttggtgagaaaaggtcttgctgctggtcaagaatgtaacttgtagagcatgatgttgaatcgtgtgaaattagttcagtacttttgatctaacaaatagaaggtcgaattggg

SEQ ID NO: 12201 - protein, 115 aa, Zea mays subsp. mays
  peptide (1)..(115): Ceres Seq. ID no. 12413900
MAPGLQRFTDIADDGTPQLDAASGEELVRVDRTVAVALGPRSPESPGTLFVTTRRVIWLSEAEKGKGYAVDFLAISLHAVSRDLEAYPSPCIYTQIEAQLVQKRRLGNQILKQMN

SEQ ID NO: 12202 - protein, 107 aa, Zea mays subsp. mays
  peptide (1)..(107): Ceres Seq. ID no. 12413901
MRLILADPGQLDALFDVFCHCAELNPDPNAECNGENGWIRGEDMSNGDWIRDDVDMVDENVPQFFNANPIGQNGGYDLSRSVFELQINDQRFEDAEEEQESHENNGH

SEQ ID NO: 12203 - protein, 92 aa, Zea mays subsp. mays
  peptide (1)..(92): Ceres Seq. ID no. 12413902
SRYSTAKTFGKNPQISHTSKPSRPETLAPRPPRRFHPWLQDCSASLTLRTTARPSSTPRPARSWSVWTAPWLSPLAPARRSPRGLCSSPPGG

SEQ ID NO: 12204 - DNA, 840 bp, Zea mays subsp. mays
  misc_feature (1)..(840): Ceres Seq. ID no. 12467613
  misc_feature (1)..(840): Ortholog of  Ceres SEQ ID NO 15169670 as cited in SEQ ID NO 62085
attggcaaggcttctcaaaagcacaagggaaaaatctctcgttctcttgctgcaaaaacagctcttgctatccggtatgatgcccttggtgatggtgaggacaactccattggcactgagagtcgacttaagcttgagacacggcttcaagttcttgagggtagagaacttgggaaatctgctggttccacaaaggggaagcccaagatagaagtgtatgaaaaggaccggaagaagggtactggggctttaacaactcctgctaagacatataaccctgcagctgatctggtactcacggaagaaacaccaaagaagtcagaattggcttcaaagaagaggaaacataatgaggtggaaactgaaccattagcagagcctgcagaggaagcaatccaggaggatggtgaccaggaggatcggaagaagaagaagaaaaagaacaaggaaagcaaggaggctcctgctggtgaaggtgatggtgagaagaaaaagaaaaagaagtctaaggaggtcgaggaagagcctgttgtggctgctgcttcagaagttaagaagaagaaaaagaagtctgacgctgatggtgaggatgtcgcaatgcaaaccgaagaatcaggtaagaaagagaagaaaaagaagaaaaaggcgtgctgatgatgagtgagacattcacactggaagagaatttgcgggtaccaaactaccaaaggctgggactcagctgttctgtaaaatggatttgcgggtagaaacgatatcgacatcagtttttttggacccggcttgtattcaagtacttgctcgatcctggtgatgatggaatttaagttttgctgttgc

SEQ ID NO: 12205 - protein, 217 aa, Zea mays subsp. mays
  peptide (1)..(217): Ceres Seq. ID no. 12467614
IGKASQKHKGKISRSLAAKTALAIRYDALGDGEDNSIGTESRLKLETRLQVLEGRELGKSAGSTKGKPKIEVYEKDRKKGTGALTTPAKTYNPAADLVLTEETPKKSELASKKRKHNEVETEPLAEPAEEAIQEDGDQEDRKKKKKKNKESKEAPAGEGDGEKKKKKKSKEVEEEPVVAAASEVKKKKKKSDADGEDVAMQTEESGKKEKKKKKKAC

SEQ ID NO: 12206 - DNA, 1561 bp, Zea mays subsp. mays
  misc_feature (1)..(1561): Ceres Seq. ID no. 12411608
  misc_feature (1)..(1561): Ortholog of  Ceres SEQ ID NO 13596277 as cited in SEQ ID NO 67896
ctctccccgtctgcctcgccctccacaccaggccacgccacacacaggatagcgagcgggagcgacggcggcggcggaggagctagggttttgatccggcctcgccggctaggctgcgccgccccgacgccgaagccatggacagggagcttctagagacgtttgacgcggccaagaaggcggccgacgaggcggcaggggacggcaactcgccggaggctggccgctgcctcgacgcgctgcggcggctgcgcgacattcgcgtcaacaccgacatcctcgtctcgacgcaggttggcaaacgccttcgaccccttactaagcatcctcactcaggcattcaagcagttgctgcagacctttttgggtactggaaaaaggttgtccttgaagagtcaggaaagaaaaatggcggctcagagaatgaaagatcaagtgactcttcaggaaaggttgagaaggtgaggcccgtgaagattgaaaagaactctgcatcagcaagcatgaagcttgagaaaagagatgtggatgttaggggtcagaagcctaacaatgtcaaagttgagaagactactagtaatggttccaaagctcaatctgtgaaggtggaaagggtatccaaagaagtcataaggactcctgactcgaagaggccagcatccgtccccaatggccacccaaagcttacatctcttgtcaaatgcaatgatcctacccgagataaaatccgggaactacttgctgaagcctttgtaagtgtttccagagagactagtgatgatgacagagacgaagtgaaaaacatcttggatgaagtcgaggcatgcgacccatacagggttgccgtgacagtagagtctgcactattcgagaggcttggaccttccactgggactcacagggcgaaatacaggtcaatcatgttcaacctgagggctgaaaacaataccgatttccggaggagggtcctcatcggtctagtggcgccggagaggcttccagacataccccctgatgagatggctagcgacgcaaggaagcaagagaacatgcagatcaaggagaaggctctgttcgactgcgagcgtggagcggcaccaaaggcgacgacggaccagttcaagtgtgccagatgtgggcagcggaagacgacttactaccagctgcagactcggagtgctgatgaaccgatgacgacgttcgtcacatgcgtgaactgcaacaatcactggaagttctgctgagtgttcagccttgctaaagtgtttacttagttgtgctgagcacactatcctgctgtgatgtgtgtgctctgttagttgtgactggaagttcgacagggcaggctgaacaactcaacttttttccccttttttaccccccgtaaactaggagcagttatcctcttcctctgtcaggcagcctcctgattcattcagattgtactagtcgaacgcgtgaatgttgttgacttgatcgcatcgtcaccagatgtgaatgttcttgggtggagttagaatagaatggtgccaagtcagacgatgctgatggattagtggcg

SEQ ID NO: 12207 - protein, 368 aa, Zea mays subsp. mays
  peptide (1)..(368): Ceres Seq. ID no. 12411609
MDRELLETFDAAKKAADEAAGDGNSPEAGRCLDALRRLRDIRVNTDILVSTQVGKRLRPLTKHPHSGIQAVAADLFGYWKKVVLEESGKKNGGSENERSSDSSGKVEKVRPVKIEKNSASASMKLEKRDVDVRGQKPNNVKVEKTTSNGSKAQSVKVERVSKEVIRTPDSKRPASVPNGHPKLTSLVKCNDPTRDKIRELLAEAFVSVSRETSDDDRDEVKNILDEVEACDPYRVAVTVESALFERLGPSTGTHRAKYRSIMFNLRAENNTDFRRRVLIGLVAPERLPDIPPDEMASDARKQENMQIKEKALFDCERGAAPKATTDQFKCARCGQRKTTYYQLQTRSADEPMTTFVTCVNCNNHWKFC

SEQ ID NO: 12208 - protein, 246 aa, Zea mays subsp. mays
  peptide (1)..(246): Ceres Seq. ID no. 12411610
MKLEKRDVDVRGQKPNNVKVEKTTSNGSKAQSVKVERVSKEVIRTPDSKRPASVPNGHPKLTSLVKCNDPTRDKIRELLAEAFVSVSRETSDDDRDEVKNILDEVEACDPYRVAVTVESALFERLGPSTGTHRAKYRSIMFNLRAENNTDFRRRVLIGLVAPERLPDIPPDEMASDARKQENMQIKEKALFDCERGAAPKATTDQFKCARCGQRKTTYYQLQTRSADEPMTTFVTCVNCNNHWKFC

SEQ ID NO: 12209 - DNA, 1443 bp, Zea mays subsp. mays; identical to SEQ ID NO: 9150
  misc_feature (1)..(1443): Ceres Seq. ID no. 12351752
  misc_feature (1)..(1443): Ortholog of  Ceres SEQ ID NO 12583469 as cited in SEQ ID NO 51031
  misc_feature (1)..(1443): Ortholog of  Ceres SEQ ID NO 13597389 as cited in SEQ ID NO 63426
  misc_feature (1)..(1443): Ortholog of  Ceres SEQ ID NO 13595998 as cited in SEQ ID NO 68161
  misc_feature (1)..(1443): Ortholog of  Ceres SEQ ID NO 15180463 as cited in SEQ ID NO 0

SEQ ID NO: 12210 - protein, 242 aa, Zea mays subsp. mays; identical to SEQ ID NO: 9151
  peptide (1)..(242): Ceres Seq. ID no. 12351753

SEQ ID NO: 12211 - protein, 233 aa, Zea mays subsp. mays; identical to SEQ ID NO: 9152
  peptide (1)..(233): Ceres Seq. ID no. 12351754

SEQ ID NO: 12212 - protein, 230 aa, Zea mays subsp. mays; identical to SEQ ID NO: 9153
  peptide (1)..(230): Ceres Seq. ID no. 12351755

SEQ ID NO: 12213 - DNA, 1482 bp, Zea mays subsp. mays
  misc_feature (1)..(1482): Ceres Seq. ID no. 12390132
  misc_feature (1)..(1482): Ortholog of  Ceres SEQ ID NO 12599421 as cited in SEQ ID NO 65135
tcttcctcctcccctctcccccgttggcttgttcagttgctcttcgtctcctcccctcccctccgccggctctccggcccctcttcgtcccccctcatcctccgcgcacatttccagacgaggaaccagggaggctaagtgcaggaaggcaggatgcagtacaagaacctgggccggtcggggctccgcgtcagccagctctcgtacggcgcgtgggtgaccttcgggaaccagctggacgtgaaggaggccaaggcgctgctgcaggcgtgccgggacgcgggcgtcaacttcttcgacaacgccgaggtgtacgccaacggccgcgccgaggagatcatgggccaggccatccgggacctgggctggcgccgctccgacgtcgtcatctccaccaagctcttctggggcggccagggccccaacgacaaggggcctctcccgcaagcacgtcgtcgagggcctccgcgcctcgctccgccgcctcgacatggactacgtcgacgtcgtctactgccaccgccccgacgcctccacgcccgtcgaggagacggtgcgcgccatcaactgggtcatcgaccagggctgggccttctactggggcacctccgagtggtccgcgcagcagatcaccgaggcctgggcagtcgccaaccgcctcgacctcgtcggacccatcgtcgagcagccggagtacaaccttttctccagacacaaggttgagtctgagttcttgccactttacagcacctatggcatcggattgactacatggagtcctctagcttcaggagtactaactggaaaatataccaaagggaacatacctgctgatagcaggtttgctctagacaattacaagaacctggcaaataggtccctggttgacgacacgcttcggaaagtgaatgggctaaaacctatcgccgctgaactcggcgtttcgttagctcaactctccattgcttggtgcgcgtcaaaccccaacgtctcatccgtgatcactggagccaccaaagaaagccagatcgtggagaacatgaaggctctagatgtcatcccactgctgacgccggaggtcgttgacaggattgaggcggtcgtccagagcaagcccaaacgcactgaatcatacaggtgaaggcggtacgtacgggcctacgtgaccgtgcagattgtgagtggcgcggagggattctcggcattcgtccgaatggagtttaggcctctccagtaccttgatttcacgaaattatatccatggaacattggtcccatgtattctttctgggcgtccccagtcgtggtgctgtgttccaaacatctgtccgtcctgtgtgtattctgcctgcgtttcagattcagattttttttttattttggacccaatcaaccctgcactgccttgtcgaggaccgtggtccgtggatggcaatggttcttacttcttactggttatattatatatgctgcaagattgct

SEQ ID NO: 12214 - protein, 254 aa, Zea mays subsp. mays
  peptide (1)..(254): Ceres Seq. ID no. 12390133
FLLPSPPLACSVALRLLPSPPPALRPLFVPPHPPRTFPDEEPGRLSAGRQDAVQEPGPVGAPRQPALVRRVGDLREPAGREGGQGAAAGVPGRGRQLLRQRRGVRQRPRRGDHGPGHPGPGLAPLRRRHLHQALLGRPGPQRQGASPASTSSRASAPRSAASTWTTSTSSTATAPTPPRPSRRRCAPSTGSSTRAGPSTGAPPSGPRSRSPRPGQSPTASTSSDPSSSSRSTTFSPDTRLSLSSCHFTAPMASD

SEQ ID NO: 12215 - protein, 216 aa, Zea mays subsp. mays
  peptide (1)..(216): Ceres Seq. ID no. 12390134
MDYVDVVYCHRPDASTPVEETVRAINWVIDQGWAFYWGTSEWSAQQITEAWAVANRLDLVGPIVEQPEYNLFSRHKVESEFLPLYSTYGIGLTTWSPLASGVLTGKYTKGNIPADSRFALDNYKNLANRSLVDDTLRKVNGLKPIAAELGVSLAQLSIAWCASNPNVSSVITGATKESQIVENMKALDVIPLLTPEVVDRIEAVVQSKPKRTESYR

SEQ ID NO: 12216 - protein, 189 aa, Zea mays subsp. mays
  peptide (1)..(189): Ceres Seq. ID no. 12390135
MQYKNLGRSGLRVSQLSYGAWVTFGNQLDVKEAKALLQACRDAGVNFFDNAEVYANGRAEEIMGQAIRDLGWRRSDVVISTKLFWGGQGPNDKGPLPQARRRGPPRLAPPPRHGLRRRRLLPPPRRLHARRGDGARHQLGHRPGLGLLLGHLRVVRAADHRGLGSRQPPRPRRTHRRAAGVQPFLQTQG

SEQ ID NO: 12217 - DNA, 1244 bp, Zea mays subsp. mays
  misc_feature (1)..(1244): Ceres Seq. ID no. 12376380
  misc_feature (1)..(1244): Ortholog of  Ceres SEQ ID NO 12466401 as cited in SEQ ID NO 20698
  misc_feature (1)..(1244): Ortholog of  Ceres SEQ ID NO 15224731 as cited in SEQ ID NO 63650
gccttctttcgccgttcatatactccgccgcttctactagtggtatcgtaggttaaggccaccccaagcaggagtctgcttccgttccattgcatcccagtcccagccaaagcaggatgccgcacgccaagacggactcggaggtgacgagcctggcgccgtcgtcgcctccgcggtcgcctccacggacccgcggcgccgtctactacgtgcagagcccgtcccgcgactcgcacgacggcgagacgatcaaggcggccacgtctgtgcactccacccccgcgctgagccccatggcgtcgccgcggccactcgcactcccactcccactcgtccatgggcagggactcctcctccagccgattctcgggccacggccacaacaagcgcaaggccgacaagggcggcagcaacaagggcgcgccgggcggcaaggggtggcaggagatcggcgtcatcgaggaggaagggctcatggacgaggaggaccacacgcggatcgtgccccgcaagtgctactgcttcctcgccttcctgctcggcttcgtcgcgctcttctccttcttcgcgctcgtgctctggggcgccagcaggtcccagaagccgcgcatcgtcatgggcaccatccgcttcgacaacttcatcatccaggccggcaccgacgcgtcgctcgtgcccaccgacatggccaccaccaactccaccgtcagattcacctaccgcaacaggggcaccttcttcgggatccacgtcaccgccgacccgttccagctctcctacagccagctcacgctcgcgtcaggagacctccacaacttctaccagcctcgcagcagcagccgcaccgtcagcgtcgccgtggtcggcaacaaggtgccgctgtacggcggcggacccacgctgacggcggcgccggcggccgggggcaaggggcagcagcaggccagcgccaaggtggcatcggtgcccatggtgctgaggaccacgctgcactcgcgggcctacgtgctgggcgcgctggtcaagcccaagttcacgctcgccgtcgagtgcagggtgctcatgaacccaaacaagcagaacaagcccatctcgctcgggaacgcctgccactactcatgatatatttagcctctcatactagctgctcaacatcaccatgcccatgcatccatctcctacctacctctcaattgtactgtaatggagtatttattgatttatttatgctttgcttcgtcttc

SEQ ID NO: 12218 - protein, 376 aa, Zea mays subsp. mays
  peptide (1)..(376): Ceres Seq. ID no. 12376381
MPHAKTDSEVTSLAPSSPPRSPPRTRGAVYYVQSPSRDSHDGETIKAATSVHSTPALSPMASPRPLALPLPLVHGQGLLLQPILGPRPQQAQGRQGRQQQGRAGRQGVAGDRRHRGGRAHGRGGPHADRAPQVLLLPRLPARLRRALLLLRARALGRQQVPEAAHRHGHHPLRQLHHPGRHRRVARAHRHGHHQLHRQIHLPQQGHLLRDPRHRRPVPALLQPAHARVRRPPQLLPASQQQPHRQRRRGRQQGAAVRRRTHADGGAGGRGQGAAAGQRQGGIGAHGAEDHAALAGLRAGRAGQAQVHARRRVQGAHEPKQAEQAHLARERLPLLMIYLASHTSCSTSPCPCIHLLPTSQLYCNGVFIDLFMLCFVF

SEQ ID NO: 12219 - protein, 317 aa, Zea mays subsp. mays
  peptide (1)..(317): Ceres Seq. ID no. 12376382
MASPRPLALPLPLVHGQGLLLQPILGPRPQQAQGRQGRQQQGRAGRQGVAGDRRHRGGRAHGRGGPHADRAPQVLLLPRLPARLRRALLLLRARALGRQQVPEAAHRHGHHPLRQLHHPGRHRRVARAHRHGHHQLHRQIHLPQQGHLLRDPRHRRPVPALLQPAHARVRRPPQLLPASQQQPHRQRRRGRQQGAAVRRRTHADGGAGGRGQGAAAGQRQGGIGAHGAEDHAALAGLRAGRAGQAQVHARRRVQGAHEPKQAEQAHLARERLPLLMIYLASHTSCSTSPCPCIHLLPTSQLYCNGVFIDLFMLCFVF

SEQ ID NO: 12220 - protein, 261 aa, Zea mays subsp. mays
  peptide (1)..(261): Ceres Seq. ID no. 12376383
MGRDSSSSRFSGHGHNKRKADKGGSNKGAPGGKGWQEIGVIEEEGLMDEEDHTRIVPRKCYCFLAFLLGFVALFSFFALVLWGASRSQKPRIVMGTIRFDNFIIQAGTDASLVPTDMATTNSTVRFTYRNRGTFFGIHVTADPFQLSYSQLTLASGDLHNFYQPRSSSRTVSVAVVGNKVPLYGGGPTLTAAPAAGGKGQQQASAKVASVPMVLRTTLHSRAYVLGALVKPKFTLAVECRVLMNPNKQNKPISLGNACHYS

SEQ ID NO: 12221 - DNA, 1389 bp, Zea mays subsp. mays; identical to SEQ ID NO: 3569
  misc_feature (1)..(1389): Ceres Seq. ID no. 13498794
  misc_feature (1)..(1389): Ortholog of  Ceres SEQ ID NO 13654054 as cited in SEQ ID NO 67735
  misc_feature (1)..(1389): Ortholog of  Ceres SEQ ID NO 15180245 as cited in SEQ ID NO 0

SEQ ID NO: 12222 - protein, 254 aa, Zea mays subsp. mays; identical to SEQ ID NO: 3570
  peptide (1)..(254): Ceres Seq. ID no. 13498795

SEQ ID NO: 12223 - protein, 238 aa, Zea mays subsp. mays; identical to SEQ ID NO: 3571
  peptide (1)..(238): Ceres Seq. ID no. 13498796

SEQ ID NO: 12224 - protein, 235 aa, Zea mays subsp. mays; identical to SEQ ID NO: 3572
  peptide (1)..(235): Ceres Seq. ID no. 13498797

SEQ ID NO: 12225 - DNA, 1283 bp, Zea mays subsp. mays
  misc_feature (1)..(1283): Ceres Seq. ID no. 12348789
  misc_feature (1)..(1283): Ortholog of  Ceres SEQ ID NO 14309755 as cited in SEQ ID NO 20741
  misc_feature (1)..(1283): Ortholog of  Ceres SEQ ID NO 13638746 as cited in SEQ ID NO 59296
  misc_feature (1)..(1283): Ortholog of  Ceres SEQ ID NO 13596474 as cited in SEQ ID NO 62169
  misc_feature (1)..(1283): Ortholog of  Ceres SEQ ID NO 13598714 as cited in SEQ ID NO 62656
  misc_feature (1)..(1283): Ortholog of  Ceres SEQ ID NO 13596969 as cited in SEQ ID NO 63375
  misc_feature (1)..(1283): Ortholog of  Ceres SEQ ID NO 15225685 as cited in SEQ ID NO 63616
  misc_feature (1)..(1283): Ortholog of  Ceres SEQ ID NO 13597519 as cited in SEQ ID NO 64759
  misc_feature (1)..(1283): Ortholog of  Ceres SEQ ID NO 14302388 as cited in SEQ ID NO 65655
  misc_feature (1)..(1283): Ortholog of  Ceres SEQ ID NO 13595926 as cited in SEQ ID NO 67778
  misc_feature (1)..(1283): Ortholog of  Ceres SEQ ID NO 13587054 as cited in SEQ ID NO 0
atcgtacgtcgtgtcctgcagtggctcacattcgacgacacacagtagagggtagctagcagtggtgctcctggcctgtgacgatggtttcctcgtcgtcgtctccttccgccaccgccgccgccgccgccgccgtggtcctggcggtggccctgatgacgacgacgtgcttccatggcgcgacggcgcagctgtgcgaggactactatgacagcacctgcccggacgcctacgacatcgtgaaccaggtgctcgtcgacgcagtgcagtcggacacccgcatcttcgccagcctcatccgcctgcacttccacgactgcttcgtccagggctgcgacgcctcgcttctgctggacagcgtcccagggatgccgtcggagaagacgtcggcgcccaacaacggctcagcgcgcgggttcggggtggtggacgccgccaaggctgcgctggagagcgcctgccctggtgttgtctcctgcgctgacatcctcgccatcgccgcagagatctcagtcgagctgtcgggaggccccagctggggtgtgcttctgggcaggctggacagcaagacctccgacttcaacggatccctggacctcccagagcccaccgacaacctcaccatacttcagcagaagttcagcaacctcagcctcaacgatgtcgacctggtcgccctttcaggggggcacacgttcggccgggtccaatgcaagttcatcacggaccggctctacaacttcagcgggacgaacatgcccgacccgacgctggacgcctcctaccgggccttcctgacgcagaggtgccccaggaacggcgaccccacagccctgaacgacctggacccgacgaccccggacaccttcgacaacaactactacaccaacatcgaggtgaaccgaggcatcctcaactccgaccaggagctcaagtcgtcgcccctagcgcagggcaccacggcgcccatcgtcgaccagttcgcggccagccaagacgacttcttcgcgagcttcgcgcagtccatgatcaacatggggaacatcaagccgctcacggacccgtccagaggagaagtccgcaccaactgcagaagggtcaactgatccaattaagtcgatcggtcgtaattaatgtgtgcagagaaaacgacatgttcatcattggctggtcgatgtcatttggctagctgctcatcagggtgtgaagtttctgtatacacatgcagcatgcatgtatgtttcatgttttccaatccaactcaataaaatttgccaaagatt

SEQ ID NO: 12226 - protein, 340 aa, Zea mays subsp. mays
  peptide (1)..(340): Ceres Seq. ID no. 12348790
MVSSSSSPSATAAAAAAVVLAVALMTTTCFHGATAQLCEDYYDSTCPDAYDIVNQVLVDAVQSDTRIFASLIRLHFHDCFVQGCDASLLLDSVPGMPSEKTSAPNNGSARGFGVVDAAKAALESACPGVVSCADILAIAAEISVELSGGPSWGVLLGRLDSKTSDFNGSLDLPEPTDNLTILQQKFSNLSLNDVDLVALSGGHTFGRVQCKFITDRLYNFSGTNMPDPTLDASYRAFLTQRCPRNGDPTALNDLDPTTPDTFDNNYYTNIEVNRGILNSDQELKSSPLAQGTTAPIVDQFAASQDDFFASFAQSMINMGNIKPLTDPSRGEVRTNCRRVN

SEQ ID NO: 12227 - protein, 316 aa, Zea mays subsp. mays
  peptide (1)..(316): Ceres Seq. ID no. 12348791
MTTTCFHGATAQLCEDYYDSTCPDAYDIVNQVLVDAVQSDTRIFASLIRLHFHDCFVQGCDASLLLDSVPGMPSEKTSAPNNGSARGFGVVDAAKAALESACPGVVSCADILAIAAEISVELSGGPSWGVLLGRLDSKTSDFNGSLDLPEPTDNLTILQQKFSNLSLNDVDLVALSGGHTFGRVQCKFITDRLYNFSGTNMPDPTLDASYRAFLTQRCPRNGDPTALNDLDPTTPDTFDNNYYTNIEVNRGILNSDQELKSSPLAQGTTAPIVDQFAASQDDFFASFAQSMINMGNIKPLTDPSRGEVRTNCRRVN

SEQ ID NO: 12228 - protein, 245 aa, Zea mays subsp. mays
  peptide (1)..(245): Ceres Seq. ID no. 12348792
MPSEKTSAPNNGSARGFGVVDAAKAALESACPGVVSCADILAIAAEISVELSGGPSWGVLLGRLDSKTSDFNGSLDLPEPTDNLTILQQKFSNLSLNDVDLVALSGGHTFGRVQCKFITDRLYNFSGTNMPDPTLDASYRAFLTQRCPRNGDPTALNDLDPTTPDTFDNNYYTNIEVNRGILNSDQELKSSPLAQGTTAPIVDQFAASQDDFFASFAQSMINMGNIKPLTDPSRGEVRTNCRRVN

SEQ ID NO: 12229 - DNA, 924 bp, Zea mays subsp. mays
  misc_feature (1)..(924): Ceres Seq. ID no. 12413613
  misc_feature (1)..(924): Ortholog of  Ceres SEQ ID NO 12592832 as cited in SEQ ID NO 62031
aaaaaactgccactccactcctaccccacacagaagcggcggcggcggagcaaacgcaggcgaaggcgagggtgtgagggaaggagcaccagccatggtgcacgtcaacttctaccgcaactatggtaagacgttcaagaaaccaaggcgtccttatgagaaggagcgtcttgatgctgaactgaagctggtcggtgagtatgggctgaggtgcaagcgtgagctttggagggtccagtatgcactgagcaggatccgtaatgctgcaaggcacttgctcacccttgacgagaagaacccccgtcgtatctttgagggtgaggcgcttcttcgccgcatgaaccgctatgggctgcttgctgagggtcagaacaagcttgattatgttcttgccctcaccgctgagaacttcctcgcaaggcggcttcaaacacttgtcttcaaggctggcatggccaagtccattcaccatgctcgtgtcttgatcaagcagcgtcacatcagggttggcaggcaaattgtcaacgtcccatcattcatggtgagggtggagtctgagaagcacattgacttttcactgtcaagcccattcggtggaggccccgcaggaagggtgaagagaaagaatcagaagaaggcaagcggtggcggcgatgctggcgatgaggatgaggagtgaggatggacaagtagcgttacccaatataataatattatctagttttcttgaacttgttcgaatgatgagtgcttagctgtgtgatctgacgcagagttccctgtgctgactctgtgtcatggatggtccattttatcttatggtattatcagcctttacataactgctatgtttggatatgttcaattctgttgcaattttatgtggttgttttttgcgttttgttgctattaagctgttctttc

SEQ ID NO: 12230 - protein, 225 aa, Zea mays subsp. mays
  peptide (1)..(225): Ceres Seq. ID no. 12413614
KNCHSTPTPHRSGGGGANAGEGEGVREGAPAMVHVNFYRNYGKTFKKPRRPYEKERLDAELKLVGEYGLRCKRELWRVQYALSRIRNAARHLLTLDEKNPRRIFEGEALLRRMNRYGLLAEGQNKLDYVLALTAENFLARRLQTLVFKAGMAKSIHHARVLIKQRHIRVGRQIVNVPSFMVRVESEKHIDFSLSSPFGGGPAGRVKRKNQKKASGGGDAGDEDEE

SEQ ID NO: 12231 - protein, 194 aa, Zea mays subsp. mays
  peptide (1)..(194): Ceres Seq. ID no. 12413615
MVHVNFYRNYGKTFKKPRRPYEKERLDAELKLVGEYGLRCKRELWRVQYALSRIRNAARHLLTLDEKNPRRIFEGEALLRRMNRYGLLAEGQNKLDYVLALTAENFLARRLQTLVFKAGMAKSIHHARVLIKQRHIRVGRQIVNVPSFMVRVESEKHIDFSLSSPFGGGPAGRVKRKNQKKASGGGDAGDEDEE

SEQ ID NO: 12232 - protein, 113 aa, Zea mays subsp. mays
  peptide (1)..(113): Ceres Seq. ID no. 12413616
MNRYGLLAEGQNKLDYVLALTAENFLARRLQTLVFKAGMAKSIHHARVLIKQRHIRVGRQIVNVPSFMVRVESEKHIDFSLSSPFGGGPAGRVKRKNQKKASGGGDAGDEDEE

SEQ ID NO: 12233 - DNA, 935 bp, Zea mays subsp. mays
  misc_feature (1)..(935): Ceres Seq. ID no. 12342362
  misc_feature (1)..(935): Ortholog of  Ceres SEQ ID NO 13654142 as cited in SEQ ID NO 68310
gaggaagggaaggtggtggtgctgaactactccttgatggccaatttcgtgatggtttatgggtatgttcctggggcacagtctgaggtttgccggttgtgcttggagttgccggggctggagcctctactttatctggatggcgatcagctgaatggagtgcatgagaagggagttcatgatctgtggagagtgctgaaggatgagatttgcctgccactgatgatatcattgtgccaactgaacggtctgcgcttgccgccttgcttgatggctttgcctgctgatctcaagactaaggtattggggtttttacctggggttgatcttgcaaaggttgagtgcacatgcaaggaaatgatgaatcttgcatcagatgatagtatctggaagaagcttgtatccaagtttgaaaattatggcgagggctctaggctggcaggcaagaatgcaaaggccatatttgtagaagcttggcaggccaataagagacggcagaagaggcccaatccaaccttttggaactatggctggggaaacagtccttatagccgcccacttaggctgccattgattggtggggactcggacagacttccttttattgggaatcatggttctgttgggcgccactttggaaatcaacgaaggaatatctcaccgaactgcattcttgatggtcaccgtcataacttcctttgaagccatgtcaatgagttttacttgtatgttaagagtgttttataaggacttcaatggtgcatatacggttagaccgccttgttcatatcgtcaagtcgcacacttatgcttgtgcacagcactcttatgatcttatcctaatatatccccttagtatcttagatcgtatctttactatctttttttggtaccaaatgtaatccagtgtcctagtaataaagtacccttgttct

SEQ ID NO: 12234 - protein, 233 aa, Zea mays subsp. mays
  peptide (1)..(233): Ceres Seq. ID no. 12342363
EEGKVVVLNYSLMANFVMVYGYVPGAQSEVCRLCLELPGLEPLLYLDGDQLNGVHEKGVHDLWRVLKDEICLPLMISLCQLNGLRLPPCLMALPADLKTKVLGFLPGVDLAKVECTCKEMMNLASDDSIWKKLVSKFENYGEGSRLAGKNAKAIFVEAWQANKRRQKRPNPTFWNYGWGNSPYSRPLRLPLIGGDSDRLPFIGNHGSVGRHFGNQRRNISPNCILDGHRHNFL

SEQ ID NO: 12235 - protein, 221 aa, Zea mays subsp. mays
  peptide (1)..(221): Ceres Seq. ID no. 12342364
MANFVMVYGYVPGAQSEVCRLCLELPGLEPLLYLDGDQLNGVHEKGVHDLWRVLKDEICLPLMISLCQLNGLRLPPCLMALPADLKTKVLGFLPGVDLAKVECTCKEMMNLASDDSIWKKLVSKFENYGEGSRLAGKNAKAIFVEAWQANKRRQKRPNPTFWNYGWGNSPYSRPLRLPLIGGDSDRLPFIGNHGSVGRHFGNQRRNISPNCILDGHRHNFL

SEQ ID NO: 12236 - protein, 216 aa, Zea mays subsp. mays
  peptide (1)..(216): Ceres Seq. ID no. 12342365
MVYGYVPGAQSEVCRLCLELPGLEPLLYLDGDQLNGVHEKGVHDLWRVLKDEICLPLMISLCQLNGLRLPPCLMALPADLKTKVLGFLPGVDLAKVECTCKEMMNLASDDSIWKKLVSKFENYGEGSRLAGKNAKAIFVEAWQANKRRQKRPNPTFWNYGWGNSPYSRPLRLPLIGGDSDRLPFIGNHGSVGRHFGNQRRNISPNCILDGHRHNFL

SEQ ID NO: 12237 - DNA, 1191 bp, Zea mays subsp. mays
  misc_feature (1)..(1191): Ceres Seq. ID no. 12411600
  misc_feature (1)..(1191): Ortholog of  Ceres SEQ ID NO 14304124 as cited in SEQ ID NO 56378
  misc_feature (1)..(1191): Ortholog of  Ceres SEQ ID NO 12585331 as cited in SEQ ID NO 62912
  misc_feature (1)..(1191): Ortholog of  Ceres SEQ ID NO 13654964 as cited in SEQ ID NO 63176
gtccaaaaaggaggcgccgcgctcctcttcttctacgccgttcactctctctagtctctcccttcccttctccacgcctccgcccccactcgtgagactctacctagccctagcgccagcaccacccgcccaacctcccggagagagagagagagaggaggaggccttcgccgccgccgttgccgtcggccgagacgccaggatgttcgggtaccagaagggcctcgatgtcgaggcggggacatcgggcgccgccgccacgggcggcgcgcgccagctctacccggggatgcaggagagccccgagctgcgctgggcgctcatccgcaagatctacgtcattctctccctccagctgctcctcaccgccgtcgtcgccgcagtcgtcgtcaaggtccgcgccatcccgcacttcttcaccaccaccagcgccggcctcggcctctacatcttcctcatcatcctcccctttatcgtgctgtgcccgttgtacttctaccacgagaagcacccagtcaacctgatcctgctcggcctcttcaccgttgccatcagctttgctgtgggcatgacatgtgccttcaccagtggcaaggtcattctggagtctgcaattctgacaacagtggtcgtgctcagccttaccgcatacactttctgggccgtgaataggggcaaagacttcagcttcctgggtcctttcctgttcgccgccctcatagtgctgcttgtgttcgcactcatccagatcctgttcccactgggcaagctctcccagatgatctacggcgggctggcgtcgctcatcttcagcgggtacatcgtctacgacacaaacaacatcatcaggcgctacacgtacgaccagtacgtctgggccgcagtctccctgtacctggacgttatcaacctcttcctgtccctgatgaccctcttcagggcagccgactaggcgctctgctctcatcctgtctatctacgagtcggtgcctgaatgctcccgtggttaagctccggtacccagaattccagttccaagaatagagttgtatatagctacctgtgttgcctttctactagtatggttttattcgacttggctcggttcgatcagagtctttatacgtagttggatcgcgaacaaatgaacctgcatgggattatggagagccatctgctttatgatcctcg

SEQ ID NO: 12238 - protein, 316 aa, Zea mays subsp. mays
  peptide (1)..(316): Ceres Seq. ID no. 12411601
SKKEAPRSSSSTPFTLSSLSLPFSTPPPPLVRLYLALAPAPPAQPPGEREREEEAFAAAVAVGRDARMFGYQKGLDVEAGTSGAAATGGARQLYPGMQESPELRWALIRKIYVILSLQLLLTAVVAAVVVKVRAIPHFFTTTSAGLGLYIFLIILPFIVLCPLYFYHEKHPVNLILLGLFTVAISFAVGMTCAFTSGKVILESAILTTVVVLSLTAYTFWAVNRGKDFSFLGPFLFAALIVLLVFALIQILFPLGKLSQMIYGGLASLIFSGYIVYDTNNIIRRYTYDQYVWAAVSLYLDVINLFLSLMTLFRAAD

SEQ ID NO: 12239 - protein, 249 aa, Zea mays subsp. mays
  peptide (1)..(249): Ceres Seq. ID no. 12411602
MFGYQKGLDVEAGTSGAAATGGARQLYPGMQESPELRWALIRKIYVILSLQLLLTAVVAAVVVKVRAIPHFFTTTSAGLGLYIFLIILPFIVLCPLYFYHEKHPVNLILLGLFTVAISFAVGMTCAFTSGKVILESAILTTVVVLSLTAYTFWAVNRGKDFSFLGPFLFAALIVLLVFALIQILFPLGKLSQMIYGGLASLIFSGYIVYDTNNIIRRYTYDQYVWAAVSLYLDVINLFLSLMTLFRAAD

SEQ ID NO: 12240 - protein, 220 aa, Zea mays subsp. mays
  peptide (1)..(220): Ceres Seq. ID no. 12411603
MQESPELRWALIRKIYVILSLQLLLTAVVAAVVVKVRAIPHFFTTTSAGLGLYIFLIILPFIVLCPLYFYHEKHPVNLILLGLFTVAISFAVGMTCAFTSGKVILESAILTTVVVLSLTAYTFWAVNRGKDFSFLGPFLFAALIVLLVFALIQILFPLGKLSQMIYGGLASLIFSGYIVYDTNNIIRRYTYDQYVWAAVSLYLDVINLFLSLMTLFRAAD

SEQ ID NO: 12241 - DNA, 1256 bp, Zea mays subsp. mays
  misc_feature (1)..(1256): Ceres Seq. ID no. 12411597
  misc_feature (1)..(1256): Ortholog of  Ceres SEQ ID NO 15170760 as cited in SEQ ID NO 52747
  misc_feature (1)..(1256): Ortholog of  Ceres SEQ ID NO 15168549 as cited in SEQ ID NO 56976
  misc_feature (1)..(1256): Ortholog of  Ceres SEQ ID NO 14314335 as cited in SEQ ID NO 57305
  misc_feature (1)..(1256): Ortholog of  Ceres SEQ ID NO 15177588 as cited in SEQ ID NO 60367
atctccggcctcacaccgcaaccgcaagcaagcgaagcgcagagcctgcctgaccagagctagctgagctacagccaacagcagctggtctgactgacatggcgaaggacatcgaggcatcggggcccgaggcgggcgagttctcggccaaggactacaccgaccctccgccggcgccgctgatcgacgcggaggagctcacccagtggtcactgtaccgcgcggtcatcgccgagttcatcgccacgctgctcttcctctacatcaccgtggccaccgtgatcgggtacaagcaccagacggacgcgtcggcgtcgggccccgacgcggcgtgcggcggcgtcggcatcctcggcatcgcttgggccttcggcggcatgatcttcatcctcgtctactgcaccgccggcatctcaggtgggcacatcaacccggccgtgaccttcggcctgttcctggccaggaaggtgtccctcgtccgcgcgctgctctacatcatcgcgcagtgcctgggcgccatctgcggcgtgggcctcgtcaagggcttccagagcgcctactacgtgcgctacggcggcggcgccaacgagctcagcgacggctactccaagggcaccggcctcgccgccgagatcatcggcacgttcgtgctcgtctacaccgtcttctccgccaccgaccccaagcgcagtgcccgtgactcccacgttccggtgctagctcctctcccaattgggttcgccgtgttcatggtgcacctggccaccatccccatcaccggcaccggcatcaacccggcgaggagcctgggagccgcggtcatctacaacaaggacaaggcctgggacgaccaatggatcttctgggtgggcccactgattggcgccgccatcgccgccgcctaccaccagtacgtgctgagggccagcgccaccaagctcgggtcctaccggagcaacgcctaagttccgcccggacgcgccaggagctgggcaccgttccgattctgttcctccacatgacgccctgttctgtttccgtgtggccaggactccgctcgctcgctgctgttttctacttcggaccaaagtgtgacatatctttgctttctgtatatgtatgtaggaatgcatcatgtaaggagaatttggaatacaattgcgtgagtttttatccgatcacaatctattgagtagtggcatataaaaaatgtcctgccctttctttaaacgaatgaaagtaaagaaaagaacctc

SEQ ID NO: 12242 - protein, 288 aa, Zea mays subsp. mays
  peptide (1)..(288): Ceres Seq. ID no. 12411598
MAKDIEASGPEAGEFSAKDYTDPPPAPLIDAEELTQWSLYRAVIAEFIATLLFLYITVATVIGYKHQTDASASGPDAACGGVGILGIAWAFGGMIFILVYCTAGISGGHINPAVTFGLFLARKVSLVRALLYIIAQCLGAICGVGLVKGFQSAYYVRYGGGANELSDGYSKGTGLAAEIIGTFVLVYTVFSATDPKRSARDSHVPVLAPLPIGFAVFMVHLATIPITGTGINPARSLGAAVIYNKDKAWDDQWIFWVGPLIGAAIAAAYHQYVLRASATKLGSYRSNA

SEQ ID NO: 12243 - protein, 195 aa, Zea mays subsp. mays
  peptide (1)..(195): Ceres Seq. ID no. 12411599
MIFILVYCTAGISGGHINPAVTFGLFLARKVSLVRALLYIIAQCLGAICGVGLVKGFQSAYYVRYGGGANELSDGYSKGTGLAAEIIGTFVLVYTVFSATDPKRSARDSHVPVLAPLPIGFAVFMVHLATIPITGTGINPARSLGAAVIYNKDKAWDDQWIFWVGPLIGAAIAAAYHQYVLRASATKLGSYRSNA

SEQ ID NO: 12244 - DNA, 1305 bp, Zea mays subsp. mays
  misc_feature (1)..(1305): Ceres Seq. ID no. 12411593
  misc_feature (1)..(1305): Ortholog of  Ceres SEQ ID NO 14311579 as cited in SEQ ID NO 51717
gtcatcgattcagagctcacgagtcacgatccaaatcccttttccactccgccggacgtcgagagaggcggtgggtgcgggacgcgaaggcgaagccctagccccctccctgccgcggacgccgatggacccacctcgcgccgtcgcctttcttctcatactcctgcccgtgctcgccccggtggcctccggtgtacctttcgtcgtcctacacgggattggcgacgagtgcgggaacgatgggctgtcatccttcaccaagatgcttggggagtggtcaggctccaagggttactgcattgaaattggaagaggagcatgggactcttggttaatgccacttcaagagcaggcaaatacggtttgtaagaaggtcaagaaaatgaaagagctcagtgaaggttacaatatagttggcctgtctcaggggaacttaattggcagggctgtaatcgagtactgtgattgtggacctccggtcaagaatttcatatcaattgggggtcctcatgctggtacagcttcagtgccactttgtggttctgggtttctttgtattcttattgatgatctgattaaatcagagatatattcagactatgtgcaggcgcatcttgcccctagtggttacctaaagatacccactgatatggaagattatttgaagggttgcaaatttcttccaaaacttaacaatgagatcccaagtgcaagaaatactacctataaagaaagattcagcagcttggaaaacttggtactgatcatgtttgaggacgatgcagtattaatacctcgggaaacagcgtggtttggttattaccctgatggagcctttagcccagtgctgccccctcaagagacgaagctgtatacagaagattggattggcttgaagaccctggacgaggctgggcgtgttaaattcgtgtctgtgccaggaggtcacctgcgtatcaccagaagcgacatgaagaagtacattgtgccttacttgacgccggaggcgtcatccaagaagaacatacacatacaccggatgctgtcgctttgagcgagtatctaacaaggtttgtatcggtggccattgtgccctgacacgtgggccatgtgttgacgccttgtaaatacgctgaacacgaagggaggaaatgatagctccttggaagagtggatccgaacttgtgaagtgaagcgtgtttggtcctttccgtttcctatctgacaaacaaatatgtccatgccgtggccacaacacgcataaatcattatgcacatttcctattgagtaaaatacaattccgg

SEQ ID NO: 12245 - protein, 350 aa, Zea mays subsp. mays
  peptide (1)..(350): Ceres Seq. ID no. 12411594
SSIQSSRVTIQIPFPLRRTSREAVGAGREGEALAPSLPRTPMDPPRAVAFLLILLPVLAPVASGVPFVVLHGIGDECGNDGLSSFTKMLGEWSGSKGYCIEIGRGAWDSWLMPLQEQANTVCKKVKKMKELSEGYNIVGLSQGNLIGRAVIEYCDCGPPVKNFISIGGPHAGTASVPLCGSGFLCILIDDLIKSEIYSDYVQAHLAPSGYLKIPTDMEDYLKGCKFLPKLNNEIPSARNTTYKERFSSLENLVLIMFEDDAVLIPRETAWFGYYPDGAFSPVLPPQETKLYTEDWIGLKTLDEAGRVKFVSVPGGHLRITRSDMKKYIVPYLTPEASSKKNIHIHRMLSL

SEQ ID NO: 12246 - protein, 309 aa, Zea mays subsp. mays
  peptide (1)..(309): Ceres Seq. ID no. 12411595
MDPPRAVAFLLILLPVLAPVASGVPFVVLHGIGDECGNDGLSSFTKMLGEWSGSKGYCIEIGRGAWDSWLMPLQEQANTVCKKVKKMKELSEGYNIVGLSQGNLIGRAVIEYCDCGPPVKNFISIGGPHAGTASVPLCGSGFLCILIDDLIKSEIYSDYVQAHLAPSGYLKIPTDMEDYLKGCKFLPKLNNEIPSARNTTYKERFSSLENLVLIMFEDDAVLIPRETAWFGYYPDGAFSPVLPPQETKLYTEDWIGLKTLDEAGRVKFVSVPGGHLRITRSDMKKYIVPYLTPEASSKKNIHIHRMLSL

SEQ ID NO: 12247 - protein, 263 aa, Zea mays subsp. mays
  peptide (1)..(263): Ceres Seq. ID no. 12411596
MLGEWSGSKGYCIEIGRGAWDSWLMPLQEQANTVCKKVKKMKELSEGYNIVGLSQGNLIGRAVIEYCDCGPPVKNFISIGGPHAGTASVPLCGSGFLCILIDDLIKSEIYSDYVQAHLAPSGYLKIPTDMEDYLKGCKFLPKLNNEIPSARNTTYKERFSSLENLVLIMFEDDAVLIPRETAWFGYYPDGAFSPVLPPQETKLYTEDWIGLKTLDEAGRVKFVSVPGGHLRITRSDMKKYIVPYLTPEASSKKNIHIHRMLSL

SEQ ID NO: 12248 - DNA, 1666 bp, Zea mays subsp. mays
  misc_feature (1)..(1666): Ceres Seq. ID no. 12341194
  misc_feature (1)..(1666): Ortholog of  Ceres SEQ ID NO 13595201 as cited in SEQ ID NO 56606
gtccatccccgtcgccagcatcgcttccacttcggtctcagcgacggtcgccaccaccgctcccctccctctccccctcctcgcccagcggcaattaccacagcctccccagcaagccgggatggctgcactcaaggcatcgttccggggtgagctcagcgccgcttccttcctcgactccagcaggggacctctcgtccagcacaaagtggattttacgtttcaaaggaagggcaaacgagctatttcactgagaaggacatgctgttctatgcaacaggctccaccaccagcatggcctgggcgagctgttgctgagcctggccggaggtcatgggatggcccaaagcctatctcgattgttggttcaactggttccataggaacacagacattggacattgttgcggagaatcctgataagttcagagttgttgctcttgctgctggatccaatgtcacgcttctagctgatcaggtcaaaacattcaaacctaagttggttgctgtaagaaacgaatcattagttgatgaattgaaagaagccttggctgattgcgaagagaagccagaaattattcctggggagcaaggtgtcatagaagttgctcgccatccagatgcagttacagttgtcacagggatagtaggttgtgcagggctgaagcctacagttgctgcaattgaagctggtaaagacatagcattggcaaacaaagagacacttattgcaggtggtccttttgtgcttccccttgcacacaaacacaaagtgaaaattcttccagctgattctgagcactctgcaatatttcagtgtatacaaggcttgtccgaaggtgcacttcgtcgcattattctaactgcatcaggtggtgctttcagggactggccagttgacaggctgaaagatgtaaaagttgctgacgctttaaagcatccaaactggaatatgggaaggaagatcacagtagattctgctactttattcaacaagggtttagaagttattgaagcacattatttatttggtgctgaatatgatgacattgagattgtgattcacccacagtctatcatacactctatggttgaaacccaggattcatctgtcctagctcagttgggatggccagatatgcggttaccaatcttatacaccttatcatggccagatagaatctattgctctgaggtcacctggccccgtctggatctttgcaagttgggttcactgacattcagagctccagacaacgtaaaatacccatcaatggacctagcctatgcagctggccgcgctgggggcaccatgacaggagtcctgagcgctgctaatgagaaggccgtggagttgttcattgacgagaagattagctacctggacatattcaaggtggtggagcttacatgtaacgcgcatcggaacgagctggtaacaagcccgtcactggaggagatcgtccattacgatctgtgggcgaggagatatgcagccagtctacaaccatcttctggcctgagccctgtccctgcataataggtcgtcacgacaacgttgtacagcaggagttctaagatatgatgtgtttgtggctcctgtttccatgttcaattttcaggcctccacatgaataaaatgcatctattccatgtgatttctttt

SEQ ID NO: 12249 - protein, 512 aa, Zea mays subsp. mays
  peptide (1)..(512): Ceres Seq. ID no. 12341195
SIPVASIASTSVSATVATTAPLPLPLLAQRQLPQPPQQAGMAALKASFRGELSAASFLDSSRGPLVQHKVDFTFQRKGKRAISLRRTCCSMQQAPPPAWPGRAVAEPGRRSWDGPKPISIVGSTGSIGTQTLDIVAENPDKFRVVALAAGSNVTLLADQVKTFKPKLVAVRNESLVDELKEALADCEEKPEIIPGEQGVIEVARHPDAVTVVTGIVGCAGLKPTVAAIEAGKDIALANKETLIAGGPFVLPLAHKHKVKILPADSEHSAIFQCIQGLSEGALRRIILTASGGAFRDWPVDRLKDVKVADALKHPNWNMGRKITVDSATLFNKGLEVIEAHYLFGAEYDDIEIVIHPQSIIHSMVETQDSSVLAQLGWPDMRLPILYTLSWPDRIYCSEVTWPRLDLCKLGSLTFRAPDNVKYPSMDLAYAAGRAGGTMTGVLSAANEKAVELFIDEKISYLDIFKVVELTCNAHRNELVTSPSLEEIVHYDLWARRYAASLQPSSGLSPVPA

SEQ ID NO: 12250 - protein, 472 aa, Zea mays subsp. mays
  peptide (1)..(472): Ceres Seq. ID no. 12341196
MAALKASFRGELSAASFLDSSRGPLVQHKVDFTFQRKGKRAISLRRTCCSMQQAPPPAWPGRAVAEPGRRSWDGPKPISIVGSTGSIGTQTLDIVAENPDKFRVVALAAGSNVTLLADQVKTFKPKLVAVRNESLVDELKEALADCEEKPEIIPGEQGVIEVARHPDAVTVVTGIVGCAGLKPTVAAIEAGKDIALANKETLIAGGPFVLPLAHKHKVKILPADSEHSAIFQCIQGLSEGALRRIILTASGGAFRDWPVDRLKDVKVADALKHPNWNMGRKITVDSATLFNKGLEVIEAHYLFGAEYDDIEIVIHPQSIIHSMVETQDSSVLAQLGWPDMRLPILYTLSWPDRIYCSEVTWPRLDLCKLGSLTFRAPDNVKYPSMDLAYAAGRAGGTMTGVLSAANEKAVELFIDEKISYLDIFKVVELTCNAHRNELVTSPSLEEIVHYDLWARRYAASLQPSSGLSPVPA

SEQ ID NO: 12251 - protein, 422 aa, Zea mays subsp. mays
  peptide (1)..(422): Ceres Seq. ID no. 12341197
MQQAPPPAWPGRAVAEPGRRSWDGPKPISIVGSTGSIGTQTLDIVAENPDKFRVVALAAGSNVTLLADQVKTFKPKLVAVRNESLVDELKEALADCEEKPEIIPGEQGVIEVARHPDAVTVVTGIVGCAGLKPTVAAIEAGKDIALANKETLIAGGPFVLPLAHKHKVKILPADSEHSAIFQCIQGLSEGALRRIILTASGGAFRDWPVDRLKDVKVADALKHPNWNMGRKITVDSATLFNKGLEVIEAHYLFGAEYDDIEIVIHPQSIIHSMVETQDSSVLAQLGWPDMRLPILYTLSWPDRIYCSEVTWPRLDLCKLGSLTFRAPDNVKYPSMDLAYAAGRAGGTMTGVLSAANEKAVELFIDEKISYLDIFKVVELTCNAHRNELVTSPSLEEIVHYDLWARRYAASLQPSSGLSPVPA

SEQ ID NO: 12252 - DNA, 1347 bp, Zea mays subsp. mays
  misc_feature (1)..(1347): Ceres Seq. ID no. 12411590
  misc_feature (1)..(1347): Ortholog of  Ceres SEQ ID NO 13594727 as cited in SEQ ID NO 52169
  misc_feature (1)..(1347): Ortholog of  Ceres SEQ ID NO 14301430 as cited in SEQ ID NO 56553
  misc_feature (1)..(1347): Ortholog of  Ceres SEQ ID NO 13596474 as cited in SEQ ID NO 62169
  misc_feature (1)..(1347): Ortholog of  Ceres SEQ ID NO 13597519 as cited in SEQ ID NO 64759
  misc_feature (1)..(1347): Ortholog of  Ceres SEQ ID NO 13597870 as cited in SEQ ID NO 64982
  misc_feature (1)..(1347): Ortholog of  Ceres SEQ ID NO 13662323 as cited in SEQ ID NO 68305
atcatagtgcctgttcctgagccagcagcatctgtctcttgcttcatcagctaggcgcccggccgcgcggaccaggctccaggagaccaaaaatgaagctctcggtggcagtcctctgcgcgcttctggctgtccaggcggcggtgctcctcgccaccgtgccgacgtcgcaggccagcgagctggaggtcgggtactacagcaagaaatgcaagggcgtggagaacgtggtgaagtggcacgtgatcaaggcgctcaaggccagccgccgcaccggcgccgctctcgtccgccttctcttccatgactgcttcgtcaggggatgcgatggttctgtcctcctggacgcttcctacgacaaccctcatccggagaaggaggcgccggtgaacatcggcctcgccgccttcgacctcctggaggagatcaaggccgctgtcgagaagaggtgccccggcgtcgtctcctgctcggacatcctcatctacgcggcccgcgacgcggccagcgtcctcagcaacggccacgtccacttcgccgtccccgccggccgcctggacggcttcgtctccaaggccgaggaggcccaggcggagctcccggactccaaccaagacgtgcagcagctcatcgacaacttcgccaggaagaacttcacggtggaggagctcgtcatcctcaccggggcgcactccatcggccagggccactgctcgtccttcaccggccgcctctccgagccatcgcagcagatcaccccggcgtaccgcgacctgctcaactacaagtgctcccaggggtccaacccgcccgtggacaacaacgtccgcgacgaggactacgacgtggtggcgaggttcatgccggggttcaccagccgggtgcgcaagatccccgacttcctggacaactccttctaccacaacaacctggccaagatcgtcaccttccactccgactggacgctgctcacgcacaaggaggcgttcggccacgtcgtggagtacgccgagaacgccacgctatgggacgaggacttctcggactcgctgctcaagctcagcaagctgcccatgcccaaaggaagcaagggagagatcaggaagaagtgcagcgtcgttaaccaccgcttatactaagcctgccagatgccgtggaaatcgaagaaagaggtcgtgccagcacaacacatatatatcaaccatcggagatcagaaagccataaggttgcgcttttttgtttcatccattcttttgattatcattcgtttgtgctacactcatctttttgtgtatttctcatgcatatctgtcaaactgcaataaaactttgttcctgatatgtgc

SEQ ID NO: 12253 - protein, 348 aa, Zea mays subsp. mays
  peptide (1)..(348): Ceres Seq. ID no. 12411591
MKLSVAVLCALLAVQAAVLLATVPTSQASELEVGYYSKKCKGVENVVKWHVIKALKASRRTGAALVRLLFHDCFVRGCDGSVLLDASYDNPHPEKEAPVNIGLAAFDLLEEIKAAVEKRCPGVVSCSDILIYAARDAASVLSNGHVHFAVPAGRLDGFVSKAEEAQAELPDSNQDVQQLIDNFARKNFTVEELVILTGAHSIGQGHCSSFTGRLSEPSQQITPAYRDLLNYKCSQGSNPPVDNNVRDEDYDVVARFMPGFTSRVRKIPDFLDNSFYHNNLAKIVTFHSDWTLLTHKEAFGHVVEYAENATLWDEDFSDSLLKLSKLPMPKGSKGEIRKKCSVVNHRLY

SEQ ID NO: 12254 - protein, 266 aa, Zea mays subsp. mays
  peptide (1)..(266): Ceres Seq. ID no. 12411592
MRWFCPPGRFLRQPSSGEGGAGEHRPRRLRPPGGDQGRCREEVPRRRLLLGHPHLRGPRRGQRPQQRPRPLRRPRRPPGRLRLQGRGGPGGAPGLQPRRAAAHRQLRQEELHGGGARHPHRGALHRPGPLLVLHRPPLRAIAADHPGVPRPAQLQVLPGVQPARGQQRPRRGLRRGGEVHAGVHQPGAQDPRLPGQLLLPQQPGQDRHLPLRLDAAHAQGGVRPRRGVRRERHAMGRGLLGLAAQAQQAAHAQRKQGRDQEEVQRR

SEQ ID NO: 12255 - DNA, 1620 bp, Zea mays subsp. mays
  misc_feature (1)..(1620): Ceres Seq. ID no. 12351756
  misc_feature (1)..(1620): Ortholog of  Ceres SEQ ID NO 12617911 as cited in SEQ ID NO 65464
ctagactgtagcccttaatcgaaaccgtccccaacccttcttcctccacgctctcgtctccgccgcgctaggaacttccaactcccaagcccagccgcctgcctagggttaaggtcgcccctccgccccctcgctccgctcgtgaccggcagggttcgtcgccgccgttggatatgtcgcggacgctggtgcagccggtggggcagaagcgcctcaccaacgtggctgtggtgcggctgcgcaagcacggccagcgcttcgagatcgcctgcttcccaaacaaggtgctctcgtggcgctcccgcgtcgagaaggacatcgacgaggtgctccagtcccacaccgtctactccaacgtctccaagggcatcctcgccaactccaaggaactcgccaaggccttcggcaccgacgaccttacccaaatctgcatcgagattctggagaaaggggaactccaggtctccggcaaggagagggaggcgcagctctccagccagttccgcgacatcgcaactattgtcatggagaagaccatcaacccagagacccgccgcccctacaccatcaccatgatcgagcgcctcatgcacgagatacacttcgccgtcgacccaaacctcacctccaaggaacaggctctaaaagttatcaagaagctcacagagcatttccccataaagcgtgcaccgctaagggtgcggttcactgcaccaaaacccaattttccaggccttacggagaagattggcggatggaatgctaccataatttcaaaggatgaattgagcactcagccttctattgtatgcgagatcgagccatctcttctgcgctcatgtgaggagcggttgaaggatgtccaagggagggtcgaagtgctgtctgtctccacgcacgtagaaagtggcccatctgtggaacaacacaacagtgtggaagtgccacacgcggctcctgtaaaggaacctgatgctgttgctcagataagtgagaccatgcagaaacagagcatttctactgaaagccagggcaatgcacaaggcaagcaacagagaaggtgcaaggagtgtgatgtactcgtggaggacaagctttacagagagcactgcaagagtgggtggcacaaacacaactacacacgccacaagaatgggctcccgcctctcagccaagaggagtgtatggtggagatggaattggccgactccaagaaagaccttaaagactacgatttctgatgaggttacctggaagttcctttgacatgctatcttgtatttgggcactaatgttgtctgtctaatgcttttctaccacccaatcttatccaggatggttaacaaggggtgcacagggcatgaagttgtttccaatccgtttttattttaacgaggaagtgaggagtgaggcacatggtcgttttctgatgctgtataggaattattagaatgagatggtttagccacatctttgaactgagggtagaacctgtctgtctgtggattgctttggctttgtatcgtggacgagtgaacttggtagtggcattccaaattcgacattctatgcgggctagaaacttcgcttgttttaatacttatcggcatcctttctttt

SEQ ID NO: 12256 - protein, 355 aa, Zea mays subsp. mays
  peptide (1)..(355): Ceres Seq. ID no. 12351757
MSRTLVQPVGQKRLTNVAVVRLRKHGQRFEIACFPNKVLSWRSRVEKDIDEVLQSHTVYSNVSKGILANSKELAKAFGTDDLTQICIEILEKGELQVSGKEREAQLSSQFRDIATIVMEKTINPETRRPYTITMIERLMHEIHFAVDPNLTSKEQALKVIKKLTEHFPIKRAPLRVRFTAPKPNFPGLTEKIGGWNATIISKDELSTQPSIVCEIEPSLLRSCEERLKDVQGRVEVLSVSTHVESGPSVEQHNSVEVPHAAPVKEPDAVAQISETMQKQSISTESQGNAQGKQQRRCKECDVLVEDKLYREHCKSGWHKHNYTRHKNGLPPLSQEECMVEMELADSKKDLKDYDF

SEQ ID NO: 12257 - protein, 238 aa, Zea mays subsp. mays
  peptide (1)..(238): Ceres Seq. ID no. 12351758
MEKTINPETRRPYTITMIERLMHEIHFAVDPNLTSKEQALKVIKKLTEHFPIKRAPLRVRFTAPKPNFPGLTEKIGGWNATIISKDELSTQPSIVCEIEPSLLRSCEERLKDVQGRVEVLSVSTHVESGPSVEQHNSVEVPHAAPVKEPDAVAQISETMQKQSISTESQGNAQGKQQRRCKECDVLVEDKLYREHCKSGWHKHNYTRHKNGLPPLSQEECMVEMELADSKKDLKDYDF

SEQ ID NO: 12258 - protein, 222 aa, Zea mays subsp. mays
  peptide (1)..(222): Ceres Seq. ID no. 12351759
MIERLMHEIHFAVDPNLTSKEQALKVIKKLTEHFPIKRAPLRVRFTAPKPNFPGLTEKIGGWNATIISKDELSTQPSIVCEIEPSLLRSCEERLKDVQGRVEVLSVSTHVESGPSVEQHNSVEVPHAAPVKEPDAVAQISETMQKQSISTESQGNAQGKQQRRCKECDVLVEDKLYREHCKSGWHKHNYTRHKNGLPPLSQEECMVEMELADSKKDLKDYDF

SEQ ID NO: 12259 - DNA, 1417 bp, Zea mays subsp. mays
  misc_feature (1)..(1417): Ceres Seq. ID no. 12411579
  misc_feature (1)..(1417): Ortholog of  Ceres SEQ ID NO 13596554 as cited in SEQ ID NO 62818
gaccgcatcgcgttctacgttctccgccctctccgctccccctactctgcttggtttcccagaagatttgattggtttccccaaatccggtgactccattcctgttgttcttcacgtcgaccccgggaacctcccagaaggctctagcgaccccggccgcccggcgctctgagggctgtgctgccggcggcgagatccaggagctgcctgccatggtgaaggacagcgcctactacgacgtcctaggggtcagcgtcgacgcgtcctccgccgagatcaagaaggcgtattacatcaaggcgaagctggtgcatccggacaagaatcccgggaaccctgacgccgcactcaagttccaggaacttggagaggcctatcaagttcttagtgatcctgggaaaaaggaggcttatgataagtatggaaaggagggtattccccaggataacatggtggatcctgctgctgtctttgggatgatttttggaagtgactattttgaagattacgttggccagcttgctctagcatctatagcctcagtagaggttgatgaaaactcaaacagtcaagaagcaagagcaaaggttcaagaaaagataaaagagttacaaagagagagagaacaaaagcttacccagagcctgaaagaccgacttcaaccatatgtagatgagagaaaggatgaatttgtgagctacgcaagcacagaagctaggcgtttatctgaagcagcatttggtgaggctatgcttcacactattgggtatatttacgtgcggcaagcagcaagagaacttgggaaaagtagaatttatatgggtgtaccgtttatagctgagtgggttagagacaaaggacaccacattaaatcgcaggttaatgctgcttcaggtgctatttctctaatacaacttcaagaagggatgaaaaagatggaaggaagcgagaacagtgaagagcaacttatgaagagttttgaggagaaaaaagatgccatgcttagctcgctatggaaaattaatgtggtcgatattgagtcaacactttcacgtgtctgccaagcagttctgagagataacacggtctccaaagatgtcctgaagctgcgagcgaaagcgttgaaaaagctcggaacgatattccaaggcgcaaaatctatgtaccgtcgtgaaaacagcctgcgcgttgaaaacgagcacaaatcagcaagctaacccgtcacactgaagcccatggaccaccgtgtagcaagggatcggatttggtgatttttttgtggttttggcctttgttaatttgtttgtctgctaacgatagcattcggaaaatgcaaatccggtctacactagtacccctctattaattttctgtagatgtgagcatttaacacgaagctgtgatttgcgcttgatgc

SEQ ID NO: 12260 - protein, 334 aa, Zea mays subsp. mays
  peptide (1)..(334): Ceres Seq. ID no. 12411580
MVKDSAYYDVLGVSVDASSAEIKKAYYIKAKLVHPDKNPGNPDAALKFQELGEAYQVLSDPGKKEAYDKYGKEGIPQDNMVDPAAVFGMIFGSDYFEDYVGQLALASIASVEVDENSNSQEARAKVQEKIKELQREREQKLTQSLKDRLQPYVDERKDEFVSYASTEARRLSEAAFGEAMLHTIGYIYVRQAARELGKSRIYMGVPFIAEWVRDKGHHIKSQVNAASGAISLIQLQEGMKKMEGSENSEEQLMKSFEEKKDAMLSSLWKINVVDIESTLSRVCQAVLRDNTVSKDVLKLRAKALKKLGTIFQGAKSMYRRENSLRVENEHKSAS

SEQ ID NO: 12261 - protein, 255 aa, Zea mays subsp. mays
  peptide (1)..(255): Ceres Seq. ID no. 12411581
MVDPAAVFGMIFGSDYFEDYVGQLALASIASVEVDENSNSQEARAKVQEKIKELQREREQKLTQSLKDRLQPYVDERKDEFVSYASTEARRLSEAAFGEAMLHTIGYIYVRQAARELGKSRIYMGVPFIAEWVRDKGHHIKSQVNAASGAISLIQLQEGMKKMEGSENSEEQLMKSFEEKKDAMLSSLWKINVVDIESTLSRVCQAVLRDNTVSKDVLKLRAKALKKLGTIFQGAKSMYRRENSLRVENEHKSAS

SEQ ID NO: 12262 - protein, 246 aa, Zea mays subsp. mays
  peptide (1)..(246): Ceres Seq. ID no. 12411582
MIFGSDYFEDYVGQLALASIASVEVDENSNSQEARAKVQEKIKELQREREQKLTQSLKDRLQPYVDERKDEFVSYASTEARRLSEAAFGEAMLHTIGYIYVRQAARELGKSRIYMGVPFIAEWVRDKGHHIKSQVNAASGAISLIQLQEGMKKMEGSENSEEQLMKSFEEKKDAMLSSLWKINVVDIESTLSRVCQAVLRDNTVSKDVLKLRAKALKKLGTIFQGAKSMYRRENSLRVENEHKSAS

SEQ ID NO: 12263 - DNA, 1757 bp, Zea mays subsp. mays
  misc_feature (1)..(1757): Ceres Seq. ID no. 12345695
  misc_feature (1)..(1757): Ortholog of  Ceres SEQ ID NO 14310547 as cited in SEQ ID NO 55132
  misc_feature (1)..(1757): Ortholog of  Ceres SEQ ID NO 13596261 as cited in SEQ ID NO 67817
  misc_feature (1)..(1757): Ortholog of  Ceres SEQ ID NO 13662360 as cited in SEQ ID NO 68830
gctgataacaacatcctatcgttcctgtagcccctttccgtgaccttgccaaagaatttgctcttctctgtgcgtgtgcaatttcttccgctacagctcaaggatccgctactgctgctgttttgggagattcgccatgggcggcggggccgttaacgaccacttcccgggggccagcgacccgctgctccccacgaagcgggatggggacggggacgaggacgacgcaggtgcctccgcgttccacgagttcgacggcgcctccttcgccggcgcggtgttcaacctctccaccaccatcgtcggcgcgggcatcatggccgctaccggccaccatgaaggtgctcggtctcgtccctgggctcgtcatgatagtgctcgccgcgctcctcaccgacgcctccatcgagctgctcgtgcggttcagccgggccgcgggcgcgcgctcctacagcgcggccatggccgacgccttcggatggtggggtaggaggctgctccaggtctgcgtcgtcatcaacaacgtcggcgtcatgattgtgtacatgatcattataggcgatgtgctttctggatccacttctggtggtgagcatcactatggtgtgttagaaggatggtttggaatacactggtggaatgggcgtttatttgttctccttgtcacaaccctttgtgtgttcactccactagcatgcttgaagcgtattgattcactaagctatacatccacaatatctgttgctttggcggttgtattcgttattattactgcaggaattgctgtcatcaagttgataggtggacaaattccaatgcccaagttgtttcccactgtttctgatttggcatctgtttgggaactttttacagcagtgccggttcttgtcactgcttacgtttgccattacaatgttcacccaattcataatgagctaaaggactctacccagattaagccaatagtacacacatcattgacactatgctcgaccatctacatcacaacaagtttctttggatatctcctctttggtgaatctacactctctgatgtgctctccaactttgattcaaatcttgggatcccatacagttcagtcctcaatgatgctgtcagagtgagctatgctgttcacctgatgcttgtgttccccatgatattccatgcattgaggcttaatttggatgggctcctcttcgcctctgcaaggcctctgtcttctgacaacagaagattcggcataattacagcatcgctcctcctagtgatttttgggtctgcaatcttcattcctagtatttgggatgcctttcagtttactggggcaactgctgctgtctgtatcgcctttattttcccagctgcgatcactttaagggattcacaaggtattgccaagaagtgggacaaaattctggcgatcttcatgattgttcttgctgttgtatcaaatgtagtagcggtctacagcgatgcctacaaaatattcaacaaggaaagtgctccttctaatgcctggatcggggagtcaactgaaaatagatcttcgtggtggcttgtacgttagttggccaataaaatattcatagttcatttaggctttgtttttggtgatttgttccacgggccatggtctgctcaaatctcattgagttttgtgtgtatatctacgataggtatgaaaatttgcacaaaccgaagtgctccggtaccataaaaataattgtgtcaaatctgaaattacagagttacg

SEQ ID NO: 12264 - protein, 455 aa, Zea mays subsp. mays
  peptide (1)..(455): Ceres Seq. ID no. 12345696
MGTGTRTTQVPPRSTSSTAPPSPARCSTSPPPSSARASWPLPATMKVLGLVPGLVMIVLAALLTDASIELLVRFSRAAGARSYSAAMADAFGWWGRRLLQVCVVINNVGVMIVYMIIIGDVLSGSTSGGEHHYGVLEGWFGIHWWNGRLFVLLVTTLCVFTPLACLKRIDSLSYTSTISVALAVVFVIITAGIAVIKLIGGQIPMPKLFPTVSDLASVWELFTAVPVLVTAYVCHYNVHPIHNELKDSTQIKPIVHTSLTLCSTIYITTSFFGYLLFGESTLSDVLSNFDSNLGIPYSSVLNDAVRVSYAVHLMLVFPMIFHALRLNLDGLLFASARPLSSDNRRFGIITASLLLVIFGSAIFIPSIWDAFQFTGATAAVCIAFIFPAAITLRDSQGIAKKWDKILAIFMIVLAVVSNVVAVYSDAYKIFNKESAPSNAWIGESTENRSSWWLVR

SEQ ID NO: 12265 - protein, 411 aa, Zea mays subsp. mays
  peptide (1)..(411): Ceres Seq. ID no. 12345697
MKVLGLVPGLVMIVLAALLTDASIELLVRFSRAAGARSYSAAMADAFGWWGRRLLQVCVVINNVGVMIVYMIIIGDVLSGSTSGGEHHYGVLEGWFGIHWWNGRLFVLLVTTLCVFTPLACLKRIDSLSYTSTISVALAVVFVIITAGIAVIKLIGGQIPMPKLFPTVSDLASVWELFTAVPVLVTAYVCHYNVHPIHNELKDSTQIKPIVHTSLTLCSTIYITTSFFGYLLFGESTLSDVLSNFDSNLGIPYSSVLNDAVRVSYAVHLMLVFPMIFHALRLNLDGLLFASARPLSSDNRRFGIITASLLLVIFGSAIFIPSIWDAFQFTGATAAVCIAFIFPAAITLRDSQGIAKKWDKILAIFMIVLAVVSNVVAVYSDAYKIFNKESAPSNAWIGESTENRSSWWLVR

SEQ ID NO: 12266 - protein, 400 aa, Zea mays subsp. mays
  peptide (1)..(400): Ceres Seq. ID no. 12345698
MIVLAALLTDASIELLVRFSRAAGARSYSAAMADAFGWWGRRLLQVCVVINNVGVMIVYMIIIGDVLSGSTSGGEHHYGVLEGWFGIHWWNGRLFVLLVTTLCVFTPLACLKRIDSLSYTSTISVALAVVFVIITAGIAVIKLIGGQIPMPKLFPTVSDLASVWELFTAVPVLVTAYVCHYNVHPIHNELKDSTQIKPIVHTSLTLCSTIYITTSFFGYLLFGESTLSDVLSNFDSNLGIPYSSVLNDAVRVSYAVHLMLVFPMIFHALRLNLDGLLFASARPLSSDNRRFGIITASLLLVIFGSAIFIPSIWDAFQFTGATAAVCIAFIFPAAITLRDSQGIAKKWDKILAIFMIVLAVVSNVVAVYSDAYKIFNKESAPSNAWIGESTENRSSWWLVR

SEQ ID NO: 12267 - DNA, 1744 bp, Zea mays subsp. mays
  misc_feature (1)..(1744): Ceres Seq. ID no. 12348828
  misc_feature (1)..(1744): Ortholog of  Ceres SEQ ID NO 13600220 as cited in SEQ ID NO 0
ctccggcctttgccgcttccacagggagtccggggccatgcagagctccgtaaagctcgcggtgcttgctctactgctagcggcagcagctcaccacggtctgctgccgctgccgacggcgcgatgctactggctcaacccggagatctacgacgccggcgggctgagccgccgcgcgttcccggacggcttcgtcttcgggacggccgcgtcggcgtaccaggtcgaggggatggccaagcacggcgggcggggccccagcatctgggacgccttcatagaggttcctgggaccatccctaacaatgccaccgctgacgtgacggtcgacgagtatcatcggtacaaggaagatgtgaacataatgaagaacatgggctttgatgcgtaccggttttcgatctcttggtcgaggattttcccagatggaactggcaaggtgaaccaggaaggagtggattactacaacaggctcatagattacatgctccagcaaggtatcgcgccgtatgcaaatctctaccattatgacctcccattggcactccatgaacagtacctgggctggcttagcccaaagattgtggaggcgtttgcagactacgccgagttctgcttccacgcgttcggagacagggtgaagaactggtttaccttcaacgagccgaggtgcgtcgctgctctgggctacgacaatggcttgcacgcaccgggaaggtgttccgggtgccccgccggaggcaactccaccacggagccgtaccttgtcgcacaccatctcatcctttctcatgcagctgcggtcaggcgataccgcgacaagtatcagcttcaccagaaggggaagattggaattctcctggatttcgtgtggtacgaacctttcagcgacagcaatgcggaccaggctgcagcacagcgagccagggacttccacctaggctggttccttgaccccattgtacatggacggtacccgtactcgatgcaagagattgccaaagacaggctaccgttgttcagcgatgaagaagccaggatggtgaaaggctctatagactatgttggcatcaaccactacacttctttctacatgaaggaccctgggacatggaacctgacgccagtcagctaccaggatgattggcatgttggttttgtctacgaacgaaatggagttcctattggcgctcacgcaaactcctactggctgtacattgtgccgtggggcatcaacaaggctgtcagctatgtcaaggaaacttacaaaaatcttacaatgatccttgctgaaaacggaatggaccaacctggtgatgtcagtattactcagggtgtgcatgacacagtaagaatccgttattacagagactacataactgagctcaagaaagcaatagatgatggtgccagagtcattgggtactttgcgtggtcgctgcttgacaacttcgagtggaggcttgggtacacttcgcggtttggcttggtgtacgtggactacaagactctgaagaggtaccccaaggactcagctttctggttcaagcatatgctgtccaagaaaaggagctagagaattgcagacaagaggaccactggcttcaggtgtcatacaaaagttcactctgcaaatcctcttagtatgtcagatttagcttaagaaaccgtgcagacaattgagtctcaaggctcgacatctctagcttcgttaattgttgcaaggcaataaattggtatcttc

SEQ ID NO: 12268 - protein, 524 aa, Zea mays subsp. mays
  peptide (1)..(524): Ceres Seq. ID no. 12348829
SGLCRFHRESGAMQSSVKLAVLALLLAAAAHHGLLPLPTARCYWLNPEIYDAGGLSRRAFPDGFVFGTAASAYQVEGMAKHGGRGPSIWDAFIEVPGTIPNNATADVTVDEYHRYKEDVNIMKNMGFDAYRFSISWSRIFPDGTGKVNQEGVDYYNRLIDYMLQQGIAPYANLYHYDLPLALHEQYLGWLSPKIVEAFADYAEFCFHAFGDRVKNWFTFNEPRCVAALGYDNGLHAPGRCSGCPAGGNSTTEPYLVAHHLILSHAAAVRRYRDKYQLHQKGKIGILLDFVWYEPFSDSNADQAAAQRARDFHLGWFLDPIVHGRYPYSMQEIAKDRLPLFSDEEARMVKGSIDYVGINHYTSFYMKDPGTWNLTPVSYQDDWHVGFVYERNGVPIGAHANSYWLYIVPWGINKAVSYVKETYKNLTMILAENGMDQPGDVSITQGVHDTVRIRYYRDYITELKKAIDDGARVIGYFAWSLLDNFEWRLGYTSRFGLVYVDYKTLKRYPKDSAFWFKHMLSKKRS

SEQ ID NO: 12269 - protein, 512 aa, Zea mays subsp. mays
  peptide (1)..(512): Ceres Seq. ID no. 12348830
MQSSVKLAVLALLLAAAAHHGLLPLPTARCYWLNPEIYDAGGLSRRAFPDGFVFGTAASAYQVEGMAKHGGRGPSIWDAFIEVPGTIPNNATADVTVDEYHRYKEDVNIMKNMGFDAYRFSISWSRIFPDGTGKVNQEGVDYYNRLIDYMLQQGIAPYANLYHYDLPLALHEQYLGWLSPKIVEAFADYAEFCFHAFGDRVKNWFTFNEPRCVAALGYDNGLHAPGRCSGCPAGGNSTTEPYLVAHHLILSHAAAVRRYRDKYQLHQKGKIGILLDFVWYEPFSDSNADQAAAQRARDFHLGWFLDPIVHGRYPYSMQEIAKDRLPLFSDEEARMVKGSIDYVGINHYTSFYMKDPGTWNLTPVSYQDDWHVGFVYERNGVPIGAHANSYWLYIVPWGINKAVSYVKETYKNLTMILAENGMDQPGDVSITQGVHDTVRIRYYRDYITELKKAIDDGARVIGYFAWSLLDNFEWRLGYTSRFGLVYVDYKTLKRYPKDSAFWFKHMLSKKRS

SEQ ID NO: 12270 - protein, 447 aa, Zea mays subsp. mays
  peptide (1)..(447): Ceres Seq. ID no. 12348831
MAKHGGRGPSIWDAFIEVPGTIPNNATADVTVDEYHRYKEDVNIMKNMGFDAYRFSISWSRIFPDGTGKVNQEGVDYYNRLIDYMLQQGIAPYANLYHYDLPLALHEQYLGWLSPKIVEAFADYAEFCFHAFGDRVKNWFTFNEPRCVAALGYDNGLHAPGRCSGCPAGGNSTTEPYLVAHHLILSHAAAVRRYRDKYQLHQKGKIGILLDFVWYEPFSDSNADQAAAQRARDFHLGWFLDPIVHGRYPYSMQEIAKDRLPLFSDEEARMVKGSIDYVGINHYTSFYMKDPGTWNLTPVSYQDDWHVGFVYERNGVPIGAHANSYWLYIVPWGINKAVSYVKETYKNLTMILAENGMDQPGDVSITQGVHDTVRIRYYRDYITELKKAIDDGARVIGYFAWSLLDNFEWRLGYTSRFGLVYVDYKTLKRYPKDSAFWFKHMLSKKRS

SEQ ID NO: 12271 - DNA, 1906 bp, Zea mays subsp. mays
  misc_feature (1)..(1906): Ceres Seq. ID no. 12345740
  misc_feature (1)..(1906): Ortholog of  Ceres SEQ ID NO 15171446 as cited in SEQ ID NO 51590
acttcacctcttctgcttccttctccccagcatacagtgccagacaggatacccacacattcatggaggtggttcaagaagtccttaggcatggctcagcagatagtgtccgtgctgtcataagagctaacaaaaagagctacagccttgtccagctcattgcagcctcttttgatgtctacaacattttgtgcagcaaaaatatgacaccaaatgggatgcaagattcttcttccaaaggaagaaatggaacaggattccttcatggagctcgtgttggcattgtggctaaaccctctcctgaatttgttgctggggtatttggaacctggctttctggtggagttgcagtaccccttgcccttagctatccagaagctgagcttcttcatgtcatgaatgactcagatatttcaatggttttaagcaccaaggagcatcacgaaatcatggagaacctttctatcaagtgttctgcttattgttctattcttccatctgtcactagtataccttcagaaatcaatcctcaagaaccttcaagcaatgaggcgatttcatcagtctctactttaataactgagaccaacagttcaaagaaaatcaaaggcgatgaccctgctcttatcctttacacaagtggcacaactggtaaacctaaaggagtagttcacacccatgagggcattctttctcaggttcagattctatctgaagcgtggggatatcgaagtgaagaccaatttctgcactgtctcccgctgcaccatgtgcatgggcttttcaatgctctatttgcgcccctttattcaggatcagtggttgagtttataccaaaattcagtgtaagcgggatatggcagagatggcgagaatcatatcccaacgatgcgagtaaaagtacagaggccattacagtatttactggagttccaaccatgtatacacgtctgctgcaagggtatgatagtatggatcctgatcaaaagtcggcctcttcttacgctgcaaagcatctgaggttaatgatgtgtggatcatcagctcttccttccccacttatgaagaggtgggaggaagtgacaggccatcgtcttttggaacgctatggtatgactgagtttgtcatggcactgtctaatccattgcatggtatccgaaaagaaggtacagttggtaaacctcttccacgcattgaggccaagatcattatggaggacggggctgaaactacaactggagttggcgagctctgcattagaagtccatctcttttcaaggagtattggaaaagaccagaggtcaccgcagaatctttcattgatggaggattcttcaagacaggtgatacagtaactgtagatgaggaaggatacttcataattttgggacgcacaaatgccgacattatgaaatttggcggttacaagctgtcagcattagaaattgaggcagtactgttagagcatgatgctgtactggaatgtgctgtccttggcttgcctgatgaagcctatggggaggttatatgtgcaataattgtgcctaaggaggatgcaaagaaaaaggctggacaggactcaaagccagcgctaaccttggaagcattaacaagttggtcgaaagataagcttgctccatacaagattccaacaagactatacttgtgggattctcttcctcggaatgccatgggaaaggttaacaagaaggagctgaagaaattgttaggagcttagccatgtgtatagatgtatttatctcttcatttccttcttaaagtttagcaagtcgggctcattatattgattagcgaataagtgctttcgttaccatggaccaataatcttcgaaacggcccgagttatactgcgcacacatttatttatcagaaaagtttctagtc

SEQ ID NO: 12272 - protein, 578 aa, Zea mays subsp. mays
  peptide (1)..(578): Ceres Seq. ID no. 12345741
FTSSASFSPAYSARQDTHTFMEVVQEVLRHGSADSVRAVIRANKKSYSLVQLIAASFDVYNILCSKNMTPNGMQDSSSKGRNGTGFLHGARVGIVAKPSPEFVAGVFGTWLSGGVAVPLALSYPEAELLHVMNDSDISMVLSTKEHHEIMENLSIKCSAYCSILPSVTSIPSEINPQEPSSNEAISSVSTLITETNSSKKIKGDDPALILYTSGTTGKPKGVVHTHEGILSQVQILSEAWGYRSEDQFLHCLPLHHVHGLFNALFAPLYSGSVVEFIPKFSVSGIWQRWRESYPNDASKSTEAITVFTGVPTMYTRLLQGYDSMDPDQKSASSYAAKHLRLMMCGSSALPSPLMKRWEEVTGHRLLERYGMTEFVMALSNPLHGIRKEGTVGKPLPRIEAKIIMEDGAETTTGVGELCIRSPSLFKEYWKRPEVTAESFIDGGFFKTGDTVTVDEEGYFIILGRTNADIMKFGGYKLSALEIEAVLLEHDAVLECAVLGLPDEAYGEVICAIIVPKEDAKKKAGQDSKPALTLEALTSWSKDKLAPYKIPTRLYLWDSLPRNAMGKVNKKELKKLLGA

SEQ ID NO: 12273 - protein, 558 aa, Zea mays subsp. mays
  peptide (1)..(558): Ceres Seq. ID no. 12345742
MEVVQEVLRHGSADSVRAVIRANKKSYSLVQLIAASFDVYNILCSKNMTPNGMQDSSSKGRNGTGFLHGARVGIVAKPSPEFVAGVFGTWLSGGVAVPLALSYPEAELLHVMNDSDISMVLSTKEHHEIMENLSIKCSAYCSILPSVTSIPSEINPQEPSSNEAISSVSTLITETNSSKKIKGDDPALILYTSGTTGKPKGVVHTHEGILSQVQILSEAWGYRSEDQFLHCLPLHHVHGLFNALFAPLYSGSVVEFIPKFSVSGIWQRWRESYPNDASKSTEAITVFTGVPTMYTRLLQGYDSMDPDQKSASSYAAKHLRLMMCGSSALPSPLMKRWEEVTGHRLLERYGMTEFVMALSNPLHGIRKEGTVGKPLPRIEAKIIMEDGAETTTGVGELCIRSPSLFKEYWKRPEVTAESFIDGGFFKTGDTVTVDEEGYFIILGRTNADIMKFGGYKLSALEIEAVLLEHDAVLECAVLGLPDEAYGEVICAIIVPKEDAKKKAGQDSKPALTLEALTSWSKDKLAPYKIPTRLYLWDSLPRNAMGKVNKKELKKLLGA

SEQ ID NO: 12274 - protein, 511 aa, Zea mays subsp. mays
  peptide (1)..(511): Ceres Seq. ID no. 12345743
MTPNGMQDSSSKGRNGTGFLHGARVGIVAKPSPEFVAGVFGTWLSGGVAVPLALSYPEAELLHVMNDSDISMVLSTKEHHEIMENLSIKCSAYCSILPSVTSIPSEINPQEPSSNEAISSVSTLITETNSSKKIKGDDPALILYTSGTTGKPKGVVHTHEGILSQVQILSEAWGYRSEDQFLHCLPLHHVHGLFNALFAPLYSGSVVEFIPKFSVSGIWQRWRESYPNDASKSTEAITVFTGVPTMYTRLLQGYDSMDPDQKSASSYAAKHLRLMMCGSSALPSPLMKRWEEVTGHRLLERYGMTEFVMALSNPLHGIRKEGTVGKPLPRIEAKIIMEDGAETTTGVGELCIRSPSLFKEYWKRPEVTAESFIDGGFFKTGDTVTVDEEGYFIILGRTNADIMKFGGYKLSALEIEAVLLEHDAVLECAVLGLPDEAYGEVICAIIVPKEDAKKKAGQDSKPALTLEALTSWSKDKLAPYKIPTRLYLWDSLPRNAMGKVNKKELKKLLGA

SEQ ID NO: 12275 - DNA, 1617 bp, Zea mays subsp. mays
  misc_feature (1)..(1617): Ceres Seq. ID no. 13494824
  misc_feature (1)..(1617): Ortholog of  Ceres SEQ ID NO 14315455 as cited in SEQ ID NO 56988
  misc_feature (1)..(1617): Ortholog of  Ceres SEQ ID NO 13596921 as cited in SEQ ID NO 62368
agccaaatcgaaggagattgaacgaagcagcccagccaaattcccctcgccgccccgtcccttctcgacatttcttgtcccgtcgtcgcctcaatctcgaagcctctccggcggagccgcctcatcatgttccgaaggcctccaaccaaacatcctctagggtttccgcatcgtccgtcgcgatgggcttcacgaagcggtcgccccagcatcccgcctccccagccggcggcgaggtcggcgcccagacggcagggaaggtcacaccagtgccggcggcgccggagtcggcgcccgcggcggtggtgccgaggcctccggacgtggcgcccttcctgaccaaggtctacgacatggtctccgacccggccaccgacgcggtcatctcctggagcgccgccggcggcagtttcgtgatctgggactcgcacgctttcgagcgcgacctgctgccgcggcacttcaagcacaatcacttcaccagcttcatacgccagctcaacacctacggatttcataaagttgatccagatagatgggaatgggccaatgaaggctttgttaagggccaaaaacatcttttgaagaccatcaagagaaagaagaaatcctctcaggatgtacctagtgatctgcagtcggtgcctgtcaaaactgcacctggcactgagaatatcgagataggaaaatatggaggccttgaaaaggaggttgagacacttaagagggacaaggcccttctaatgcagcagcttgtagatctacggcagtaccagcaatcatctagcgctgaagtgcagaatttaattcaacgcctccgtgtgatggagcagaaccagcagcagatgatggcacttttggcaattgttgtccagaatccagacttcctgaaccagctcgtgcagcagcagcgcaggagtaactggtggaatgatgatggtaacaggaaaagaaggttccaagctctggaacatggtcctgtagatgaccaagagacttctggtggaggcgcacaaattattcaatatcgtcctcctgttcctgaaacttccaatcagccaataccagcaaatgaagctttctattcaacccctgcacaaccagcttcaagccctgcacttgagatgcccatggatgtagagatgacttcaaacaatgttaatacctttgattcaactggcaatgattttactgacacctctgctctatgtgaatggtatgacatggatatatttggtgatgaacttgagcacattcttcaacagccagagcaggactttcaagtggaccctcctttaacagttgaggattatggttatgatcatccacggttagagcaggactatcagatggaagcacaacagaattgcaaaaatcctcaatatgttgcctgtgtcttgaagcaaagggaaagccatgcatctgatgtccattagtactgatcagtttgagctgatgtcataactgaagcatgagcggtggtcccccagaatgttgtccagtaacattagtggatagagatttgtgatgaacagaatcttgagactggcaggttagccaccattgggaacctgaagaccgtcgggattgctcagaattcagtatactaatactaat

SEQ ID NO: 12276 - protein, 477 aa, Zea mays subsp. mays
  peptide (1)..(477): Ceres Seq. ID no. 13494825
PNRRRLNEAAQPNSPRRPVPSRHFLSRRRLNLEASPAEPPHHVPKASNQTSSRVSASSVAMGFTKRSPQHPASPAGGEVGAQTAGKVTPVPAAPESAPAAVVPRPPDVAPFLTKVYDMVSDPATDAVISWSAAGGSFVIWDSHAFERDLLPRHFKHNHFTSFIRQLNTYGFHKVDPDRWEWANEGFVKGQKHLLKTIKRKKKSSQDVPSDLQSVPVKTAPGTENIEIGKYGGLEKEVETLKRDKALLMQQLVDLRQYQQSSSAEVQNLIQRLRVMEQNQQQMMALLAIVVQNPDFLNQLVQQQRRSNWWNDDGNRKRRFQALEHGPVDDQETSGGGAQIIQYRPPVPETSNQPIPANEAFYSTPAQPASSPALEMPMDVEMTSNNVNTFDSTGNDFTDTSALCEWYDMDIFGDELEHILQQPEQDFQVDPPLTVEDYGYDHPRLEQDYQMEAQQNCKNPQYVACVLKQRESHASDVH

SEQ ID NO: 12277 - protein, 417 aa, Zea mays subsp. mays
  peptide (1)..(417): Ceres Seq. ID no. 13494826
MGFTKRSPQHPASPAGGEVGAQTAGKVTPVPAAPESAPAAVVPRPPDVAPFLTKVYDMVSDPATDAVISWSAAGGSFVIWDSHAFERDLLPRHFKHNHFTSFIRQLNTYGFHKVDPDRWEWANEGFVKGQKHLLKTIKRKKKSSQDVPSDLQSVPVKTAPGTENIEIGKYGGLEKEVETLKRDKALLMQQLVDLRQYQQSSSAEVQNLIQRLRVMEQNQQQMMALLAIVVQNPDFLNQLVQQQRRSNWWNDDGNRKRRFQALEHGPVDDQETSGGGAQIIQYRPPVPETSNQPIPANEAFYSTPAQPASSPALEMPMDVEMTSNNVNTFDSTGNDFTDTSALCEWYDMDIFGDELEHILQQPEQDFQVDPPLTVEDYGYDHPRLEQDYQMEAQQNCKNPQYVACVLKQRESHASDVH

SEQ ID NO: 12278 - protein, 360 aa, Zea mays subsp. mays
  peptide (1)..(360): Ceres Seq. ID no. 13494827
MVSDPATDAVISWSAAGGSFVIWDSHAFERDLLPRHFKHNHFTSFIRQLNTYGFHKVDPDRWEWANEGFVKGQKHLLKTIKRKKKSSQDVPSDLQSVPVKTAPGTENIEIGKYGGLEKEVETLKRDKALLMQQLVDLRQYQQSSSAEVQNLIQRLRVMEQNQQQMMALLAIVVQNPDFLNQLVQQQRRSNWWNDDGNRKRRFQALEHGPVDDQETSGGGAQIIQYRPPVPETSNQPIPANEAFYSTPAQPASSPALEMPMDVEMTSNNVNTFDSTGNDFTDTSALCEWYDMDIFGDELEHILQQPEQDFQVDPPLTVEDYGYDHPRLEQDYQMEAQQNCKNPQYVACVLKQRESHASDVH

SEQ ID NO: 12279 - DNA, 1309 bp, Zea mays subsp. mays
  misc_feature (1)..(1309): Ceres Seq. ID no. 12412564
  misc_feature (1)..(1309): Ortholog of  Ceres SEQ ID NO 13594482 as cited in SEQ ID NO 51285
  misc_feature (1)..(1309): Ortholog of  Ceres SEQ ID NO 13655381 as cited in SEQ ID NO 63359
  misc_feature (1)..(1309): Ortholog of  Ceres SEQ ID NO 12617583 as cited in SEQ ID NO 64897
accgtctcgtacatgcccttatccctctcgccccgcatcccatcacccgcaggccggaacagcagccgtcagccatgcccgcggcggccttcttctccgccgcgctgccccctccctcgcgtacgctgtcccgccgcctcgtcgtgtcccgcgcggctgcggccgcggcctcagcatcagcatcctcgtcctccgggtggcaaggtggcgggggagtggagttccagggcaaggtggggttcctggggctcgggatcatgggcgcgcccatggcatccaacctcatcaaggcaggctgcgacgtcacggtttggaacaggaccaagagcaagtgcgatcccctcctcagtctcgatgccaagtacgagcctacaccggcccaagtcgcttcatcttgtgacgtgacattcgcgattctcgctgatccacaaagcgcggctgaggttgcatgtgggtccagtggagctgctgaagggttggcccctgggaaaggctatgtcgatgtgtcgacggttgatggtgctacatccaagctgattggtgaacgcattacaagtactggagcatctttccttgaggctccagtttcaggctcgaaaaaaccagcagaagatgggctgctcatctttcttactgcaggtgatgagtccttgtacaagagagtggcgcccctccttgatgtcatggggaagtcaaggttttatcttggcgatgtaggcaatggtgctgcaatgaagctcgtggttaacatggtcatggggagcatgatggtttccttctcagaagggttgctcctgagtgaaaaagtcggtttagacccgaatactctcgtcgaggttatttcccagggtgctatcagtgcccccatgttctctctcaagggcccatccatggttaaagctgcatatcctcctgcatttcctctgaagcatcaacagaaggacttgaggctcgcattggcccctggcggaatcggtgtcccagtccattcctacagttgcagctgcgaacgagctgtacaaggctgcaaaatcgctcggccttagtgaccacgacttctcggcggttattgaagcgctgaaagccaaagtgcagagccagagctcacaatagtagttgcctgttcagcagagctcacagtagttgttgcctcttcagcagctaccattgaggcagcattttgtctcgatggatgaagttgacacttaggaaaatttctcaagatcgctacagaaaagtctcagaacaatacaatttctgtattcgtaaatattttctcaaacatcacaacgacgacatttccttaagg

SEQ ID NO: 12280 - protein, 347 aa, Zea mays subsp. mays
  peptide (1)..(347): Ceres Seq. ID no. 12412565
RLVHALIPLAPHPITRRPEQQPSAMPAAAFFSAALPPPSRTLSRRLVVSRAAAAAASASASSSSGWQGGGGVEFQGKVGFLGLGIMGAPMASNLIKAGCDVTVWNRTKSKCDPLLSLDAKYEPTPAQVASSCDVTFAILADPQSAAEVACGSSGAAEGLAPGKGYVDVSTVDGATSKLIGERITSTGASFLEAPVSGSKKPAEDGLLIFLTAGDESLYKRVAPLLDVMGKSRFYLGDVGNGAAMKLVVNMVMGSMMVSFSEGLLLSEKVGLDPNTLVEVISQGAISAPMFSLKGPSMVKAAYPPAFPLKHQQKDLRLALAPGGIGVPVHSYSCSCERAVQGCKIARP

SEQ ID NO: 12281 - protein, 323 aa, Zea mays subsp. mays
  peptide (1)..(323): Ceres Seq. ID no. 12412566
MPAAAFFSAALPPPSRTLSRRLVVSRAAAAAASASASSSSGWQGGGGVEFQGKVGFLGLGIMGAPMASNLIKAGCDVTVWNRTKSKCDPLLSLDAKYEPTPAQVASSCDVTFAILADPQSAAEVACGSSGAAEGLAPGKGYVDVSTVDGATSKLIGERITSTGASFLEAPVSGSKKPAEDGLLIFLTAGDESLYKRVAPLLDVMGKSRFYLGDVGNGAAMKLVVNMVMGSMMVSFSEGLLLSEKVGLDPNTLVEVISQGAISAPMFSLKGPSMVKAAYPPAFPLKHQQKDLRLALAPGGIGVPVHSYSCSCERAVQGCKIARP

SEQ ID NO: 12282 - protein, 262 aa, Zea mays subsp. mays
  peptide (1)..(262): Ceres Seq. ID no. 12412567
MGAPMASNLIKAGCDVTVWNRTKSKCDPLLSLDAKYEPTPAQVASSCDVTFAILADPQSAAEVACGSSGAAEGLAPGKGYVDVSTVDGATSKLIGERITSTGASFLEAPVSGSKKPAEDGLLIFLTAGDESLYKRVAPLLDVMGKSRFYLGDVGNGAAMKLVVNMVMGSMMVSFSEGLLLSEKVGLDPNTLVEVISQGAISAPMFSLKGPSMVKAAYPPAFPLKHQQKDLRLALAPGGIGVPVHSYSCSCERAVQGCKIARP

SEQ ID NO: 12283 - DNA, 1338 bp, Zea mays subsp. mays
  misc_feature (1)..(1338): Ceres Seq. ID no. 12343920
  misc_feature (1)..(1338): Ortholog of  Ceres SEQ ID NO 13597715 as cited in SEQ ID NO 65577
  misc_feature (1)..(1338): Ortholog of  Ceres SEQ ID NO 15178668 as cited in SEQ ID NO 68301
gttcccggcctaaacggaggcggccgtataaaggcattctcctcgcgccccacccggcggttatcttcaccaccatatcgacatcgacgccagcgagccaaggacagaacagccggcgcccggccctaaaactgccgtgcagcgggagagaagcgagggaaagatggaccggtaccagagagtggagaagcagagggaggaggcacccatcaaggaaaacgagatccgcattaccacgcaggggaggatgcgcaactacatcacctacgccaccggcttgcttcaggacaaaggttctgatgaggttgtattcaaggccatggggagggctatcaataagactgtcatggttgtggaattgatcaagaggaggattgttggcctccatcagaataccaccactggatctactgatattactgatatgtgggagccattggaggaaggcctacttccgcttgagacaacaagacatgtctctatgataactataactctttcaaagaaggagctggacacatcatctatcggatatcaatctcctttgcctgctgatgaagtgaagcctttggttaaatatgataatgacgaagatgcacactcacctggtggccgtggaaggggtcgtggtggtcgaggccgtgggcggggcagggacaggggaagaggtggacgtggaaatgggttcaatgactatgctgatgccggttgggaagacgatcacgcccctgcatatatgggcaatggatatgcccgtggaagaggtcgtagtttcaggggccgtggcaggagaggcggctacaataaccagcctgaataccaacaagacggaggttattacgaggaggcacctgtccatgctccagctttaggtcgaggtcgtggtcgtgggagaggtccattcagaggcagaggacgtggtggcaacgcaaacggcgtgatgcacgctgctgcggacagtgcataagctgttcgttaccagtccaggctggttgtttgttggatgcctgctccaagtatgaagatgtatcatctgttgttatcagttaacgtcattacttggcataagattgacattctgtgtcggagtgcagccaggttttgatacttgactagatctgtagggtagcgtctttacagtgctttctcctttcacagtagatgtcttaaactaattgtagtttcgtaaaggtttagagcagggcattctttctatttttaaatataaaaacgaagtcttggtgtatgttcaaatgtgcacgtttttatatgtgctgtttttgaaatgcgagttagattaagttcgtggtacactgtgaatgaaatgcgagtcagatg

SEQ ID NO: 12284 - protein, 267 aa, Zea mays subsp. mays
  peptide (1)..(267): Ceres Seq. ID no. 12343921
MDRYQRVEKQREEAPIKENEIRITTQGRMRNYITYATGLLQDKGSDEVVFKAMGRAINKTVMVVELIKRRIVGLHQNTTTGSTDITDMWEPLEEGLLPLETTRHVSMITITLSKKELDTSSIGYQSPLPADEVKPLVKYDNDEDAHSPGGRGRGRGGRGRGRGRDRGRGGRGNGFNDYADAGWEDDHAPAYMGNGYARGRGRSFRGRGRRGGYNNQPEYQQDGGYYEEAPVHAPALGRGRGRGRGPFRGRGRGGNANGVMHAAADSA

SEQ ID NO: 12285 - protein, 239 aa, Zea mays subsp. mays
  peptide (1)..(239): Ceres Seq. ID no. 12343922
MRNYITYATGLLQDKGSDEVVFKAMGRAINKTVMVVELIKRRIVGLHQNTTTGSTDITDMWEPLEEGLLPLETTRHVSMITITLSKKELDTSSIGYQSPLPADEVKPLVKYDNDEDAHSPGGRGRGRGGRGRGRGRDRGRGGRGNGFNDYADAGWEDDHAPAYMGNGYARGRGRSFRGRGRRGGYNNQPEYQQDGGYYEEAPVHAPALGRGRGRGRGPFRGRGRGGNANGVMHAAADSA

SEQ ID NO: 12286 - protein, 215 aa, Zea mays subsp. mays
  peptide (1)..(215): Ceres Seq. ID no. 12343923
MGRAINKTVMVVELIKRRIVGLHQNTTTGSTDITDMWEPLEEGLLPLETTRHVSMITITLSKKELDTSSIGYQSPLPADEVKPLVKYDNDEDAHSPGGRGRGRGGRGRGRGRDRGRGGRGNGFNDYADAGWEDDHAPAYMGNGYARGRGRSFRGRGRRGGYNNQPEYQQDGGYYEEAPVHAPALGRGRGRGRGPFRGRGRGGNANGVMHAAADSA

SEQ ID NO: 12287 - DNA, 1251 bp, Zea mays subsp. mays
  misc_feature (1)..(1251): Ceres Seq. ID no. 12366718
  misc_feature (1)..(1251): Ortholog of  Ceres SEQ ID NO 13597715 as cited in SEQ ID NO 65577
  misc_feature (1)..(1251): Ortholog of  Ceres SEQ ID NO 15178668 as cited in SEQ ID NO 68301
gtcggaaaaaccatcatctaaagttcaacgcccgcaccgcaagcgcaacacgccaacacccgagacccgacgcggccttcgccttccctccgcgcgagggagattcgaggggagagaggttctcaccttcgcgcctgcggttgcttggcgcagagtcgtcgcagatggaccggtaccagagggtggagaagccgcgggaggagtcccctatcggcgccaacgagatccgcatcacggcgcagggccggccccgcaactacatcacctatgcgctcgccctggtccaggacaatgcaacagatgacattgtcatcaaggccatgggaagggcgatcaacaagacagttgccatcgtggagcttcttaagagaaggattgctggtctccatcagaatacctctattgaatccattgatataacagacacttgggagccattggaagaaggccttgtcactcttgagaccattcgccatgtgtccttaatcactattaaattgtcaaagaaggagctggatacatcatccccaggttaccagccgcccataccagctgaccaggtcaggccagcagctgactttgatcaggatgcagaggccgtaccaagtggtcgtggaagaggacgtggtcgtcgcagcaggggcaggggaaggggaagggggttcagcagtggagtagactatgatgatgagattggagagccagaggaggctccgcgtggatatcgtggcagagggaggggccgtggagggcgtggatcttttgcagttggaaggggctatggtggtgataattatgcgatggaagaagctggtagatatgatgatgatggatataacgcaccacctatgcaacgatatgaaggtggcagaggaaggggcagagggcgtggacgcggtcgtgggcggggaaggcaaggccatggacctcctccgcagcagtagattggttggcacatcacctttgggatgtcataacctccatttctttccataagataaatgttaccgtccattatattttttatctggttattaggttcatgttgaaagttgacatagtgactctagcgtggaggatgcggctagttaagatttggtagctaggttgttcgtccatttgcctatttattatctcagatcagacttggtgccgttccagttgtgcattgtagcctctttttaccatgaaagttagttcagaagattcttttatgttgttgcaaatcacagactgaaaacgtttgttttc

SEQ ID NO: 12288 - protein, 313 aa, Zea mays subsp. mays
  peptide (1)..(313): Ceres Seq. ID no. 12366719
RKNHHLKFNARTASATRQHPRPDAAFAFPPREGDSRGERFSPSRLRLLGAESSQMDRYQRVEKPREESPIGANEIRITAQGRPRNYITYALALVQDNATDDIVIKAMGRAINKTVAIVELLKRRIAGLHQNTSIESIDITDTWEPLEEGLVTLETIRHVSLITIKLSKKELDTSSPGYQPPIPADQVRPAADFDQDAEAVPSGRGRGRGRRSRGRGRGRGFSSGVDYDDEIGEPEEAPRGYRGRGRGRGGRGSFAVGRGYGGDNYAMEEAGRYDDDGYNAPPMQRYEGGRGRGRGRGRGRGRGRQGHGPPPQQ

SEQ ID NO: 12289 - protein, 259 aa, Zea mays subsp. mays
  peptide (1)..(259): Ceres Seq. ID no. 12366720
MDRYQRVEKPREESPIGANEIRITAQGRPRNYITYALALVQDNATDDIVIKAMGRAINKTVAIVELLKRRIAGLHQNTSIESIDITDTWEPLEEGLVTLETIRHVSLITIKLSKKELDTSSPGYQPPIPADQVRPAADFDQDAEAVPSGRGRGRGRRSRGRGRGRGFSSGVDYDDEIGEPEEAPRGYRGRGRGRGGRGSFAVGRGYGGDNYAMEEAGRYDDDGYNAPPMQRYEGGRGRGRGRGRGRGRGRQGHGPPPQQ

SEQ ID NO: 12290 - protein, 207 aa, Zea mays subsp. mays
  peptide (1)..(207): Ceres Seq. ID no. 12366721
MGRAINKTVAIVELLKRRIAGLHQNTSIESIDITDTWEPLEEGLVTLETIRHVSLITIKLSKKELDTSSPGYQPPIPADQVRPAADFDQDAEAVPSGRGRGRGRRSRGRGRGRGFSSGVDYDDEIGEPEEAPRGYRGRGRGRGGRGSFAVGRGYGGDNYAMEEAGRYDDDGYNAPPMQRYEGGRGRGRGRGRGRGRGRQGHGPPPQQ

SEQ ID NO: 12291 - DNA, 789 bp, Zea mays subsp. mays; identical to SEQ ID NO: 1699
  misc_feature (1)..(789): Ceres Seq. ID no. 12355957
  misc_feature (1)..(789): Ortholog of  Ceres SEQ ID NO 13587131 as cited in SEQ ID NO 331
  misc_feature (1)..(789): Ortholog of  Ceres SEQ ID NO 13661176 as cited in SEQ ID NO 61114

SEQ ID NO: 12292 - protein, 161 aa, Zea mays subsp. mays; identical to SEQ ID NO: 1700
  peptide (1)..(161): Ceres Seq. ID no. 12355958

SEQ ID NO: 12293 - protein, 106 aa, Zea mays subsp. mays; identical to SEQ ID NO: 1701
  peptide (1)..(106): Ceres Seq. ID no. 12355959

SEQ ID NO: 12294 - DNA, 1450 bp, Zea mays subsp. mays
  misc_feature (1)..(1450): Ceres Seq. ID no. 12372642
  misc_feature (1)..(1450): Ortholog of  Ceres SEQ ID NO 15225495 as cited in SEQ ID NO 69133
  misc_feature (1)..(1450): Ortholog of  Ceres SEQ ID NO 15179467 as cited in SEQ ID NO 0
gcacgagaccattacctagaacatcctaatcgaaaaggcttctcgattcttgaccatcctgctgttctgccttctccgtccgcgccttcgagaaggccacagagcgaaggaattgcagagttttcttggcgcgaaagaaggggagagagagagagaaagacgaagatgtttatccagaaggcatggaggacggcggcgtttgggctctacggcttcaaccatttcacaaaatctggtttcctggagcatgcgaagaaattcagagaggaggatatgcagatccggttggatggaaaaaattgcctagtaactggagcgaattctggcattggttttgctatggctgagggcttggcttcacatggtgctaccgtctatatggtctgtcgtaacaaggagagaggggaggcagctctcaaccaaataagatccaaaactggcaatgcaaacgttcatctggagatatgtgacctttcatctatcaatcaagtaaaatcgtttgcaacaaagttcacttcgatggataaaccactccatgtcttggtaaacaatgctggcttattagagcacaagcatgagactacagcagaagggttggagctcaattttgctgtcaatgtagctgcaacatacactttaacagagctagttatgccgtcattggagaaagcggcaccagatgctcgtgtcatcacagttgcatcaggaggcatgtacaccgagccactgaacaaagacttacagttcaccgaaggcaccttcgatgggacgcaacagtatgctcgaaacaaaagagttcaggtggcactgactgaatggtgggctgagaaaagcggtgacaggggagtcggtttctacgccatgcatcctggatgggccgatacgcctggggtcgccaagagcttgcccggactgtcagagaggttgtctggaaacctgagaacaaatgacgaaggagctgatacagttgtttggttggcttgcaacctaaggagaagttagcctcgggagccttttacttcgaccgtgctgaagcaccaaaacatttgaagtttgctgggactgcagattcgcacgctcagataaaccctatcgttgatagcattagatccatctgtggtctctctgttaatggttgagctgccaaagcaaaagtgatatacagctccatcgtcaatagcattagattcatctgtggcttctctgttaaaggttgagcttccaaagcaaaagtgaagtgatatattacttgatataatgggtgcatgattcataaaaccgcaaaaaattgaagagtggaaaaaaaaatgcaccagccgggaatcgaacccgggtctgtaccgtggcagggtactattctaccactagaccactggtgcctttgatgctaaagttatgtacgtatttaatttcttttgaatcaacaatcaaacatagatccaacattctt

SEQ ID NO: 12295 - protein, 333 aa, Zea mays subsp. mays
  peptide (1)..(333): Ceres Seq. ID no. 12372643
ARDHYLEHPNRKGFSILDHPAVLPSPSAPSRRPQSEGIAEFSWRERRGERERKTKMFIQKAWRTAAFGLYGFNHFTKSGFLEHAKKFREEDMQIRLDGKNCLVTGANSGIGFAMAEGLASHGATVYMVCRNKERGEAALNQIRSKTGNANVHLEICDLSSINQVKSFATKFTSMDKPLHVLVNNAGLLEHKHETTAEGLELNFAVNVAATYTLTELVMPSLEKAAPDARVITVASGGMYTEPLNKDLQFTEGTFDGTQQYARNKRVQVALTEWWAEKSGDRGVGFYAMHPGWADTPGVAKSLPGLSERLSGNLRTNDEGADTVVWLACNLRRS

SEQ ID NO: 12296 - protein, 278 aa, Zea mays subsp. mays
  peptide (1)..(278): Ceres Seq. ID no. 12372644
MFIQKAWRTAAFGLYGFNHFTKSGFLEHAKKFREEDMQIRLDGKNCLVTGANSGIGFAMAEGLASHGATVYMVCRNKERGEAALNQIRSKTGNANVHLEICDLSSINQVKSFATKFTSMDKPLHVLVNNAGLLEHKHETTAEGLELNFAVNVAATYTLTELVMPSLEKAAPDARVITVASGGMYTEPLNKDLQFTEGTFDGTQQYARNKRVQVALTEWWAEKSGDRGVGFYAMHPGWADTPGVAKSLPGLSERLSGNLRTNDEGADTVVWLACNLRRS

SEQ ID NO: 12297 - protein, 242 aa, Zea mays subsp. mays
  peptide (1)..(242): Ceres Seq. ID no. 12372645
MQIRLDGKNCLVTGANSGIGFAMAEGLASHGATVYMVCRNKERGEAALNQIRSKTGNANVHLEICDLSSINQVKSFATKFTSMDKPLHVLVNNAGLLEHKHETTAEGLELNFAVNVAATYTLTELVMPSLEKAAPDARVITVASGGMYTEPLNKDLQFTEGTFDGTQQYARNKRVQVALTEWWAEKSGDRGVGFYAMHPGWADTPGVAKSLPGLSERLSGNLRTNDEGADTVVWLACNLRRS

SEQ ID NO: 12298 - DNA, 1432 bp, Zea mays subsp. mays
  misc_feature (1)..(1432): Ceres Seq. ID no. 12348832
  misc_feature (1)..(1432): Ortholog of  Ceres SEQ ID NO 14302021 as cited in SEQ ID NO 68979
  misc_feature (1)..(1432): Ortholog of  Ceres SEQ ID NO 14309296 as cited in SEQ ID NO 0
aagatgctgagccacataactccggtgggtgtgggtccaacgccccccacctgcacgctggccccccgccccgccgcgggatcaaatacgccgcctccgcccgtccactccctcgccgcccccgtctcctctcctctcctctcccccgcatccacggccgcaggccgcagccagccactcgacgatctagtcgtctctctctccccgctctgccgcctcgctgccgcggcttcccgtcggctggaggatgaaggtcacggtcgtgtcccggagcggccgggaggtcgtcaagggcggcatcgacctcaaggactcggccaaggtcgcggacctgcaggaggccatccatgccaggactaagaagtattatccttctaggcagcggctcaccctcccccttcaacctggaaaaggcgggaagccagttgtcctcagtccgaaggccagcctgctagaatactgcgagaagggttctgggtcactgacagtggtcttcaaagatttagggccacaggtctactacagcacactgttcttcttcgagtacctgggtcctctcatcatctaccccatgttctactatctgcctgtctacaaatacttcgggtacgagggggagcgggccatgcaccctgtccagacctacgccatgtactactggtgcttccactacttcaagcggatcatggagacattcttcgtgcaccgcttcagccacgcgacgtcgccgctctcgaacgtcttcaggaactgtgcctactactggaccttcggcgcctacattgcttactactgcaaccacccgctgtacaccccagtgagtgatctgcagatgaagattgggtttggttttggggtcgtctgccaggtcgcgaacttctactgccacatcctgctgcggaacctcaggagcccaagcggcagcggcgggtaccagatcccccgcggtttcttgttcaacatcgtgacctgcgccaattacaccaccgagatctatcagtgggtcggcttcaacatcgccacgcagaccgtggcaggttacgtcttccttgtcgtggcggcaggcatcatgaccaactgggcgctcggcaagcacagccgtctgaagaagctgtttgacggcaaggatgggaggcccaagtaccctcgccggtgggtgattctccctccgttcctgtgaagaggtggtggtggtcggcctattgtgattcgatgtctacagacagttgtactgtactaatcgtgcctgtttagcggttgaacttggattccgttgtccgaaatttctaatccgaaagatggatttcattgtcttcttcttcttagcattatgtcactatctcacgtcgtcctgtctcaatacagtctaaggttcatgtgatgttatccccatttgtccacgcacaagtgaatgcagtcactatttcgattc

SEQ ID NO: 12299 - protein, 310 aa, Zea mays subsp. mays; identical to SEQ ID NO: 2382
  peptide (1)..(310): Ceres Seq. ID no. 12348833

SEQ ID NO: 12300 - protein, 202 aa, Zea mays subsp. mays; identical to SEQ ID NO: 2383
  peptide (1)..(202): Ceres Seq. ID no. 12348834

SEQ ID NO: 12301 - protein, 184 aa, Zea mays subsp. mays; identical to SEQ ID NO: 2384
  peptide (1)..(184): Ceres Seq. ID no. 12348835

SEQ ID NO: 12302 - DNA, 393 bp, Zea mays subsp. mays
  misc_feature (1)..(393): Ceres Seq. ID no. 1337693
  misc_feature (1)..(393): Ortholog of  Ceres SEQ ID NO 15171762 as cited in SEQ ID NO 57846
  misc_feature (1)..(393): Ortholog of  Ceres SEQ ID NO 12597287 as cited in SEQ ID NO 63982
tcaagaaagaagcatgctggacgatctcaaacatcacagctggtaacaaggagcagattcaggctgtgatcaatgcaaatataattgcacctctgshractcctgcaaactgctgaatttgacatcaagaaagaagcagcctgggcaatttcaaatgccacttctggtggcacacatgatcagatcaagtaccttgttgcccagggttgcattaagccactctgtgatctgcttgtttgcccggatcccagaatcgtaacagtttgcttggagggtctcgagaacatcctgaaggttggcgaggcagagaaaaaccttggtgcaggtgatgtcaatgtctatgcacagatgattsatgatgctgagggcctggacaagattgagaacctgcag

SEQ ID NO: 12303 - protein, 37 aa, Zea mays subsp. mays
  peptide (1)..(37): Ceres Seq. ID no. 1337694
  misc_feature (32)..(32): Xaa is any aa, unknown or other
KKEACWTISNITAGNKEQIQAVINANIIAPLXTPANC

SEQ ID NO: 12304 - protein, 34 aa, Zea mays subsp. mays
  peptide (1)..(34): Ceres Seq. ID no. 1337695
MPLLVAHMIRSSTLLPRVALSHSVICLFARIPES

SEQ ID NO: 12305 - DNA, 1862 bp, Zea mays subsp. mays
  misc_feature (1)..(1862): Ceres Seq. ID no. 12374063
  misc_feature (1)..(1862): Ortholog of  Ceres SEQ ID NO 14316382 as cited in SEQ ID NO 57756
accgaaaggagaaggcttcagccttcaagcgcacacaggcacgcaaatcccctcttcatcaacctcgactcgagtccgcgcgcgtccccgaatcgaggggagatgagtcgtccgcatgacggtcacaggtccttctttcccatggggaatcccttcaggatgattctcccaagaggagcccgcctgccaccgaagctcactgagctgctcacttcgtatgaggatggcctggcctcgagcttgaggaaggtcaagccagaggccacctcagaggtgttcacactatcatggatgaagctcgcagtggagtgcttatcagagctgcacaccaatatagccaccctgattactgagcttgagctgcccttatcagactgggatgagaagtgggtggacatttacctgaacagcagtgtgaagctgctggacatctgcattgccctgagctcggagctctctcggttggatcaagggcagctgcttgtgcgatatctcctgaatgtgttgaactctgggagcgacatgccatcccaggagcagctcaggagagctgaggtgtctcttaaggaatggatagagcgagcaagtgaaaggtctcccaggcttgatagttgcttggcagcgctacaggagctttctggaaaccttagcctgatgaaggttaggcattctgctaaggggaaagtgctcatgcgagcattgtatggaatcgaggctgttaccgtcttaatctgcagcgtacttgtagctgtactgtcgggtaccttcaagccactggtggactttgatgtccctgagaaatttggttggtctacggccttcattgatcttcagaaggccataagcggtgaacttagcaggcaactgtccagaggtagtgttgcagctgtaaaagagctggaggatgttgatgtatgtgctaaacagctgcatacattgacttgcactgttcagcttgaagaggagaatgccagcctggctcattcatttagccgttcaaaggaagtggtcctggcagatactacagcccagggaagaggccatgcggataatctcaagttggctgatgatagtagctgtcagcatgaagtgatcatgctgcaaagtattactacagaaggaggaatggatacagctgatatcaaggaggataccgagaccattggccatacaaaggaagtgatggcgcctgagaaaataattgacagaggacaccaagatgataacacaaagcaggacactggtgttgtcactgatatcagttgcttggaaaggagagaggaactgctgaactgcatctcccggatgtcgaaaagtgctgaaaggctccagttggggttggactcgctgtcgaagcgggtggatgacttcttccatattgtgcttacagggcgtgatgcactactttgtaatctcaggttttcaaacggcggcaaggttgctgcagaggtcaggtcttaatatgccatctcatgtttgtgccatgttatgcatgtatagtcagctcagcggcccatcgtgatgtgtggtgcttctgacttctggcccctgctcagctccaccaacactaagccggggccagatctcagaagcattgtgcatgatatgtgcctctagctgtgctgtgcaaaagcttatatagcttctctttttggttaagtatgaactagagttctgctgagtaaatagtgctgttaagttggtgtcgggtggaatgtacaccatctagagtagagcagctgtatgtatgctcatgtgtccttgtaagttgtaatggagatgaaaaatgagttgcaaaatgttgatccctgtttgtctgttggataacttaaactggtaatgtacaactttcaatgtacccg

SEQ ID NO: 12306 - protein, 486 aa, Zea mays subsp. mays
  peptide (1)..(486): Ceres Seq. ID no. 12374064
TERRRLQPSSAHRHANPLFINLDSSPRASPNRGEMSRPHDGHRSFFPMGNPFRMILPRGARLPPKLTELLTSYEDGLASSLRKVKPEATSEVFTLSWMKLAVECLSELHTNIATLITELELPLSDWDEKWVDIYLNSSVKLLDICIALSSELSRLDQGQLLVRYLLNVLNSGSDMPSQEQLRRAEVSLKEWIERASERSPRLDSCLAALQELSGNLSLMKVRHSAKGKVLMRALYGIEAVTVLICSVLVAVLSGTFKPLVDFDVPEKFGWSTAFIDLQKAISGELSRQLSRGSVAAVKELEDVDVCAKQLHTLTCTVQLEEENASLAHSFSRSKEVVLADTTAQGRGHADNLKLADDSSCQHEVIMLQSITTEGGMDTADIKEDTETIGHTKEVMAPEKIIDRGHQDDNTKQDTGVVTDISCLERREELLNCISRMSKSAERLQLGLDSLSKRVDDFFHIVLTGRDALLCNLRFSNGGKVAAEVRS

SEQ ID NO: 12307 - protein, 452 aa, Zea mays subsp. mays
  peptide (1)..(452): Ceres Seq. ID no. 12374065
MSRPHDGHRSFFPMGNPFRMILPRGARLPPKLTELLTSYEDGLASSLRKVKPEATSEVFTLSWMKLAVECLSELHTNIATLITELELPLSDWDEKWVDIYLNSSVKLLDICIALSSELSRLDQGQLLVRYLLNVLNSGSDMPSQEQLRRAEVSLKEWIERASERSPRLDSCLAALQELSGNLSLMKVRHSAKGKVLMRALYGIEAVTVLICSVLVAVLSGTFKPLVDFDVPEKFGWSTAFIDLQKAISGELSRQLSRGSVAAVKELEDVDVCAKQLHTLTCTVQLEEENASLAHSFSRSKEVVLADTTAQGRGHADNLKLADDSSCQHEVIMLQSITTEGGMDTADIKEDTETIGHTKEVMAPEKIIDRGHQDDNTKQDTGVVTDISCLERREELLNCISRMSKSAERLQLGLDSLSKRVDDFFHIVLTGRDALLCNLRFSNGGKVAAEVRS

SEQ ID NO: 12308 - protein, 439 aa, Zea mays subsp. mays
  peptide (1)..(439): Ceres Seq. ID no. 12374066
MGNPFRMILPRGARLPPKLTELLTSYEDGLASSLRKVKPEATSEVFTLSWMKLAVECLSELHTNIATLITELELPLSDWDEKWVDIYLNSSVKLLDICIALSSELSRLDQGQLLVRYLLNVLNSGSDMPSQEQLRRAEVSLKEWIERASERSPRLDSCLAALQELSGNLSLMKVRHSAKGKVLMRALYGIEAVTVLICSVLVAVLSGTFKPLVDFDVPEKFGWSTAFIDLQKAISGELSRQLSRGSVAAVKELEDVDVCAKQLHTLTCTVQLEEENASLAHSFSRSKEVVLADTTAQGRGHADNLKLADDSSCQHEVIMLQSITTEGGMDTADIKEDTETIGHTKEVMAPEKIIDRGHQDDNTKQDTGVVTDISCLERREELLNCISRMSKSAERLQLGLDSLSKRVDDFFHIVLTGRDALLCNLRFSNGGKVAAEVRS

SEQ ID NO: 12309 - DNA, 1701 bp, Zea mays subsp. mays
  misc_feature (1)..(1701): Ceres Seq. ID no. 12342304
  misc_feature (1)..(1701): Ortholog of  Ceres SEQ ID NO 15178246 as cited in SEQ ID NO 52038
atcttgcgcttaatccagtccgttcaattcttgacatccgaacaccccgccgacgcagccctagattccgcattcctctctgtcacctccgcggcgccgccagcccgccatcacataacttcggcttctatcccttcgtaaacccttctctcttcttcccgcggcctgctcgttctatctgtccagcagacttgaggttccgagcggccggaaaccagcggcaaccgtcggcatggcgctcgtattgcattctggggctggaaacaaaaatgccttcaaggcacttattgctgcagaatacagtggggtcaaggttgagttgaccaaggattttgagatgggtgtctcgaacaagacccctgagtttctaaagatgaacccccttgggaaggttcctgttctggagactcctgatggccctgtttttgagagtaatgctattgcgcgctatgttgctcgcttgaaggatgacaaccctcttttcgggtcttcccgtattgaacaagcccacgttgagcagtggatggactttgctgcaacagaagttgatcctggtgttggatggtacttgtatccaaggcttgggtacatcccttatgctcacacgactgaggaaacagctattgcttcattgaagagatcccttggtgctctgaacacacatcttgccttgaacacataccttgttggacattctgttactctagctgacattgtattgacatgcaacctctaccatggaattgcacggatcttgaccaaaagcttcacttctgatttccctcatgttgagaggtatttctggaccatggttaaccaacctaatttcaagaaggtcattggtgaggtcaagcaggcagagtctgtacctcctgttcttaaaaagggtgttcctcctaaggagtcaaaggcaaaggatgtgaagaaagaaactccaaaggaggcccccaagccaaaggtggttgaggtaccagcagaagaggaagcaccaaagccaaagccaaagaatcctcttgacttgctgccaccaagcaagatggtccttgatgactggaagaggctatactcaaacacaaagaccaacttccgggaggttgccatcaaaggtttctgggacatgtatgacccagagggctactctctgtggttctgtgactacaagtacaatgacgagaacaccgtctcctttgtgaccctgaacaaggttggtggattcctgcagcggatggacctgtgccgcaagtacgcctttggcaagatgctcgtggtaggttctgagccacccttcaagctgaagggcctttggctcttccgtggccaggaggttcccaagtttgtaatggatgaggtctatgacatggagctctacgagtggaccaaggtcgacatctctgatgaggcccagaaggagcgtgtcaatgccatgatcgaggaccaggaaccctttgagggcgaggccttgcttgacgcgaaatgcttcaagtgagtgtgctttatccagagctgtttagccctcgaattggatgtctatgttgatctggtatatcttgctatgaactggttaaggtttgtgctggtttgagaatttttgtttaccttctcatcatttaagtgtttcgccgtaacaattttggtcatgtttttgaaagcctgtttgtattcgcgtcgtagttggggctatttatgcagactatccgattt

SEQ ID NO: 12310 - protein, 417 aa, Zea mays subsp. mays
  peptide (1)..(417): Ceres Seq. ID no. 12342305
MALVLHSGAGNKNAFKALIAAEYSGVKVELTKDFEMGVSNKTPEFLKMNPLGKVPVLETPDGPVFESNAIARYVARLKDDNPLFGSSRIEQAHVEQWMDFAATEVDPGVGWYLYPRLGYIPYAHTTEETAIASLKRSLGALNTHLALNTYLVGHSVTLADIVLTCNLYHGIARILTKSFTSDFPHVERYFWTMVNQPNFKKVIGEVKQAESVPPVLKKGVPPKESKAKDVKKETPKEAPKPKVVEVPAEEEAPKPKPKNPLDLLPPSKMVLDDWKRLYSNTKTNFREVAIKGFWDMYDPEGYSLWFCDYKYNDENTVSFVTLNKVGGFLQRMDLCRKYAFGKMLVVGSEPPFKLKGLWLFRGQEVPKFVMDEVYDMELYEWTKVDISDEAQKERVNAMIEDQEPFEGEALLDAKCFK

SEQ ID NO: 12311 - protein, 382 aa, Zea mays subsp. mays
  peptide (1)..(382): Ceres Seq. ID no. 12342306
MGVSNKTPEFLKMNPLGKVPVLETPDGPVFESNAIARYVARLKDDNPLFGSSRIEQAHVEQWMDFAATEVDPGVGWYLYPRLGYIPYAHTTEETAIASLKRSLGALNTHLALNTYLVGHSVTLADIVLTCNLYHGIARILTKSFTSDFPHVERYFWTMVNQPNFKKVIGEVKQAESVPPVLKKGVPPKESKAKDVKKETPKEAPKPKVVEVPAEEEAPKPKPKNPLDLLPPSKMVLDDWKRLYSNTKTNFREVAIKGFWDMYDPEGYSLWFCDYKYNDENTVSFVTLNKVGGFLQRMDLCRKYAFGKMLVVGSEPPFKLKGLWLFRGQEVPKFVMDEVYDMELYEWTKVDISDEAQKERVNAMIEDQEPFEGEALLDAKCFK

SEQ ID NO: 12312 - protein, 370 aa, Zea mays subsp. mays
  peptide (1)..(370): Ceres Seq. ID no. 12342307
MNPLGKVPVLETPDGPVFESNAIARYVARLKDDNPLFGSSRIEQAHVEQWMDFAATEVDPGVGWYLYPRLGYIPYAHTTEETAIASLKRSLGALNTHLALNTYLVGHSVTLADIVLTCNLYHGIARILTKSFTSDFPHVERYFWTMVNQPNFKKVIGEVKQAESVPPVLKKGVPPKESKAKDVKKETPKEAPKPKVVEVPAEEEAPKPKPKNPLDLLPPSKMVLDDWKRLYSNTKTNFREVAIKGFWDMYDPEGYSLWFCDYKYNDENTVSFVTLNKVGGFLQRMDLCRKYAFGKMLVVGSEPPFKLKGLWLFRGQEVPKFVMDEVYDMELYEWTKVDISDEAQKERVNAMIEDQEPFEGEALLDAKCFK

SEQ ID NO: 12313 - DNA, 1331 bp, Zea mays subsp. mays
  misc_feature (1)..(1331): Ceres Seq. ID no. 12343309
  misc_feature (1)..(1331): Ortholog of  Ceres SEQ ID NO 12618559 as cited in SEQ ID NO 64385
accggaccaaccaggacttggagcgtgcggcgtcggagttcgccggcggtgaggagcagaagaggaagggaaccaaacaaagatgggctgctccatctcggggctcaacgcgctctacgacgcggccacgggcggcggcgacgtctggatcaacgagcgccgcttccgcgtccttcgccagatcggcgagggcgggttcgccttcgtctacctcgtcagagagcaccagcccgcctccgatgcggcgttcgctaggcgtgaccccgcccacgtctcagaggatggaacgtatgccatgaagaaggtgctgatacagagcaaggagcagttggatctggtgagggaggagatccgtgtgtcgtccttattcaatcaccccaaccttctgccgcttcttgatcatgccataatagccgtgaagggagattggagccatgaagcatacctacttttccctgttcatctggatggtactttgtttgacaacgctaacatcatgctgtccagaagggaattctattccacagctgatgttctgcaaatattccagcagatgtgtgaagggctgaaacacatgcacagctttgatcctccatacgctcataatgatgttaagcctggtaatgttcttataacctggcgtaaaggacaagcacctgttgcaactttaatggattttggaagtgcaaggcctgcaagaaaggaaatccgttctcgttctgaggcactacagttgcaggaatgggccgctgagcattgctctgctccttaccgggcccctgaattatgggactgcccaagccatgccgatattgatgagaggacagacatctggtctctaggatgcactctttttgctatcatgtacaatgtttcaccatttgagtatgctcttggtgaatctggaggaagtctgcaacttgccattgtaaacgggcagttgaaatggccagcaggacccaaacctccttatcctgatgaacttcgccattttgttatctggatgcttcaacctgaagctgcaatgcgccctcacatttctgatgtggttcttcatgttgacaagctcattgcaaaatacttgccctagatcagcctggagttcctctcatttctttgttatacagtacagagccaatatgatgtaaaatgggcccatgcttgacgtcattcagtccttggataggctcaatattgattctttcgtagaactttcaggatattacatcagtctaatgtctgtggatctttgatactcatggagtcacggtgtcatgtaaaaatgtcaaactgaacatcaaagcagctatatgatatccttgcacttgggc

SEQ ID NO: 12314 - protein, 335 aa, Zea mays subsp. mays
  peptide (1)..(335): Ceres Seq. ID no. 12343310
MGCSISGLNALYDAATGGGDVWINERRFRVLRQIGEGGFAFVYLVREHQPASDAAFARRDPAHVSEDGTYAMKKVLIQSKEQLDLVREEIRVSSLFNHPNLLPLLDHAIIAVKGDWSHEAYLLFPVHLDGTLFDNANIMLSRREFYSTADVLQIFQQMCEGLKHMHSFDPPYAHNDVKPGNVLITWRKGQAPVATLMDFGSARPARKEIRSRSEALQLQEWAAEHCSAPYRAPELWDCPSHADIDERTDIWSLGCTLFAIMYNVSPFEYALGESGGSLQLAIVNGQLKWPAGPKPPYPDELRHFVIWMLQPEAAMRPHISDVVLHVDKLIAKYLP

SEQ ID NO: 12315 - protein, 264 aa, Zea mays subsp. mays
  peptide (1)..(264): Ceres Seq. ID no. 12343311
MKKVLIQSKEQLDLVREEIRVSSLFNHPNLLPLLDHAIIAVKGDWSHEAYLLFPVHLDGTLFDNANIMLSRREFYSTADVLQIFQQMCEGLKHMHSFDPPYAHNDVKPGNVLITWRKGQAPVATLMDFGSARPARKEIRSRSEALQLQEWAAEHCSAPYRAPELWDCPSHADIDERTDIWSLGCTLFAIMYNVSPFEYALGESGGSLQLAIVNGQLKWPAGPKPPYPDELRHFVIWMLQPEAAMRPHISDVVLHVDKLIAKYLP

SEQ ID NO: 12316 - protein, 197 aa, Zea mays subsp. mays
  peptide (1)..(197): Ceres Seq. ID no. 12343312
MLSRREFYSTADVLQIFQQMCEGLKHMHSFDPPYAHNDVKPGNVLITWRKGQAPVATLMDFGSARPARKEIRSRSEALQLQEWAAEHCSAPYRAPELWDCPSHADIDERTDIWSLGCTLFAIMYNVSPFEYALGESGGSLQLAIVNGQLKWPAGPKPPYPDELRHFVIWMLQPEAAMRPHISDVVLHVDKLIAKYLP

SEQ ID NO: 12317 - DNA, 1047 bp, Zea mays subsp. mays
  misc_feature (1)..(1047): Ceres Seq. ID no. 12593638
  misc_feature (1)..(1047): Ortholog of  Ceres SEQ ID NO 14301396 as cited in SEQ ID NO 51789
  misc_feature (1)..(1047): Ortholog of  Ceres SEQ ID NO 12610031 as cited in SEQ ID NO 55811
  misc_feature (1)..(1047): Ortholog of  Ceres SEQ ID NO 12619664 as cited in SEQ ID NO 66048
gcacgagaccattacctagaacatcctaatcgaaaaatcacccctcgttgtcatctcatatcctgagccagagatcaaagaaaccagagggagcgaggcatggcagcaggcttgcaggtgtttggccagccggcgtctactgatgtctccagggttctgacatgcctgtttgagaagaaactggagttcgatcttgtccgcatcgatacgttcaagacgcatcacaagcttcccgagttcatcaggcttcgggatcctaatgggcaagtgaccttgaagcacggcgacaaaactctcgttgattcgagggacatctgccggtacgtctgcacccagtttccaaacgatggaaacaagagcctttacggatccggcgctctagaacgggcgtcgatagaacagtggcttcaggcggaggctcagaacttcgggccccccagctccgcgctcgtcttccagctggcgttcgtccctcacctcactcacctgggcgttcgtcaggaccctgccgtgatcgccgagaacgaggataagctgaagcaggtccttgatgtctacgacgagatactctcgaggaacgagtacctggctggcgacgagttcaccctggccgacctctcccacctcccgaactcgcactacatcgtgaacaccgagagaggaaggaagctcttcactaacaagaagaacgtggccaagtggtacgagaagctctcgaagcgcgagacgtggaagcaggtcgctaagatgcagaaggaacatcctggtgcgttcgagtgattgcttgtcttggggggagctgcgagtgcaccatcatgaatggcttcatcgtctgtgtcggtctggctctacagttcattttgttttgagtgatccattgtttaattcctcctatcagtgttgtcgtgtgcaccaaaaataatgtgaagcccagctgtgatgtatatgatccttttgctctaatctatcatgacgtataagctcgatctctgaccttgtacgcacagtattttttttactgatgatttcgatcgagacatacagtcg

SEQ ID NO: 12318 - protein, 226 aa, Zea mays subsp. mays
  peptide (1)..(226): Ceres Seq. ID no. 12593639
MAAGLQVFGQPASTDVSRVLTCLFEKKLEFDLVRIDTFKTHHKLPEFIRLRDPNGQVTLKHGDKTLVDSRDICRYVCTQFPNDGNKSLYGSGALERASIEQWLQAEAQNFGPPSSALVFQLAFVPHLTHLGVRQDPAVIAENEDKLKQVLDVYDEILSRNEYLAGDEFTLADLSHLPNSHYIVNTERGRKLFTNKKNVAKWYEKLSKRETWKQVAKMQKEHPGAFE

SEQ ID NO: 12319 - DNA, 1318 bp, Zea mays subsp. mays
  misc_feature (1)..(1318): Ceres Seq. ID no. 12366785
  misc_feature (1)..(1318): Ortholog of  Ceres SEQ ID NO 15177787 as cited in SEQ ID NO 59431
  misc_feature (1)..(1318): Ortholog of  Ceres SEQ ID NO 14307004 as cited in SEQ ID NO 59551
  misc_feature (1)..(1318): Ortholog of  Ceres SEQ ID NO 12617197 as cited in SEQ ID NO 63406
  misc_feature (1)..(1318): Ortholog of  Ceres SEQ ID NO 13597804 as cited in SEQ ID NO 64182
  misc_feature (1)..(1318): Ortholog of  Ceres SEQ ID NO 14302768 as cited in SEQ ID NO 64889
  misc_feature (1)..(1318): Ortholog of  Ceres SEQ ID NO 14301622 as cited in SEQ ID NO 65156
  misc_feature (1)..(1318): Ortholog of  Ceres SEQ ID NO 13598565 as cited in SEQ ID NO 65250
  misc_feature (1)..(1318): Ortholog of  Ceres SEQ ID NO 13598597 as cited in SEQ ID NO 65496
  misc_feature (1)..(1318): Ortholog of  Ceres SEQ ID NO 13596284 as cited in SEQ ID NO 68273
  misc_feature (1)..(1318): Ortholog of  Ceres SEQ ID NO 13600175 as cited in SEQ ID NO 0
  misc_feature (1)..(1318): Ortholog of  Ceres SEQ ID NO 14308995 as cited in SEQ ID NO 0
actgtggaagaaccgttgagctgagccgagcagggagaaggacgcgagagcagcatggagacggcggagaggggcaccaccgtgtgcgtgaccggcgcggggggctttgtggcatcgtggctcgtcaagctcctcctctccaccggccgctacaccgtccggggtaccgtgcgtcatctcggtgatggcaagaatgcccatcttaagacactggaagatgccggggagaggctgcagttggtcaaggctgacatgctggactatggcagcgttgcgtccgcggtcgccggctgtcagggtgtcttccatgtcgcgagccctgtcccctccggcaaatcctccaaccctgaggaagatgtcattgctcctgctgtaactggcacactgaatgtgttgaaagcttgctatgaggccaaagcgaagagagttgttgtggtatcttcagtggctgctgtgttcaataatcctgactggcctaagggcgaggcctttactgaggatagctggtcagatggggaatattgcagaaaaaatgaggaatggtatttcctttctaaaacattggcagaacatgaggcttttgcttatgcagccaaaactgggctagacattgtaactatttgcccatcattggtaattggacctttgttgcaacctgcagtaaatacaagtattaaagtcttcctcagttatatcaaaggagatcaggagatagttaaagatggacccaaaaatcttgtggatgttcgtgatgtcgctggtgcccttctgttggcttacgaaaatctgcaggcatctggacgatacctctgcagctcaccagcaataagagtctctgatattgtaaacatactgaagaccgaatatccaacatacacttaccctcaaaaattcgttgaagcagaaggtagcaacacatacaacacggagaagcttcggaagctagggtggacctctaggcccatggaggaaaccctccgggacagcatcgaatgctacagagctttgggcatcctgaactgagcttcccttcagctttgggctttggctgctgctgctgctgctacttttcagcttctttcttcttcatgtaaacagtgaatcagaaattcagaatacgctggtataggaactagagaagtggatcatggaagatgctgatgctaaaaatgaatttggatactatccatcatttgtgcctgcgggattgagggcaaattaattaagtacttatatttgtaaatctggggccgtcgaactgaaccaacaatgaagaggtgaagaacaaatcgaagtggtagatgagtgcattgctgtg

SEQ ID NO: 12320 - protein, 322 aa, Zea mays subsp. mays
  peptide (1)..(322): Ceres Seq. ID no. 12366786
METAERGTTVCVTGAGGFVASWLVKLLLSTGRYTVRGTVRHLGDGKNAHLKTLEDAGERLQLVKADMLDYGSVASAVAGCQGVFHVASPVPSGKSSNPEEDVIAPAVTGTLNVLKACYEAKAKRVVVVSSVAAVFNNPDWPKGEAFTEDSWSDGEYCRKNEEWYFLSKTLAEHEAFAYAAKTGLDIVTICPSLVIGPLLQPAVNTSIKVFLSYIKGDQEIVKDGPKNLVDVRDVAGALLLAYENLQASGRYLCSSPAIRVSDIVNILKTEYPTYTYPQKFVEAEGSNTYNTEKLRKLGWTSRPMEETLRDSIECYRALGILN

SEQ ID NO: 12321 - protein, 256 aa, Zea mays subsp. mays
  peptide (1)..(256): Ceres Seq. ID no. 12366787
MLDYGSVASAVAGCQGVFHVASPVPSGKSSNPEEDVIAPAVTGTLNVLKACYEAKAKRVVVVSSVAAVFNNPDWPKGEAFTEDSWSDGEYCRKNEEWYFLSKTLAEHEAFAYAAKTGLDIVTICPSLVIGPLLQPAVNTSIKVFLSYIKGDQEIVKDGPKNLVDVRDVAGALLLAYENLQASGRYLCSSPAIRVSDIVNILKTEYPTYTYPQKFVEAEGSNTYNTEKLRKLGWTSRPMEETLRDSIECYRALGILN

SEQ ID NO: 12322 - DNA, 1494 bp, Zea mays subsp. mays
  misc_feature (1)..(1494): Ceres Seq. ID no. 12383105
  misc_feature (1)..(1494): Ortholog of  Ceres SEQ ID NO 13582388 as cited in SEQ ID NO 56812
  misc_feature (1)..(1494): Ortholog of  Ceres SEQ ID NO 14305353 as cited in SEQ ID NO 57710
atgctacgccaagcgcgcaattaaccctcactaaagggaacaaaagctggagctccaccgcggtggcggccgctctagaactagtggatcccccgggctgcaggaattcgcacgagaccattacctagaacatcctaatcaaaaagatcgaaacgaaaaggcagagagggagggatctccgtctccacgccgcgtcctcccgcacgaatccgcgctccggccaacgggccaagccctagccacccccgcccattcatggtgggcgggccgtgagatctctagggaggcttgtcggcttcgtcgggcgggaggggaggagatgggcgcccggaacagcgctgccgccacgccggtgctgctcaacgtgtacgaccttacggccgcgaacgattacctctactggctcggcttcggcgtcttccactccggaatcgaagtccatggcacggaatatgggtttggagcccacgactacccatccagtggtgtgtttgaggtggaatcaaagagttgccctggctttatctacagaagaacagtgtggctaggcacaacagacatgtctcaggaagaattccgctcgtttattgaaaaacttgcaggtgattatcatggcgacacatatcatttaattaacaagaactgcaatcacttcacagatgatgtctgccagaacttaactgggaaacccatcccttcctgggtgaataggcttgcaagagtagggtcagttttcgattgccttcttccagaaagcgtacaagtttctcctgtaggtcgtgtcccaacgagtcggcgaatatctgatgatgatttgtattcaatacattcaccaatggccgacaaagatgacaatgatgaggacgaggccaaacacctgctgccagctccatccaacgaccagctttctgtagatgtaccgccaaagctagcgaaagatcttctctgaaccactccatgttcataggcgcctaccatacttcaactcatatagccattggtgctaaagtgatcctcaagatggcttgacacagatagggattgggcatatttgattaaagatgaagctctaatttcttgtggcttaccagtttgcagtttcaccttgctgtctcatctcagcaaacagttgtcatctatggtagtagtggcatgattgttaccctgccatttagcacatctggaaattgccaatttggaatgtggggttccggtacctgttaggaatcaggactgtcgatgcttgttgagccccagtgttgaaggcacatactgtaacatgttactatcaaaaacagtgtacatgtacatggctaccgagtatttgccacgaatccaaatgagcgaatctctgttgggctgcttaagcgcctgtagtgacatggaacatctttttgttccgggctattgaacatcgaacattcgaacccaaccatgtggttctgtcgctgatgcctgttatgctgtaataatgtgagattactttttgctgtc

SEQ ID NO: 12323 - protein, 209 aa, Zea mays subsp. mays
  peptide (1)..(209): Ceres Seq. ID no. 12383106
MGARNSAAATPVLLNVYDLTAANDYLYWLGFGVFHSGIEVHGTEYGFGAHDYPSSGVFEVESKSCPGFIYRRTVWLGTTDMSQEEFRSFIEKLAGDYHGDTYHLINKNCNHFTDDVCQNLTGKPIPSWVNRLARVGSVFDCLLPESVQVSPVGRVPTSRRISDDDLYSIHSPMADKDDNDEDEAKHLLPAPSNDQLSVDVPPKLAKDLL

SEQ ID NO: 12324 - protein, 129 aa, Zea mays subsp. mays
  peptide (1)..(129): Ceres Seq. ID no. 12383107
MSQEEFRSFIEKLAGDYHGDTYHLINKNCNHFTDDVCQNLTGKPIPSWVNRLARVGSVFDCLLPESVQVSPVGRVPTSRRISDDDLYSIHSPMADKDDNDEDEAKHLLPAPSNDQLSVDVPPKLAKDLL

SEQ ID NO: 12325 - DNA, 1140 bp, Zea mays subsp. mays
  misc_feature (1)..(1140): Ceres Seq. ID no. 12411567
  misc_feature (1)..(1140): Ortholog of  Ceres SEQ ID NO 15168977 as cited in SEQ ID NO 20587
aagaagagtggcaaacatgcactcaggcattggacttcggatggatgcaaatggcgaagccagtgatgaatttatatacagaagcaactgatggatcctacattgaggccaaggaaagtgccttggtgtggcaccatcaggatgctgacctaggctttggatcctcacaggcaaaggagatgcttgatcacctggaaagtgtactagcaaatgaaccagtctctgtcaagagtggccagttcattgttgaagtcaaaccacagggaataagcaagggaatagttgccgagaggatacttgcatcagtgaaggagagaggaaagcaggctgatttcttattgtgcatcggcgatgataggtctgatgaggacatgtttgaaaatattgctgatatcattgggaggaatttggttgctccaagaacagcactgtttgcgtgcactgtgggacaaaaaccaagcaaagccaaattctacctggatgatacattcgaagtggtcactatgctgagcgcactggcagatgccacaggtcctgaactggagactgattcggctgatgaatctgtcgcatatatctcatcacttgatattggtgacgaacaatcagaatccagtgataaaccagttgaagggtcttagccagttttctcttgcgttttcagaacatgatgattgtttcaatagtcaattctattctacacaattttctgatgggaactcaacgactaacaactggttctacgaatgctccagagtgaagcttctcaatctgctgtgctccaagttctccagttgggcaagatagtacagtctgttgctccaaggcgtagatccatatgttcatagctgacttacttggcacgttctttcactttctcattcctggttgaattaaaatgaaaacctcacagaagacaaagggagcgctgtttggctcattggctgaagtaatctggggggaggtataggagtggcgtatgtgaaaggagcctgtgcgcaggttgtgatatgattccttattaacacgacgttacaaagtggtgtcacttcttgaactaccagtagtaacaatcccaagagtgaggttcgaattgattaattaattgcttcaaagccagatctcggatggttttgctcc

SEQ ID NO: 12326 - protein, 212 aa, Zea mays subsp. mays
  peptide (1)..(212): Ceres Seq. ID no. 12411568
EEWQTCTQALDFGWMQMAKPVMNLYTEATDGSYIEAKESALVWHHQDADLGFGSSQAKEMLDHLESVLANEPVSVKSGQFIVEVKPQGISKGIVAERILASVKERGKQADFLLCIGDDRSDEDMFENIADIIGRNLVAPRTALFACTVGQKPSKAKFYLDDTFEVVTMLSALADATGPELETDSADESVAYISSLDIGDEQSESSDKPVEGS

SEQ ID NO: 12327 - protein, 198 aa, Zea mays subsp. mays
  peptide (1)..(198): Ceres Seq. ID no. 12411569
MQMAKPVMNLYTEATDGSYIEAKESALVWHHQDADLGFGSSQAKEMLDHLESVLANEPVSVKSGQFIVEVKPQGISKGIVAERILASVKERGKQADFLLCIGDDRSDEDMFENIADIIGRNLVAPRTALFACTVGQKPSKAKFYLDDTFEVVTMLSALADATGPELETDSADESVAYISSLDIGDEQSESSDKPVEGS

SEQ ID NO: 12328 - protein, 196 aa, Zea mays subsp. mays
  peptide (1)..(196): Ceres Seq. ID no. 12411570
MAKPVMNLYTEATDGSYIEAKESALVWHHQDADLGFGSSQAKEMLDHLESVLANEPVSVKSGQFIVEVKPQGISKGIVAERILASVKERGKQADFLLCIGDDRSDEDMFENIADIIGRNLVAPRTALFACTVGQKPSKAKFYLDDTFEVVTMLSALADATGPELETDSADESVAYISSLDIGDEQSESSDKPVEGS

SEQ ID NO: 12329 - DNA, 1495 bp, Zea mays subsp. mays
  misc_feature (1)..(1495): Ceres Seq. ID no. 12411561
  misc_feature (1)..(1495): Ortholog of  Ceres SEQ ID NO 13596918 as cited in SEQ ID NO 62406
ctggatggctaggcccaaccaaacacgacggcccacgggtgcacctgaggcggcgcacgttgccgactcggctgtctcgtcttccttgtgcttcgcgcactcgccgcccctgcgccctgcgggcagtctcttcttgccctttctcctgtgcgcagccgcggcggacccaatctcgcattctcgcgttccgagatactgttgttctttcagggagatagatagattccgactgctcgccattggggctgccttggccgcgtgccatccgtcgcttcgtcgagctgcgtgcgggggcgctcctcgtcctcctcacgatggggggctggaaccggtcgctgtacgtgacgggccaccgtgaccgctccgccggcgcttcgcgtactcctctgcctccgccttcgcctgattacggagacaagcaccagcaagtcccattatgggagagggaattctgccgccacgttggcgacatcacttgggagcgtttctgtgaaaacaagcagtatgttggacaattccataatcacgagccttgggatgattcagcggcatttgattgtttccagaacgcaaaggcaaggttctgggcgagctaccatggccagccttctgacattcctttgctggacgacccggatctgtacatcgacaaggtcgaccaccaatgcgaagtcgacccggagttggtagctgatctggatagcgtagggctaccgttcgagtcggatgataatcccgcctcagccaaagggtggaccaatgcttgggccaacaacaagtgcacccagaacgggtctggaaactgggacgccttcgtagaaaagccagctgaagtcagtaagtgggactccgaggccaatctcgcatccaacacgacttggggcggccaggccaatgtagcaacacctgaggcggtttggagaggccaatctttcagtaaatggggcaatgatagcaacaccagccggggtgttcctctggagaagccgagctggcgtggctgtagcaagaaccgctacacacccaacagctggagcagcaactttcatagcagaccatccgacaataggtaccagcagctggaggatccgagctacacttctgggactggaaggaaatggaatggcggcgacggcggctggtacgtcaagcagaggaaccaggaccaggggcagcaccagcagccgaggagtggcagctggcagcaggaccaaagaagaaggagcaggcagtggcgtccggtgcacagcagggctccctaaaacggtccggcgtcttgatctcgtggcgagactcgcaggtgtcttcttttgtgcagtcagttttcagctgctgctggcaaagtggtgcctgtaaatagatgttttttgttgttgttttgtttgagttgtatgctgcagctgctccttcgcagctgcgtccttactttgcttatggtgcaatgttaatatgttataatgttagttaatatggggagcatcacagtttttggttc

SEQ ID NO: 12330 - protein, 315 aa, Zea mays subsp. mays
  peptide (1)..(315): Ceres Seq. ID no. 12411562
MGGWNRSLYVTGHRDRSAGASRTPLPPPSPDYGDKHQQVPLWEREFCRHVGDITWERFCENKQYVGQFHNHEPWDDSAAFDCFQNAKARFWASYHGQPSDIPLLDDPDLYIDKVDHQCEVDPELVADLDSVGLPFESDDNPASAKGWTNAWANNKCTQNGSGNWDAFVEKPAEVSKWDSEANLASNTTWGGQANVATPEAVWRGQSFSKWGNDSNTSRGVPLEKPSWRGCSKNRYTPNSWSSNFHSRPSDNRYQQLEDPSYTSGTGRKWNGGDGGWYVKQRNQDQGQHQQPRSGSWQQDQRRRSRQWRPVHSRAP

SEQ ID NO: 12331 - DNA, 1745 bp, Zea mays subsp. mays
  misc_feature (1)..(1745): Ceres Seq. ID no. 12374204
  misc_feature (1)..(1745): Ortholog of  Ceres SEQ ID NO 13597732 as cited in SEQ ID NO 64810
  misc_feature (1)..(1745): Ortholog of  Ceres SEQ ID NO 14301912 as cited in SEQ ID NO 67786
gtccttccctccgcctccgcccccgcccactcctggcttccaccactcctgtcacctcttcccgcgccgacgcagccgccatggaccccgtctccacatgggggctaaccccgctcgcgggcgccgacccggagatctacgacctcctggagcgcgagaagcggcgccagcgtcgcggcatcgagctcatcgcctccgagaacttcacctccttcgccgtcatggaggcgctcggctccgcgctcactaacaagtactccgagggcatgcccggcgcccgctactacggcggcaacgacgtcatcgacgagatcgagaacctctgccggtcacgcgcgctcgctgccttccaccttgacgccgcgtcctggggcgtcaacgtgcagccctactcgggctcccccgccaacttcgccgcctacaccgcgctgctcaacccgcacgaccggatcatggggctcgaccttccctccggcggacacctcactcacgggtactacacggccggcggtaagaagatctccgccacctcgatctactttgagagcctgccgtacaaggtgagcgccgcaacggggtacatcgactacgagaagctcgaggagaaggcacttgacttccgccccaagctcatcatctgcggtggcagtgcgtacccgagggactgggattacgccaggctcagggccgtcgccgacaaggtcggggccctgctgctctgcgacatggcgcacatcagcgggctcgtcgccgcgcaggaagctgcaaatccttttgaatattgtgatgtggttaccacaaccacgcacaagtccctcagagggccaagggctggcatgatcttctacaggaaaggccctaagccccccaagaagggccagcctgagggtgctgtttatgattacgaagacaagatcaactttgcagtgttcccatctctccaaggtggccctcacaaccaccagattgctgcacttgctgttgctctacagcaaactatgtcgcctggcttcaaggcctatgcaaagcaagtgaaggccaatgctgttgcaattggaaactatctcatgagcaagggctacaagatggtgactgatggaactgagaaccaccttgttctctgggatctccgcccccttggcttgactggaaacaaggtcgaaaagctatgtgatctttgccacatcacattgaacaagaatgctgtcttcggtgacagcagtgcattgtctccgggtggtgtccgcattggcgcgccagcaatgacctcgaggggtctactggagaaggatttcgagcagattggggagttcctccaccaggcagtgaccatctgcctgaacatccagaaggagtacggcaagctcctcaaggacttcaacaagggcctggtgaacaacaaggacatcgagaacctcaaggtccaggtggagaagtttgccgactccttcgacatgcctgggttcacgcttgagagcatgaaatacaaggagtagacatgcctcccatgcgcggcaaggtcctcctgtaccgatgtctttccttgtggtggcgcagggtgccatggcactgcactgccgccacacttacgatgatgatggtgggttatggattttgtctacaatgtcagcaggataggctcacaattgccccctgccctccggtttggtcgcctctcaggttttcatttggtagttgttcgcagggaaccatatgagaattgcaatgtcaatcaggtgtttgcc

SEQ ID NO: 12332 - protein, 497 aa, Zea mays subsp. mays
  peptide (1)..(497): Ceres Seq. ID no. 12374205
PSLRLRPRPLLASTTPVTSSRADAAAMDPVSTWGLTPLAGADPEIYDLLEREKRRQRRGIELIASENFTSFAVMEALGSALTNKYSEGMPGARYYGGNDVIDEIENLCRSRALAAFHLDAASWGVNVQPYSGSPANFAAYTALLNPHDRIMGLDLPSGGHLTHGYYTAGGKKISATSIYFESLPYKVSAATGYIDYEKLEEKALDFRPKLIICGGSAYPRDWDYARLRAVADKVGALLLCDMAHISGLVAAQEAANPFEYCDVVTTTTHKSLRGPRAGMIFYRKGPKPPKKGQPEGAVYDYEDKINFAVFPSLQGGPHNHQIAALAVALQQTMSPGFKAYAKQVKANAVAIGNYLMSKGYKMVTDGTENHLVLWDLRPLGLTGNKVEKLCDLCHITLNKNAVFGDSSALSPGGVRIGAPAMTSRGLLEKDFEQIGEFLHQAVTICLNIQKEYGKLLKDFNKGLVNNKDIENLKVQVEKFADSFDMPGFTLESMKYKE

SEQ ID NO: 12333 - protein, 471 aa, Zea mays subsp. mays
  peptide (1)..(471): Ceres Seq. ID no. 12374206
MDPVSTWGLTPLAGADPEIYDLLEREKRRQRRGIELIASENFTSFAVMEALGSALTNKYSEGMPGARYYGGNDVIDEIENLCRSRALAAFHLDAASWGVNVQPYSGSPANFAAYTALLNPHDRIMGLDLPSGGHLTHGYYTAGGKKISATSIYFESLPYKVSAATGYIDYEKLEEKALDFRPKLIICGGSAYPRDWDYARLRAVADKVGALLLCDMAHISGLVAAQEAANPFEYCDVVTTTTHKSLRGPRAGMIFYRKGPKPPKKGQPEGAVYDYEDKINFAVFPSLQGGPHNHQIAALAVALQQTMSPGFKAYAKQVKANAVAIGNYLMSKGYKMVTDGTENHLVLWDLRPLGLTGNKVEKLCDLCHITLNKNAVFGDSSALSPGGVRIGAPAMTSRGLLEKDFEQIGEFLHQAVTICLNIQKEYGKLLKDFNKGLVNNKDIENLKVQVEKFADSFDMPGFTLESMKYKE

SEQ ID NO: 12334 - protein, 424 aa, Zea mays subsp. mays
  peptide (1)..(424): Ceres Seq. ID no. 12374207
MEALGSALTNKYSEGMPGARYYGGNDVIDEIENLCRSRALAAFHLDAASWGVNVQPYSGSPANFAAYTALLNPHDRIMGLDLPSGGHLTHGYYTAGGKKISATSIYFESLPYKVSAATGYIDYEKLEEKALDFRPKLIICGGSAYPRDWDYARLRAVADKVGALLLCDMAHISGLVAAQEAANPFEYCDVVTTTTHKSLRGPRAGMIFYRKGPKPPKKGQPEGAVYDYEDKINFAVFPSLQGGPHNHQIAALAVALQQTMSPGFKAYAKQVKANAVAIGNYLMSKGYKMVTDGTENHLVLWDLRPLGLTGNKVEKLCDLCHITLNKNAVFGDSSALSPGGVRIGAPAMTSRGLLEKDFEQIGEFLHQAVTICLNIQKEYGKLLKDFNKGLVNNKDIENLKVQVEKFADSFDMPGFTLESMKYKE

SEQ ID NO: 12335 - DNA, 1381 bp, Zea mays subsp. mays
  misc_feature (1)..(1381): Ceres Seq. ID no. 12351768
  misc_feature (1)..(1381): Ortholog of  Ceres SEQ ID NO 14313268 as cited in SEQ ID NO 66794
aaaaaacctctaccttctatgagccaagtaaagagagaagccgataaactgtgtttcacgtcccggcgatgagcccccgtgtggtcctcctcttcctcgccgccctccgcccctgcgccgccctcgtccgccttcactccaccactttttccttcactttccttgacgccccagcgcgctttggcccccgagtgagcggcgatgggatctgcggctccctgcgtgccgctgacccggccgaggcgtgtgagaccatcaaagaccgcggcggccgccgcggcgcgggcaggaaggctttcgtgctgatcgcgaggggcaactgcagctttgaggagaaggtgcgggcggcgcagcaagcggggttcgacgcctccatcgtgtacgacgatgaggagaaggccagcctttactccatggttggtgaatctgatggcatacacatacctgcgatatttgtttccaagatggctggtgaaacactaaagaagtttgccaggggtgaagatgaagagtgctgtattaactcgtcgatggatgagactgcagggacagtgttggtaatgtcatttgtgtcacttgttgtcatcatgtcagttcttgcttcttttctatttgctcgaaactgccgacttctacgccatggagttgataatcacccaccttacgtcaagaaacaagtggtggaaaagtttccctgctcagcgtacagtgctccctgttctagtgaagataatttccaggaagcttgtgcaatttgcttagaagactacaataatggtgatatgcttagacatctcccatgcaagcatgaatttcacaagatctgtattgattcttggctcacaaaatggggcatcttctgccctatatgcaagctagaagtaacattgggcgggtaggcacacttcattactgcatccaagtgctggcagttctattgaagattgttgatcttttgatccattgcgaggttcaatattcattttaatgattgatctttgagaatgaagtacagatctcagttcctcaggttgggccttgtagtgtgctactagactactgcgttcaggttaatatttcgatcatctgtttgatatccttgtttggtgtgtggaagagctcaaggagctctgctgctgataaatgtcagcacttctgttgcagtgtattgccctgtattcctagagaaattaggtgttgtgtgcaagcaaagtgtaatcgtaagtccaatgtaaaccccttttataccaggttacgttaccttgctcattttattttgtgggcacagataaatgctcgttaattaggcaggggttgatcttactctaaaaaattgtcctaaggctcagaaataacgatgtttgaagatgcatttgttgcg

SEQ ID NO: 12336 - protein, 276 aa, Zea mays subsp. mays
  peptide (1)..(276): Ceres Seq. ID no. 12351769
MSPRVVLLFLAALRPCAALVRLHSTTFSFTFLDAPARFGPRVSGDGICGSLRAADPAEACETIKDRGGRRGAGRKAFVLIARGNCSFEEKVRAAQQAGFDASIVYDDEEKASLYSMVGESDGIHIPAIFVSKMAGETLKKFARGEDEECCINSSMDETAGTVLVMSFVSLVVIMSVLASFLFARNCRLLRHGVDNHPPYVKKQVVEKFPCSAYSAPCSSEDNFQEACAICLEDYNNGDMLRHLPCKHEFHKICIDSWLTKWGIFCPICKLEVTLGG

SEQ ID NO: 12337 - protein, 161 aa, Zea mays subsp. mays
  peptide (1)..(161): Ceres Seq. ID no. 12351770
MVGESDGIHIPAIFVSKMAGETLKKFARGEDEECCINSSMDETAGTVLVMSFVSLVVIMSVLASFLFARNCRLLRHGVDNHPPYVKKQVVEKFPCSAYSAPCSSEDNFQEACAICLEDYNNGDMLRHLPCKHEFHKICIDSWLTKWGIFCPICKLEVTLGG

SEQ ID NO: 12338 - protein, 144 aa, Zea mays subsp. mays
  peptide (1)..(144): Ceres Seq. ID no. 12351771
MAGETLKKFARGEDEECCINSSMDETAGTVLVMSFVSLVVIMSVLASFLFARNCRLLRHGVDNHPPYVKKQVVEKFPCSAYSAPCSSEDNFQEACAICLEDYNNGDMLRHLPCKHEFHKICIDSWLTKWGIFCPICKLEVTLGG

SEQ ID NO: 12339 - DNA, 1362 bp, Zea mays subsp. mays
  misc_feature (1)..(1362): Ceres Seq. ID no. 12342370
  misc_feature (1)..(1362): Ortholog of  Ceres SEQ ID NO 13593379 as cited in SEQ ID NO 20573
ctacctttcatatactaccagggtgaacatttctgaagaggatgttttatattggaattccaaaggttttcttccatcactaagcatagatcaaatccgcgatgtagcacgtgtatttgtaaatgggaagcttgcaggtagtaaagttggtcattgggtctcactgaatcaaccgcttcaattagttcaaggacttaatgagttgacattgttatcggagattgttggcttgcagaactatggtgctttcttggagaaggatggtgctggatttagaggtcaagtaaaactcactggcttgtcgaatggggatatcgaccttactaattctctttggacatatcagattggtttgaaaggtgagttttcaaggatctattctcctgagtatcaaggatctgctgagtggagtagcatgcagaatgatgacacagtttcacccttcacatggttcaagactatgtttgatgctccagaaggtaatggccctgttgccattgatcttgggagcatgggaaagggccaggcttgggtgaatgggcatctcattgggcgctattggtcactagttgcgccagagtccgggtgtccatcgtcatgcaactacgcaggaacatacagtgatagcaagtgccgatcgaactgtggaatcgctacacaaagctggtaccacataccacgcgaatggttgcaagagtcaggcaatttattggtactcttcgaggaaacagggggagacccatctcagatatcgctggaggttcattacaccaagacaatctgctcaaaaatatctgagacttactatcctcccctttctgcctggtcacgtgccgccaacggtcgcccctcagtaaatacggtagcaccagagcttcgcttgcagtgcgatgacgggcatgtgatctcgaagattacatttgcgagttacgggacccctacaggaggttgccagaacttctctgtagggaattgccatgcatcgactactctagacttggtggtagaggcctgcgaaggcaagaacagatgcgcgatcagtgttaccaacgaagtattcggagatccatgccgcaaagtcgtcaaggatttggcagttgaagccgagtgctccccgccatcggttaaccaagaacctcgatacgatatatgatcacggtactgtattgtggtgctcaggtcttggaagagctatggtggacgttgccgcagctttgcagggccgtgcacaatggtcctgcatcgttgtctcctatacctctgcacccatattgtatgtaaacagtgacctacatgtaaaaactaaagaagaggagggattgaaaagaaatgagatggaaaaagaataaagttgcttttgct

SEQ ID NO: 12340 - protein, 383 aa, Zea mays subsp. mays
  peptide (1)..(383): Ceres Seq. ID no. 12342371
YLSYTTRVNISEEDVLYWNSKGFLPSLSIDQIRDVARVFVNGKLAGSKVGHWVSLNQPLQLVQGLNELTLLSEIVGLQNYGAFLEKDGAGFRGQVKLTGLSNGDIDLTNSLWTYQIGLKGEFSRIYSPEYQGSAEWSSMQNDDTVSPFTWFKTMFDAPEGNGPVAIDLGSMGKGQAWVNGHLIGRYWSLVAPESGCPSSCNYAGTYSDSKCRSNCGIATQSWYHIPREWLQESGNLLVLFEETGGDPSQISLEVHYTKTICSKISETYYPPLSAWSRAANGRPSVNTVAPELRLQCDDGHVISKITFASYGTPTGGCQNFSVGNCHASTTLDLVVEACEGKNRCAISVTNEVFGDPCRKVVKDLAVEAECSPPSVNQEPRYDI

SEQ ID NO: 12341 - protein, 245 aa, Zea mays subsp. mays
  peptide (1)..(245): Ceres Seq. ID no. 12342372
MQNDDTVSPFTWFKTMFDAPEGNGPVAIDLGSMGKGQAWVNGHLIGRYWSLVAPESGCPSSCNYAGTYSDSKCRSNCGIATQSWYHIPREWLQESGNLLVLFEETGGDPSQISLEVHYTKTICSKISETYYPPLSAWSRAANGRPSVNTVAPELRLQCDDGHVISKITFASYGTPTGGCQNFSVGNCHASTTLDLVVEACEGKNRCAISVTNEVFGDPCRKVVKDLAVEAECSPPSVNQEPRYDI

SEQ ID NO: 12342 - protein, 230 aa, Zea mays subsp. mays
  peptide (1)..(230): Ceres Seq. ID no. 12342373
MFDAPEGNGPVAIDLGSMGKGQAWVNGHLIGRYWSLVAPESGCPSSCNYAGTYSDSKCRSNCGIATQSWYHIPREWLQESGNLLVLFEETGGDPSQISLEVHYTKTICSKISETYYPPLSAWSRAANGRPSVNTVAPELRLQCDDGHVISKITFASYGTPTGGCQNFSVGNCHASTTLDLVVEACEGKNRCAISVTNEVFGDPCRKVVKDLAVEAECSPPSVNQEPRYDI

SEQ ID NO: 12343 - DNA, 2068 bp, Zea mays subsp. mays
  misc_feature (1)..(2068): Ceres Seq. ID no. 12342374
aacaatccagttctcctttcgccggaatctgtccctcctccccctcctccccgcctctgcgggtactggaccaccgtggagcgggcattcatccaggctaggtccattccttcctttgctcgtaagtgaccctgatttttgctctacgagtttgtttcgtgctccattgaatctaaatcccactccgcatttgcggattcatgccctactactattacaacccctttcatccatccattcctcgactaggttctcttctccatcgcggaagctccacccgagttgacgccagaagagaatcggtgccctagggtgttctcgcagaattattttccagaagatttgcagatcgagtcgaaccctatgccccacgttaagcctgccgccggcctgcccccttaccaccaccgggcgctccctggccccgggcagggtccagttcccacgggacatgggatgatgcaccgggaggtccgtgatcagtacgggcccgctggggccgaggatgcacctaccaccgctggggcacgggcccgctccgttcccctacgacatgctgcctccgctgcccccaccggaggtcctggagcagaagcttgtggcacagcacggggagatgcagaagctggttatagagaacggccggcttgctgcaagccacgcctcgctgaggaaagagctagccgcggcgcagcaggagctgcagaggctgcaggcgcagggggaggccgcgaaagccgctgaggaggaggagatgaggggcctccttgacaaggttgggaagatggaggccgacctgaaggcccgtgagtccgtgaaggtggagctgcagcaggctcatgctgaggcgcagagccttgtggccatgaggcagaacatggtggcagacgtgcagaagctgagcaaggacctgcagaggaacctcggtgaggcacagcagctccccgcgctcttggctgaacgggatgttgcaaggcaagaaaatcagcatctcaggagtacttatgattacgaaaggaaactcagggtggatcactctgaatctttgcagacgatgaagaggaattatgactccatggttacggagcttgaaaaacttcgtgctgagttgagggacacatctaatcttgacaaaagtggttttttctacaatagcaccacccaaaaggccgatggtatatctagccatctttctgttggacaaattgcttatgatactggctatggaagtacacaggcaagggcaactcctaccggtctggcagacttaagtggagtccctggaggcgctggccttcgttctggattcgacccatcaagaggcaatgcatacgatggctctcatgttgccaatttcagctcttcaaaaactaggacccatgatgcatcaaggggtgccactggctttgactctctcaagggttctgggtatgatgcttcaaaggcgcatgtaactggacaggcgtcagctacagcggctcatgggggcattgctggttactacgggtccaatcaggcagcacatgcgtggggacaatctgcatcgccctacggatctgtacaggtgccaccatcctacgcatctgggtcaaacacatcctatggcgcagcagcagcagcagcagtgcgtccctatggttcagctcaggcgcaaccatcatatggacaaacgcaggcaccatctgcgtatgggcacacacagctaccatcatcctacagtctagcacaggcgcagtctcccttcaccgctgcgcaggggtcctcgccctatgggttggctgcgcagcctccagcctatggatctgggcgagcaggctccaatgctggcagttacgaagctcctcaaggacgtaaataagttcgcgccaaatttgcatacttggccacttgcgaaagagagctttgttacaccgagtccaaatcctttctgttgctacttaaaccttgtttaactgtgatgtcagaggaacctgttacagccgataaaacgattctctgtaaacgtattatcgtgaccgatgatgccgatgcatttttttgttcagtagagtaggccatttgggaacgc

SEQ ID NO: 12344 - protein, 450 aa, Zea mays subsp. mays
  peptide (1)..(450): Ceres Seq. ID no. 12342375
MHLPPLGHGPAPFPYDMLPPLPPPEVLEQKLVAQHGEMQKLVIENGRLAASHASLRKELAAAQQELQRLQAQGEAAKAAEEEEMRGLLDKVGKMEADLKARESVKVELQQAHAEAQSLVAMRQNMVADVQKLSKDLQRNLGEAQQLPALLAERDVARQENQHLRSTYDYERKLRVDHSESLQTMKRNYDSMVTELEKLRAELRDTSNLDKSGFFYNSTTQKADGISSHLSVGQIAYDTGYGSTQARATPTGLADLSGVPGGAGLRSGFDPSRGNAYDGSHVANFSSSKTRTHDASRGATGFDSLKGSGYDASKAHVTGQASATAAHGGIAGYYGSNQAAHAWGQSASPYGSVQVPPSYASGSNTSYGAAAAAAVRPYGSAQAQPSYGQTQAPSAYGHTQLPSSYSLAQAQSPFTAAQGSSPYGLAAQPPAYGSGRAGSNAGSYEAPQGRK

SEQ ID NO: 12345 - protein, 434 aa, Zea mays subsp. mays
  peptide (1)..(434): Ceres Seq. ID no. 12342376
MLPPLPPPEVLEQKLVAQHGEMQKLVIENGRLAASHASLRKELAAAQQELQRLQAQGEAAKAAEEEEMRGLLDKVGKMEADLKARESVKVELQQAHAEAQSLVAMRQNMVADVQKLSKDLQRNLGEAQQLPALLAERDVARQENQHLRSTYDYERKLRVDHSESLQTMKRNYDSMVTELEKLRAELRDTSNLDKSGFFYNSTTQKADGISSHLSVGQIAYDTGYGSTQARATPTGLADLSGVPGGAGLRSGFDPSRGNAYDGSHVANFSSSKTRTHDASRGATGFDSLKGSGYDASKAHVTGQASATAAHGGIAGYYGSNQAAHAWGQSASPYGSVQVPPSYASGSNTSYGAAAAAAVRPYGSAQAQPSYGQTQAPSAYGHTQLPSSYSLAQAQSPFTAAQGSSPYGLAAQPPAYGSGRAGSNAGSYEAPQGRK

SEQ ID NO: 12346 - protein, 413 aa, Zea mays subsp. mays
  peptide (1)..(413): Ceres Seq. ID no. 12342377
MQKLVIENGRLAASHASLRKELAAAQQELQRLQAQGEAAKAAEEEEMRGLLDKVGKMEADLKARESVKVELQQAHAEAQSLVAMRQNMVADVQKLSKDLQRNLGEAQQLPALLAERDVARQENQHLRSTYDYERKLRVDHSESLQTMKRNYDSMVTELEKLRAELRDTSNLDKSGFFYNSTTQKADGISSHLSVGQIAYDTGYGSTQARATPTGLADLSGVPGGAGLRSGFDPSRGNAYDGSHVANFSSSKTRTHDASRGATGFDSLKGSGYDASKAHVTGQASATAAHGGIAGYYGSNQAAHAWGQSASPYGSVQVPPSYASGSNTSYGAAAAAAVRPYGSAQAQPSYGQTQAPSAYGHTQLPSSYSLAQAQSPFTAAQGSSPYGLAAQPPAYGSGRAGSNAGSYEAPQGRK

SEQ ID NO: 12347 - DNA, 1288 bp, Zea mays subsp. mays
  misc_feature (1)..(1288): Ceres Seq. ID no. 12353469
  misc_feature (1)..(1288): Ortholog of  Ceres SEQ ID NO 15170807 as cited in SEQ ID NO 52723
  misc_feature (1)..(1288): Ortholog of  Ceres SEQ ID NO 12611846 as cited in SEQ ID NO 59904
  misc_feature (1)..(1288): Ortholog of  Ceres SEQ ID NO 14303535 as cited in SEQ ID NO 68728
  misc_feature (1)..(1288): Ortholog of  Ceres SEQ ID NO 12635196 as cited in SEQ ID NO 0
  misc_feature (1)..(1288): Ortholog of  Ceres SEQ ID NO 15179463 as cited in SEQ ID NO 0
agccgcacaatccatccatccatctattctccagtccacccattccattccactaccgacgcccagaattcacgcgaacgcacacgcacccacacgacacatccagatgatgcttagggtttccccgtccccggccgccgcggtgccaacccagctctccggtgcgcccgcgacccctgctcccgtcgtcagggtggcggcgccgcgcggagtcgcctcgccgtccgctggcgccgcgtgcagggccgcgggcaaggggaaggaggtgctcagcggggtggtgttccagcccttcgaggagatcaagggggagctcgccctcgtgccccagtccccagacaagtcgctcgcgcgccacaagttcgtcgatgactgcgaggccgcactcaacgagcagatcaacgtggagtacaacgcctcgtatgcataccactccctcttcgcctatttcgaccgcgacaacgtggctctcaaaggatttgccaagttcttcaaggaatccagcgacgaggagagggagcacgctgaaaagctcatggagtaccagaacaaacgtggaggcagggtgaggctccaatcgattgtgacgcctttaaccgagtttgaccaccctgagaaaggagatgctctgtacgctatggagctggctctggccctggaaaagctggtcaatgaaaagctgcacaacctgcatggtgtggcaacaaggtgcaatgatcctcagctgacagacttcatcgagagtgagttcctcgaggagcagggtgaagccataaacaagatctccaagtatgtcgcccagctgaggagagtgggcaaggggcacggggtgtggcacttcgatcagatgctgcttgaggaagaggcctaaaaagaaggaacggacagatgaatgaaggaaacaagtgtgtaatgttgatcaggcggaggaataatgggtcaactgacaactctgggtcggtggatttgtagttggtttgggttttttagttgtagaacggtgttgcccccctcctagagagggatgaacacattatgcatgcgatgtgtcagttcggtcggtgctatgctcgttgggatttgattgtcggaaataaaacatgggtgatgaatgtgtaccctccctaatctatgtcttggtgatgaagttgagaaagctgcgggtgttgtaggtggatttgtagagttttttcttcagttggttaggttcgctgttgcctacctcatttgcccctcatcatcgccgtaatttatttatttataatataaaagatccagattttccccc

SEQ ID NO: 12348 - protein, 289 aa, Zea mays subsp. mays
  peptide (1)..(289): Ceres Seq. ID no. 12353470
AAQSIHPSILQSTHSIPLPTPRIHANAHAPTRHIQMMLRVSPSPAAAVPTQLSGAPATPAPVVRVAAPRGVASPSAGAACRAAGKGKEVLSGVVFQPFEEIKGELALVPQSPDKSLARHKFVDDCEAALNEQINVEYNASYAYHSLFAYFDRDNVALKGFAKFFKESSDEEREHAEKLMEYQNKRGGRVRLQSIVTPLTEFDHPEKGDALYAMELALALEKLVNEKLHNLHGVATRCNDPQLTDFIESEFLEEQGEAINKISKYVAQLRRVGKGHGVWHFDQMLLEEEA

SEQ ID NO: 12349 - protein, 254 aa, Zea mays subsp. mays
  peptide (1)..(254): Ceres Seq. ID no. 12353471
MMLRVSPSPAAAVPTQLSGAPATPAPVVRVAAPRGVASPSAGAACRAAGKGKEVLSGVVFQPFEEIKGELALVPQSPDKSLARHKFVDDCEAALNEQINVEYNASYAYHSLFAYFDRDNVALKGFAKFFKESSDEEREHAEKLMEYQNKRGGRVRLQSIVTPLTEFDHPEKGDALYAMELALALEKLVNEKLHNLHGVATRCNDPQLTDFIESEFLEEQGEAINKISKYVAQLRRVGKGHGVWHFDQMLLEEEA

SEQ ID NO: 12350 - protein, 253 aa, Zea mays subsp. mays
  peptide (1)..(253): Ceres Seq. ID no. 12353472
MLRVSPSPAAAVPTQLSGAPATPAPVVRVAAPRGVASPSAGAACRAAGKGKEVLSGVVFQPFEEIKGELALVPQSPDKSLARHKFVDDCEAALNEQINVEYNASYAYHSLFAYFDRDNVALKGFAKFFKESSDEEREHAEKLMEYQNKRGGRVRLQSIVTPLTEFDHPEKGDALYAMELALALEKLVNEKLHNLHGVATRCNDPQLTDFIESEFLEEQGEAINKISKYVAQLRRVGKGHGVWHFDQMLLEEEA

SEQ ID NO: 12351 - DNA, 3391 bp, Zea mays subsp. mays
  misc_feature (1)..(3391): Ceres Seq. ID no. 12359662
  misc_feature (1)..(3391): Ortholog of  Ceres SEQ ID NO 14311553 as cited in SEQ ID NO 51462
  misc_feature (1)..(3391): Ortholog of  Ceres SEQ ID NO 13596319 as cited in SEQ ID NO 67933
  misc_feature (1)..(3391): Ortholog of  Ceres SEQ ID NO 13599003 as cited in SEQ ID NO 0
aatcattcccctctgcagccgccggccctcagcaagcaagcaagggacagacgcggcggggatgggcagcggggtccgggcgctgatgcgccggaagcaggtagactccgagcggacgcgcgccgccggcagcgcccaccagctccgcaaggagctctccgtcacccagctcgtcgccatcggtgttgggtcgacgattggagctggcgtctacgtccttgttggcacagttgcgcgggagcattccgggccggcattgacgctttcatttctgatagccggaatagcagctgcgctttcagccttctgctatgcggagctggctagccgttgcccttcggcaggaagcgcctatcattattcgtacatctgcgttggcgaaggagttgcatggttgattggctgggctttgatacttgaatacacgattggtggatcagccgttgcccgtggcatttctcctaatctagccttattttttggaggacaggatagtctgccatggattttagcacgacatgagatcccatggcttgatgtcgttgtagatccttgtgcttctttcctcgttttcgtcgtcactggccttctctgtgtggggataaaagagagttcatttgtgcaaggagttgtgacggtcttaaattgctttgtgatgttatttgttatcatagccggtagctacatcggcttccaaacaggatgggttggctacaaggttgctggcggatttttcccttatggagcgaatggaatgcttgccgggtcagcaactgtcttcttcgcctacataggatttgattcagttgccagcacggctgaggaggtgaaaaatccacaacgagatctgccactgggaatcggaacagcattgtcgatttgctgttccttgtacatgttggtttcagttgttattgttggtctggtaccatactttgctatggacccagacacccctatttcatctgcttttgccaaacatgggatgcactgggcaatgtatcttgtaacaactggtgctgttcttgctctctgctcaaccttgatgggatctatattgccacagccaagaatattgatggccatggcacgagatggcctgctaccatcattcttctctgatgtccataagacgacacaagttccagtcaaaagcacagtagtgactggcatctgtgcagctgctcttgctttcttcatggatgtctctcaactggctggaatggttagtgtaggcacgctactcgcgttcactatagttgctgtgtccatcttgattcttagatacgttcctccagatgaggtacccctcccatcttccctgcaagcatcattccgcttgagccaagaaaatgacgaggaaaagctgaggggtacccttggagatgatgatcatgagcaaggctcagctgaaataagtgatgttgtagtaaaaccaatcactgaccccctgatcgagaagcagctatacgcaagcaatttgagtgaggcaaaacggcgtaagaccgcggcatgcagcatcacatctgtttgcataggggttctgatcctcacgacgtcagcctcggcaacattcttgcccttcccggtgagatgctccgtttgtgttttgggtggcatgctcctcctagctggtctgggcatgctctgctggattgaccaagatgatgggaggcactcctttggccactccggaggattcatctgtccgtttgttcccttgctgccggtaatgtgtatcctcataaatacatacttgttaataaatcttggtggcggcacgtggatgcgagtgggggtgtggctagtgatgggggtgttcgtctacattttctatggccgcacccacagctcgttgacggatgtcgtgtatgtccctgtggccgaggcgaatgagatatacgggtcatcctcttcgttagggtttgtggcgtaaagagagatggaaggagatgtttgttgaagcctatcttgagccagtcatggtacttctcacaaaaacctcaaagatcctgactggagcaggtacctgcttgagctattgtgttgcaggcatgggtttgaagaattcttcgacgttctgcacaagcttgttttcgtcatcttcgacaacagagccatgccgtcaaatgggcactttacctttcctgcctcacccccctaagtgtgagcagcaggtttcagctggtcactcatcgagctcctctctgcttttaagtggtgataccggtttagatgtggctgaacagtcagatgatctgaacgacttgctcaatctttcgggagatgcttctgatggcagcttccatggagaaaacaatgccttagcttttgacgaacagatggaatttcagttcctgtctgagcagctagaaattgccatcactgacaatgagaagaatcctcatttagatgacatatacggcacaccaccacagctgtcatcacttccagtatcatcttgctccaatcagaatctagggtcaccagttaaagtccagcttagctcatctcagtcatcttctagctctgcaacagctaacaagtcaagattgaggtggacacttgagcttcatgagcgttttgtggaggccgtgaaaaagcttgaaggtcctgaaaaagcaactcccaaaggtgtgctgaaactaatgaaggtagaaggtctaacaatttatcatgtgaagagccatctgcagaagtatcggcttgcaaaatatattcctgagcctaaagacgataagaaggcttcctcggaggataaaaaagcacaattaggaaagggcagcattgattcaagcaaaaacaagaatttacaagtggcagaagctctaaggatgcaaatagaggttcagaaacagcttcatgaacaattagaggtgcaaaggcagttgcagctacggatagaggaacatgcaagatacttgcagaaaatactagaagagcagcagaaggccggcaatgtgccactaaaagctccaaccaaagcacaagcaacaaagtcgtcacctgaatcgacgtcagacgagagaactgaatccgaggtagacaccatttctccgcggccacccaagaacaggaacccgggtgtagacgcagaatgcaaatcgccgggaaggatcaagcgaacgaaggttcaggctgatcttgaaaacgagggcctgtgttcatagcgagggctcatgttcgtagctgtgcgggctcgccagtgattttctgaacatttgcacttcccgttttagttcaggagctatttgttactgtttgtaacttgaacagccgtagtatctccagcgatctgttgatatcttggcgtgaattggacttgacatcttagccattgtattatatagtaattcgcctttggaatggaaatggaataggtttatgtttg

SEQ ID NO: 12352 - protein, 644 aa, Zea mays subsp. mays
  peptide (1)..(644): Ceres Seq. ID no. 12359663
IIPLCSRRPSASKQGTDAAGMGSGVRALMRRKQVDSERTRAAGSAHQLRKELSVTQLVAIGVGSTIGAGVYVLVGTVAREHSGPALTLSFLIAGIAAALSAFCYAELASRCPSAGSAYHYSYICVGEGVAWLIGWALILEYTIGGSAVARGISPNLALFFGGQDSLPWILARHEIPWLDVVVDPCASFLVFVVTGLLCVGIKESSFVQGVVTVLNCFVMLFVIIAGSYIGFQTGWVGYKVAGGFFPYGANGMLAGSATVFFAYIGFDSVASTAEEVKNPQRDLPLGIGTALSICCSLYMLVSVVIVGLVPYFAMDPDTPISSAFAKHGMHWAMYLVTTGAVLALCSTLMGSILPQPRILMAMARDGLLPSFFSDVHKTTQVPVKSTVVTGICAAALAFFMDVSQLAGMVSVGTLLAFTIVAVSILILRYVPPDEVPLPSSLQASFRLSQENDEEKLRGTLGDDDHEQGSAEISDVVVKPITDPLIEKQLYASNLSEAKRRKTAACSITSVCIGVLILTTSASATFLPFPVRCSVCVLGGMLLLAGLGMLCWIDQDDGRHSFGHSGGFICPFVPLLPVMCILINTYLLINLGGGTWMRVGVWLVMGVFVYIFYGRTHSSLTDVVYVPVAEANEIYGSSSSLGFVA

SEQ ID NO: 12353 - protein, 624 aa, Zea mays subsp. mays
  peptide (1)..(624): Ceres Seq. ID no. 12359664
MGSGVRALMRRKQVDSERTRAAGSAHQLRKELSVTQLVAIGVGSTIGAGVYVLVGTVAREHSGPALTLSFLIAGIAAALSAFCYAELASRCPSAGSAYHYSYICVGEGVAWLIGWALILEYTIGGSAVARGISPNLALFFGGQDSLPWILARHEIPWLDVVVDPCASFLVFVVTGLLCVGIKESSFVQGVVTVLNCFVMLFVIIAGSYIGFQTGWVGYKVAGGFFPYGANGMLAGSATVFFAYIGFDSVASTAEEVKNPQRDLPLGIGTALSICCSLYMLVSVVIVGLVPYFAMDPDTPISSAFAKHGMHWAMYLVTTGAVLALCSTLMGSILPQPRILMAMARDGLLPSFFSDVHKTTQVPVKSTVVTGICAAALAFFMDVSQLAGMVSVGTLLAFTIVAVSILILRYVPPDEVPLPSSLQASFRLSQENDEEKLRGTLGDDDHEQGSAEISDVVVKPITDPLIEKQLYASNLSEAKRRKTAACSITSVCIGVLILTTSASATFLPFPVRCSVCVLGGMLLLAGLGMLCWIDQDDGRHSFGHSGGFICPFVPLLPVMCILINTYLLINLGGGTWMRVGVWLVMGVFVYIFYGRTHSSLTDVVYVPVAEANEIYGSSSSLGFVA

SEQ ID NO: 12354 - protein, 616 aa, Zea mays subsp. mays
  peptide (1)..(616): Ceres Seq. ID no. 12359665
MRRKQVDSERTRAAGSAHQLRKELSVTQLVAIGVGSTIGAGVYVLVGTVAREHSGPALTLSFLIAGIAAALSAFCYAELASRCPSAGSAYHYSYICVGEGVAWLIGWALILEYTIGGSAVARGISPNLALFFGGQDSLPWILARHEIPWLDVVVDPCASFLVFVVTGLLCVGIKESSFVQGVVTVLNCFVMLFVIIAGSYIGFQTGWVGYKVAGGFFPYGANGMLAGSATVFFAYIGFDSVASTAEEVKNPQRDLPLGIGTALSICCSLYMLVSVVIVGLVPYFAMDPDTPISSAFAKHGMHWAMYLVTTGAVLALCSTLMGSILPQPRILMAMARDGLLPSFFSDVHKTTQVPVKSTVVTGICAAALAFFMDVSQLAGMVSVGTLLAFTIVAVSILILRYVPPDEVPLPSSLQASFRLSQENDEEKLRGTLGDDDHEQGSAEISDVVVKPITDPLIEKQLYASNLSEAKRRKTAACSITSVCIGVLILTTSASATFLPFPVRCSVCVLGGMLLLAGLGMLCWIDQDDGRHSFGHSGGFICPFVPLLPVMCILINTYLLINLGGGTWMRVGVWLVMGVFVYIFYGRTHSSLTDVVYVPVAEANEIYGSSSSLGFVA

SEQ ID NO: 12355 - DNA, 1577 bp, Zea mays subsp. mays
  misc_feature (1)..(1577): Ceres Seq. ID no. 12408300
  misc_feature (1)..(1577): Ortholog of  Ceres SEQ ID NO 12608276 as cited in SEQ ID NO 57871
  misc_feature (1)..(1577): Ortholog of  Ceres SEQ ID NO 13598492 as cited in SEQ ID NO 63882
  misc_feature (1)..(1577): Ortholog of  Ceres SEQ ID NO 13657914 as cited in SEQ ID NO 66230
  misc_feature (1)..(1577): Ortholog of  Ceres SEQ ID NO 13595877 as cited in SEQ ID NO 67702
  misc_feature (1)..(1577): Ortholog of  Ceres SEQ ID NO 13654367 as cited in SEQ ID NO 67993
  misc_feature (1)..(1577): Ortholog of  Ceres SEQ ID NO 13622667 as cited in SEQ ID NO 0
ataggaacacacgaatacgcgaccacacgttcacctcggccatgatccaccaacacagcagctccctccctgaaatctcattcccatgaatttccacacggccagcttctgcgcttccgcggcgataggcctcccaacagcccccaaaatatcggcttcgttggctactggtcgctttgcctgccgcagtgagagatgtctggagacctggaccttcagatctcctgctatctgccttcttgctgctacccccacacgctgcaccctcacagacaccatggatccgagctccgacatcatactcgacactccgttcttccgcatctacagcgaccgccgcatcgaccgcttggtcgggcaccgataccgtgccggccggctttgatcccgccaccggcgtcacctccaaagatgtcgttttagacagcaactccggcctctacgttcgcctgtacctcccggacacggctaccgggtctgaccactactccaagaaattccccgtgctagtctacttccacggcggcggctttgtcacccactcggcagcgtctccgccctatcagcccttcctcaacacccttgccgcgaaggccggcttgctcatcgtctccgtgaactaccgcctcgcgccagagcacccgcttccggcaggttacgaggactccttccgcgcgctcaagtgggcggcctctggaagcggggacccctggctatcacatcacggcgacctgggccgcatcttcctggccggggacagctccggcgggaactttgtccacaacgtcgctatgatggccgccgcgtcagagttgcaaatcgagggcgcggtcctcctgcacgccgggttcgctggcaagcagcgcatcgacggagagaaaccagagtcagtggcgctgacgcagaagctgtgggggatcgtgtgccccgaggcgacggacggcgtggacgacccgcggatgaaccccttggccgccgcggcgcccagcctgcgaaacctgccgtgcgagagggtgctcgtctgcgcggcagagctggactcgctgcgggcgaggaacagggcgtactacgacgccctcgcggcaagcgggtggggtggcacggtggagtggctcgagtctaagggcaagcagcacgccttcttcctctacgactccggctgcggcgaggccgtggagctcatggatcgactggtcgcgttctttgctgggaacttgaattcgtcatgtgtggatgtgaccacacatcacacgaccacatccggtgagaccctgagatgaatggaacaaacgaagatgcagctcattgctcaatcgaaataactgagctcagtcctcaaaacaatgaaaaaagaggaagaacagctgagatcggatccttgtactgatcagtttatgttatcgcttgggtcatcaatttctactagttgtgtgcccgtgcgttgcaacggaaacatataataccattgatagcttatgtacgttgggatgaacatcgacatatatctgaccggatcttcttcttccttggggatctggagaaaagcctgttcgaaagccaaacatgttaagacctgt

SEQ ID NO: 12356 - protein, 162 aa, Zea mays subsp. mays
  peptide (1)..(162): Ceres Seq. ID no. 12408301
MMAAASELQIEGAVLLHAGFAGKQRIDGEKPESVALTQKLWGIVCPEATDGVDDPRMNPLAAAAPSLRNLPCERVLVCAAELDSLRARNRAYYDALAASGWGGTVEWLESKGKQHAFFLYDSGCGEAVELMDRLVAFFAGNLNSSCVDVTTHHTTTSGETLR

SEQ ID NO: 12357 - protein, 161 aa, Zea mays subsp. mays
  peptide (1)..(161): Ceres Seq. ID no. 12408302
MAAASELQIEGAVLLHAGFAGKQRIDGEKPESVALTQKLWGIVCPEATDGVDDPRMNPLAAAAPSLRNLPCERVLVCAAELDSLRARNRAYYDALAASGWGGTVEWLESKGKQHAFFLYDSGCGEAVELMDRLVAFFAGNLNSSCVDVTTHHTTTSGETLR

SEQ ID NO: 12358 - protein, 106 aa, Zea mays subsp. mays
  peptide (1)..(106): Ceres Seq. ID no. 12408303
MNPLAAAAPSLRNLPCERVLVCAAELDSLRARNRAYYDALAASGWGGTVEWLESKGKQHAFFLYDSGCGEAVELMDRLVAFFAGNLNSSCVDVTTHHTTTSGETLR

SEQ ID NO: 12359 - DNA, 1153 bp, Zea mays subsp. mays
  misc_feature (1)..(1153): Ceres Seq. ID no. 12374047
  misc_feature (1)..(1153): Ortholog of  Ceres SEQ ID NO 13597160 as cited in SEQ ID NO 64016
  misc_feature (1)..(1153): Ortholog of  Ceres SEQ ID NO 15169659 as cited in SEQ ID NO 64152
agggtgattggggagcttgtcaaggtgctgaagattacacctgtacctgttgtgtttgcgtcgttttcgggagggccaaaagggtgcacatacaaggttttcagctgatcgagagaagatgtgaagggcaactaagcatggatgagtaccagctcgtacaagattgtctatgcggacaaatgtatgattcaagccctgtggattttgtcagtgacttgggcactcgcttcctcctcgatccaagtgtcctgaagatgtctgaacctcctcgtgtcttgtcatggatgactaagggcattgcctcaggtcttgatgttcttttcataaacaaatttgaagaacaacgtaaagattattgggaaacactatactcatcggtgcattttggtccaatactaatactctgctcagaggatgatcaacttgctacatattcagttgttcaaaattttggccagcatctgctagagcttggtggtgatgtgagcctaattaaatggcatagttctccgcatgtcggccactacaagcaccatcctgaggaatacagagctgctgtgacggagctcctaaagaaagcctcgacgctctacgcgagcagacgacaactcaacggacacgccgtgggcacaagcgagcacaccgacgcgcctgcatccacctccaagtccaacccacacagagatgccgcgagttctgtcggtcgtagcaggctgattcaagcaccggccgatccagccggccagtttccttccataccgagctccatggagtaccacgagagcagcagccaaggtccgccgcagccggagctgttcagcatgcccggcgtggagagctcgggcctgcgttgtgcggtgctggggcaggcgctgtacggtgtctgtgttccgaaggacgtagaagacggctgggacctcgcgccgccttccgcgtcgtcggatgcgttgtggggtgctgctgctgctgccgcgccgcctcgccgtggtagcttccgtccgatgagatgtgtacggcgctcgagattgtgatattgtgcgtgcgttttagtttaaaaattaaggtgagcaacaaatattgagaacggagggagtagtacgtattctctatacaaatcaatataaatatggtgatcgtaatggtctattcctct

SEQ ID NO: 12360 - protein, 342 aa, Zea mays subsp. mays
  peptide (1)..(342): Ceres Seq. ID no. 12374048
GDWGACQGAEDYTCTCCVCVVFGRAKRVHIQGFQLIERRCEGQLSMDEYQLVQDCLCGQMYDSSPVDFVSDLGTRFLLDPSVLKMSEPPRVLSWMTKGIASGLDVLFINKFEEQRKDYWETLYSSVHFGPILILCSEDDQLATYSVVQNFGQHLLELGGDVSLIKWHSSPHVGHYKHHPEEYRAAVTELLKKASTLYASRRQLNGHAVGTSEHTDAPASTSKSNPHRDAASSVGRSRLIQAPADPAGQFPSIPSSMEYHESSSQGPPQPELFSMPGVESSGLRCAVLGQALYGVCVPKDVEDGWDLAPPSASSDALWGAAAAAAPPRRGSFRPMRCVRRSRL

SEQ ID NO: 12361 - protein, 297 aa, Zea mays subsp. mays
  peptide (1)..(297): Ceres Seq. ID no. 12374049
MDEYQLVQDCLCGQMYDSSPVDFVSDLGTRFLLDPSVLKMSEPPRVLSWMTKGIASGLDVLFINKFEEQRKDYWETLYSSVHFGPILILCSEDDQLATYSVVQNFGQHLLELGGDVSLIKWHSSPHVGHYKHHPEEYRAAVTELLKKASTLYASRRQLNGHAVGTSEHTDAPASTSKSNPHRDAASSVGRSRLIQAPADPAGQFPSIPSSMEYHESSSQGPPQPELFSMPGVESSGLRCAVLGQALYGVCVPKDVEDGWDLAPPSASSDALWGAAAAAAPPRRGSFRPMRCVRRSRL

SEQ ID NO: 12362 - protein, 283 aa, Zea mays subsp. mays
  peptide (1)..(283): Ceres Seq. ID no. 12374050
MYDSSPVDFVSDLGTRFLLDPSVLKMSEPPRVLSWMTKGIASGLDVLFINKFEEQRKDYWETLYSSVHFGPILILCSEDDQLATYSVVQNFGQHLLELGGDVSLIKWHSSPHVGHYKHHPEEYRAAVTELLKKASTLYASRRQLNGHAVGTSEHTDAPASTSKSNPHRDAASSVGRSRLIQAPADPAGQFPSIPSSMEYHESSSQGPPQPELFSMPGVESSGLRCAVLGQALYGVCVPKDVEDGWDLAPPSASSDALWGAAAAAAPPRRGSFRPMRCVRRSRL

SEQ ID NO: 12363 - DNA, 2075 bp, Zea mays subsp. mays
  misc_feature (1)..(2075): Ceres Seq. ID no. 12341294
  misc_feature (1)..(2075): Ortholog of  Ceres SEQ ID NO 13663419 as cited in SEQ ID NO 66561
  misc_feature (1)..(2075): Ortholog of  Ceres SEQ ID NO 13586237 as cited in SEQ ID NO 0
gttttttccgttcatccatccatacgtttcgtttgttccacctgcgcaactgcgacggggataagtacgtcttccagatgacgacggcggcatggccgcggccacgcttcctcgtcctcccccagcctggattcctccgctcggtctgccacggcctctgcgcccgctgtctcttctgcttcctgctgctcctcgccttcgcctgcagctccagctccggacgggtggtggtcaccagcttgcctggcttcgacggcgacctccccttccacctcgaaacagggtgcgcgtgcccgcgtggcgtgtctactagtagtatcctccttcttcttcttcattcattcatcctggtggtgtactactagactactactagtagctcacgcgcgcggcacatgtagatgtagcctctaaccaccgttgctgccctgaaactcaaaacgaaggtacgtggaggtggaggaggacgccggcgtggagctcttctactacttcgtccaggccgagtccggcgccgccgccgccgccgatgacacccctttcctcttctggctcaccggcggcgaccgctgctccgtcttcagcggcctcgcctacgagatcggtcccatcagattcgtcctggaaccctacaacggcaccctgccgcgcctgcgatacaaccacaactcgtggtcaaaggtgtcacatatcctcttcgtcgattcaccggttggagctggattttccttctcgagagatcccaaaggctacgatgtcggagacatctcggcctcactgcagctacaggaattcctcatcaagtggttcagtgatcatcccgagtacctcgcgaatcctttctacattggcggggactcctatgtcggaaaaatcgtgccgttcctcaggcagatgatttcagaaggtattgaacttggaagaagacccttccctaacctcaaggtatgtccatcatacatttctctccggaatggaagatgctatatcgacgtgggatactagctagtctatatccaagaaattaattgtagtcggtcacttaggctgatgatatgcaggttctgaatttgtcatgatcagggctatctggtgggtaacccaatcacgggcgaaagtatagatttcacttccagagtgccctacgctcatggagtcggtatcatatcagatcaattgtatgagacgatattggggcattgccaaggagaggactacactagtcctgcaaacgctctgtgtgctcaggctctggacactttcaacaatctcatcaacgaagtccagaacgcccagatcttactggacacgtgcgtctacgcgtctcctgcgccaaacgttctcagcagaccggtggacggtggtagaaggatcctgagggcggcggggatgggaggaggggcgacgctgaaccatccgccagctcgtcctcggtttggctgcatcacctacggctactacctgtcgtatttctgggcgaacgatgaacgcactcgaacagctcttgggatcaagaagggaacagtggacgagtgggtgaggtgtcacgacgcagacctgccgtacacgatcgacctcaagagcgccatcaagtaccaccggaacctgacgtccagaggctaccgcgccctggtgtacagcggcgaccatgacctgctggtgccacacctgggcacccaggcatgggtcaggtccctcaacttccccgtcgtcgacgactggagggcgtggcatctcggtggccaagccgccgggttcacgataaattactcaaacaacatgacgttcgcgacgatcaaaggtggcgggcacacggcgccggagtacgagccggagaggtgtttcgccatgttcagccgctggatactcgaccgtccactctaatctccactcgtacattgccggattcttgcaccatgaccatgattgatggactgtgtggattgcagttcataggtggaataaaatggatgatttctgtgaatggataggtctgccaactaggcaactttgtgtaaattaactaggtctgtgtcagcgcgctttaacgtaatatatgcggggataaatcgtgc

SEQ ID NO: 12364 - protein, 164 aa, Zea mays subsp. mays
  peptide (1)..(164): Ceres Seq. ID no. 12341295
MGGGATLNHPPARPRFGCITYGYYLSYFWANDERTRTALGIKKGTVDEWVRCHDADLPYTIDLKSAIKYHRNLTSRGYRALVYSGDHDLLVPHLGTQAWVRSLNFPVVDDWRAWHLGGQAAGFTINYSNNMTFATIKGGGHTAPEYEPERCFAMFSRWILDRPL

SEQ ID NO: 12365 - protein, 122 aa, Zea mays subsp. mays
  peptide (1)..(122): Ceres Seq. ID no. 12341296
MTPLSSSGSPAATAAPSSAASPTRSVPSDSSWNPTTAPCRACDTTTTRGQRCHISSSSIHRLELDFPSREIPKATMSETSRPHCSYRNSSSSGSVIIPSTSRILSTLAGTPMSEKSCRSSGR

SEQ ID NO: 12366 - protein, 120 aa, Zea mays subsp. mays
  peptide (1)..(120): Ceres Seq. ID no. 12341297
FFRSSIHTFRLFHLRNCDGDKYVFQMTTAAWPRPRFLVLPQPGFLRSVCHGLCARCLFCFLLLLAFACSSSSGRVVVTSLPGFDGDLPFHLETGCACPRGVSTSSILLLLLHSFILVVYY

SEQ ID NO: 12367 - DNA, 1038 bp, Zea mays subsp. mays
  misc_feature (1)..(1038): Ceres Seq. ID no. 12353503
  misc_feature (1)..(1038): Ortholog of  Ceres SEQ ID NO 14308232 as cited in SEQ ID NO 58659
cggatatgatgatatgtgggctaagacaattcttgaaacttacgatgcagaggaagatgatggtaggtactctggtggatcctctcctgaatcaactggttctgttgaaacctccatatcgtcccattttggaggcatgaactatccatcactgttcagttcaaaaccgtcaagtcatggggcctcacaacaaacgatacgtgaagaaccaccctcatattcgacgtcagtactacagaggaaggaatcatttgaaaacccccttggagggggtggaggacgaagtttcggatcccacgaggatgaagataagagttctggtaaccctcagtctgggaaagctttgtatgacttcacagcaggcggtgatgatgagctgagtttaaactctggagaagaagtggagattgaatacgaggtcgatggttggtattatgtgaagaaaaggaggcctggaagggatggaaagatggcaggtctggttcctgttctgtatgtgagttcatgataacagccgtgtgtatcgtttcccacacttgtggaagctgtttggagttcatgggcttaacaaaaaggcacactggaatgctcccgagagatcttcgcataaactcgtgcccgtcgtataggcacgtggccttgtggaagcaggtcatatccagtcatcttggggttcgtatgatgctgcagtgctgttcctgggaaagatttacgtgttgatttgtctggacccacaccactagtcattcaattgattgttttttgttgctaaggtggagactcttcagaggttaaaccgttcatctgtgccattttgctgccgtctgtgttcaagaaggcaatttcgtcgtctccagttcgtgttgtgcgatatatattctagtaaaattgtagaggcatcatttccccggcatatattattttggtcgtgtatggtgtgattctggtggtaaaatagtgtcattaatgttgtgtatatttgtttccgggtggattacagagtatataactataagggggtgtttggtttaagaaatc

SEQ ID NO: 12368 - protein, 168 aa, Zea mays subsp. mays
  peptide (1)..(168): Ceres Seq. ID no. 12353504
GYDDMWAKTILETYDAEEDDGRYSGGSSPESTGSVETSISSHFGGMNYPSLFSSKPSSHGASQQTIREEPPSYSTSVLQRKESFENPLGGGGGRSFGSHEDEDKSSGNPQSGKALYDFTAGGDDELSLNSGEEVEIEYEVDGWYYVKKRRPGRDGKMAGLVPVLYVSS

SEQ ID NO: 12369 - protein, 164 aa, Zea mays subsp. mays
  peptide (1)..(164): Ceres Seq. ID no. 12353505
MWAKTILETYDAEEDDGRYSGGSSPESTGSVETSISSHFGGMNYPSLFSSKPSSHGASQQTIREEPPSYSTSVLQRKESFENPLGGGGGRSFGSHEDEDKSSGNPQSGKALYDFTAGGDDELSLNSGEEVEIEYEVDGWYYVKKRRPGRDGKMAGLVPVLYVSS

SEQ ID NO: 12370 - protein, 123 aa, Zea mays subsp. mays
  peptide (1)..(123): Ceres Seq. ID no. 12353506
MNYPSLFSSKPSSHGASQQTIREEPPSYSTSVLQRKESFENPLGGGGGRSFGSHEDEDKSSGNPQSGKALYDFTAGGDDELSLNSGEEVEIEYEVDGWYYVKKRRPGRDGKMAGLVPVLYVSS

SEQ ID NO: 12371 - DNA, 1160 bp, Zea mays subsp. mays
  misc_feature (1)..(1160): Ceres Seq. ID no. 12413910
  misc_feature (1)..(1160): Ortholog of  Ceres SEQ ID NO 15172911 as cited in SEQ ID NO 55340
  misc_feature (1)..(1160): Ortholog of  Ceres SEQ ID NO 13655345 as cited in SEQ ID NO 63222
acctccaccacctgccgcgccggccggcgagcctcttcctcttcctccggtcgctccccttcccatctccatcttgatttcgattctctggtggctgggaaagcctgcgagagcgcgataaccggaaagatctgagctgctgcaaccgatctccggcgccatggggttcctcgaggacttccaagccagtgttgaagcattgccatctatgctgcatcggaactattcattaatgcgagagttggataaaagtttgcatggtgtgcaactagaaaatgagcagcgctgtcaacaagaaatagaggacattaagcatggacttgaatctggaagtattacatatgacccagcaaaattgaaattttccgaagaagcaatggaggagcagaaacattgtgttagaattgctgacgagaaggtggctttagccactcagacttatgacttagttgatgctcacatccaacagctagatcagtttatgaggaagcttgaagaaatccggcaaggaaaagaggcagctgctgctgttactgcagggactgctgttgctactactgccactccaaccgtgaatgctggagcgacaactgctgatgctaatccgaagagtggacgatctggcgaaagaggcagagggggtcggaagaaggccaaggtacccacggagcagtcagtgccagtgccagtgccactgccacctattgacttagagttgcctgtggatcctaacgaaccgacatactgcctctgcaaccaagtcagctatggtgagatggtggcatgcgacaatcctaattgcaaaatcgagtggtatcactatggctgtgtgggcgtcaaggagcaacccaagggaaagtggtattgcccaaactgcatcggattccagaagaagcgaaaaggcaagtgatatgcagtccacaggctgctgtgctagtgtgtccttgcttgttaattgtgttgctgatgttgggtaacaaatgtagtagtagttgctgcctgtgacagtgcataccgttgtagatccagtgttctgtacatgttactcctccttcggtgctcgtagtttagggccatcaaccatttgttaacttcatggcctttttggcgattcatgccccttgtatgggtttcgcaatatcatgtctccttttcctggt

SEQ ID NO: 12372 - protein, 249 aa, Zea mays subsp. mays
  peptide (1)..(249): Ceres Seq. ID no. 12413911
MGFLEDFQASVEALPSMLHRNYSLMRELDKSLHGVQLENEQRCQQEIEDIKHGLESGSITYDPAKLKFSEEAMEEQKHCVRIADEKVALATQTYDLVDAHIQQLDQFMRKLEEIRQGKEAAAAVTAGTAVATTATPTVNAGATTADANPKSGRSGERGRGGRKKAKVPTEQSVPVPVPLPPIDLELPVDPNEPTYCLCNQVSYGEMVACDNPNCKIEWYHYGCVGVKEQPKGKWYCPNCIGFQKKRKGK

SEQ ID NO: 12373 - protein, 233 aa, Zea mays subsp. mays
  peptide (1)..(233): Ceres Seq. ID no. 12413912
MLHRNYSLMRELDKSLHGVQLENEQRCQQEIEDIKHGLESGSITYDPAKLKFSEEAMEEQKHCVRIADEKVALATQTYDLVDAHIQQLDQFMRKLEEIRQGKEAAAAVTAGTAVATTATPTVNAGATTADANPKSGRSGERGRGGRKKAKVPTEQSVPVPVPLPPIDLELPVDPNEPTYCLCNQVSYGEMVACDNPNCKIEWYHYGCVGVKEQPKGKWYCPNCIGFQKKRKGK

SEQ ID NO: 12374 - protein, 225 aa, Zea mays subsp. mays
  peptide (1)..(225): Ceres Seq. ID no. 12413913
MRELDKSLHGVQLENEQRCQQEIEDIKHGLESGSITYDPAKLKFSEEAMEEQKHCVRIADEKVALATQTYDLVDAHIQQLDQFMRKLEEIRQGKEAAAAVTAGTAVATTATPTVNAGATTADANPKSGRSGERGRGGRKKAKVPTEQSVPVPVPLPPIDLELPVDPNEPTYCLCNQVSYGEMVACDNPNCKIEWYHYGCVGVKEQPKGKWYCPNCIGFQKKRKGK

SEQ ID NO: 12375 - DNA, 1009 bp, Zea mays subsp. mays
  misc_feature (1)..(1009): Ceres Seq. ID no. 12349674
  misc_feature (1)..(1009): Ortholog of  Ceres SEQ ID NO 13661928 as cited in SEQ ID NO 61155
aaaacatcaaccccaaccccaacgactccaagtcaagagagcggcaagagcacgtgccggccgccgatcaaatccaccgagcaatcgcgcgcggccgccgagctgccaaggcggcggcggcggtcggtcggtctgcgatatacgatggcggcggcctactacggaggtcctccggcggcgccggcggcgccggcccccgtggcggtggtgtccccgcagttctgtgcgccgtacgtggtgcccctgacggtgaccaagaaggccatcagcctctccgacggagacttcaccatcaccgacgccaacggcgccaccgtgctgcaggtcaagggcgccgtcttcagtatccgccaccgccgcgtcctccttgacgccgccggccagcccatcctcaccatgctggagaaggtattcagcatgcacaacagatgggaggtgttcagaggggacagctcgaacgagagcgacctgctcttcaccgcgaagaaatcctcgatattccagctgaagacggagatggacatcttcctggcctccaacaccgcgcagcaggcgtgcgacttcaagatcaagggcagctacttcgagaggtcgtgcgccttctacctcggcaactccagcagcatgatcgcccagatgaaccgccagtttaccgtcaccaatgtgctgcttggaagggacacgtttggcgtcactgtgttcccgcacgttgactacgtgttcgtcgctgctcttgttgtgatactggatgagattcatagggaacggtccgactgaggaacacaccacaccaccaagcttctccaccgttgctcgaccatgctatgcgcatgtatcatcatcactgcaggttattcttgtcaattatatatatactttccatgtatgtatgtaagtattaatgggttaatacactacctcccgatgtatttgttttatatatgtttgaatatagacataaaaaccaaacagctattattttgagatgaaaggagtactatttagtgtc

SEQ ID NO: 12376 - protein, 258 aa, Zea mays subsp. mays
  peptide (1)..(258): Ceres Seq. ID no. 12349675
KTSTPTPTTPSQESGKSTCRPPIKSTEQSRAAAELPRRRRRSVGLRYTMAAAYYGGPPAAPAAPAPVAVVSPQFCAPYVVPLTVTKKAISLSDGDFTITDANGATVLQVKGAVFSIRHRRVLLDAAGQPILTMLEKVFSMHNRWEVFRGDSSNESDLLFTAKKSSIFQLKTEMDIFLASNTAQQACDFKIKGSYFERSCAFYLGNSSSMIAQMNRQFTVTNVLLGRDTFGVTVFPHVDYVFVAALVVILDEIHRERSD

SEQ ID NO: 12377 - protein, 210 aa, Zea mays subsp. mays
  peptide (1)..(210): Ceres Seq. ID no. 12349676
MAAAYYGGPPAAPAAPAPVAVVSPQFCAPYVVPLTVTKKAISLSDGDFTITDANGATVLQVKGAVFSIRHRRVLLDAAGQPILTMLEKVFSMHNRWEVFRGDSSNESDLLFTAKKSSIFQLKTEMDIFLASNTAQQACDFKIKGSYFERSCAFYLGNSSSMIAQMNRQFTVTNVLLGRDTFGVTVFPHVDYVFVAALVVILDEIHRERSD

SEQ ID NO: 12378 - DNA, 1116 bp, Zea mays subsp. mays
  misc_feature (1)..(1116): Ceres Seq. ID no. 12367240
  misc_feature (1)..(1116): Ortholog of  Ceres SEQ ID NO 12593170 as cited in SEQ ID NO 63263
  misc_feature (1)..(1116): Ortholog of  Ceres SEQ ID NO 14301882 as cited in SEQ ID NO 64381
  misc_feature (1)..(1116): Ortholog of  Ceres SEQ ID NO 13597851 as cited in SEQ ID NO 64869
  misc_feature (1)..(1116): Ortholog of  Ceres SEQ ID NO 13662420 as cited in SEQ ID NO 68680
aacacacacattctgcgtggatttggctcgggggtcccgacagatctcagatgagagatctcgggcgttaggtttctggagcgtgctaatgaggtgctgatttggtgctgtgcagaatggaggcggaggagcgcgtggcggaggcgtcaagccgcagtacgggttccggccgacggagcccgcggggttcggcggcggcaggggcgatgcgaccaccgacatccctctggacaccatgaacgattcgaagggcaaggcgaaggagctgtctcagtgggagtcagatctcaggaggagggagtcggatatcaggaggagggaggaagctctcaagagcgctggggtgcccatggaggacaagaactggccgcctttcttcccaatcatccaccatgatattgccaatgagataccagcaaacgctcagaagttgcagtatcttgcgtttgcgagctggcttggtattgtgctttgcctcttttggaattttattgctgtcatagtctgttggatcagagggggagattctaaactatttttcctggctaccatctatggtatgcttggcatccctttgtcctacttgatgtggtatagacctctgtaccgagcaatgagaactgacagtgctttcagctttggatggtttttcctttgttacctgctccatattggtttttgcatatttgctgccattgctcctgcagttgtattccgtggaaaatcattaacgggtatactggcagcgatcgacaccttttctgatcatgcaatagttgggatcttttactttgtcggatttgccttgttttgcttggagacacttgtgagcatatgggttcttcagaaagtatacatgtacttcagagggcacaagtaggctatggaagcacttgcaatagtcaaccaactaccatctcatctgattgccatgtggttttgtatgttaggacaacgtatatttttccgtttgcattgtggagggtaagtacgactatatgtataattttcggtttgcatggtggagggtaaatacgactatattgtagcgtctctctcgactgatctgtttttaaccccaattctttgctcatatacaaattgtgctttgtatgc

SEQ ID NO: 12379 - protein, 214 aa, Zea mays subsp. mays
  peptide (1)..(214): Ceres Seq. ID no. 12367241
MNDSKGKAKELSQWESDLRRRESDIRRREEALKSAGVPMEDKNWPPFFPIIHHDIANEIPANAQKLQYLAFASWLGIVLCLFWNFIAVIVCWIRGGDSKLFFLATIYGMLGIPLSYLMWYRPLYRAMRTDSAFSFGWFFLCYLLHIGFCIFAAIAPAVVFRGKSLTGILAAIDTFSDHAIVGIFYFVGFALFCLETLVSIWVLQKVYMYFRGHK

SEQ ID NO: 12380 - protein, 176 aa, Zea mays subsp. mays; identical to SEQ ID NO: 6569
  peptide (1)..(176): Ceres Seq. ID no. 12367242

SEQ ID NO: 12381 - DNA, 1636 bp, Zea mays subsp. mays
  misc_feature (1)..(1636): Ceres Seq. ID no. 12372649
  misc_feature (1)..(1636): Ortholog of  Ceres SEQ ID NO 14314404 as cited in SEQ ID NO 57421
  misc_feature (1)..(1636): Ortholog of  Ceres SEQ ID NO 13493536 as cited in SEQ ID NO 58515
  misc_feature (1)..(1636): Ortholog of  Ceres SEQ ID NO 15225741 as cited in SEQ ID NO 59606
  misc_feature (1)..(1636): Ortholog of  Ceres SEQ ID NO 12618461 as cited in SEQ ID NO 64349
gcacgagaccattacctagaacatcctaatcgaaaagaccgatagaacacgaccttaggggttcagatcggatcggaagcttccataagtttccatcgggcgtcgccggtatggcgatccgcaaggggtcttcgtacgccgtcgcggcacttctcgcgctcgcctctgtcgccgccgtcgcaggggaggtcttcttccaggagaagttcgaagatggctgggaaagtaggtgggtcaagtctgagtggaagaaggatgagaacatggctggtgaatggaaccacacctcgggaaaatggaatggagatgccgaggacaaaggtattcaaacctccgaggattacaggttctatgccatttcagccgaataccctgagttcagcaacaaggataagaccctggtgctgcagttctctgtgaagcacgagcagaagcttgactgcggcggtggctacgtcaaattgctgggtggtggtgatgtagaccagaagaaatttggtggagacacatcttacagcattatgtttggaccagatatctgtgggtacagcaccaagaaggttcacactatcctgaccaaggatggcaagaaccacttgatcaagaaggatgtgccttgtgagactgatcagttgactcatgtttacactttgatcatccgtcctgatgcaacatacagcattctcattgataatgaagagaagcaaactggcagcatctacgagcattgggatattcttccccctaagaaaatcaaggacccagaggctaagaagcctgaggactgggatgacaaggagtacattcctgaccctgaggacaagaagccagagggctatgatgatattcccaaggaaattcctgaccctgatgctaagaagcctgaggactgggacgatgaggaagatggtgaatggactgcccctaccattcccaacccagaatacaagggaccatggaaacaaaagaaaatcaagaacccgaactaccagggtaaatggaaggcacctatgattgacaacccagattttaaggatgatccatacatttacgccttcgacagcttgaagtacattggcattgagctgtggcaggttaaatcgggcactctgtttgacaacatcatcatcactgatgaccctgcgttggccaagacttttgcagaggagacctggggcaagcacaaggaggcagaaaaggctgcttttgatgaggccgagaaaaagaaggaagaagaggatgccgccaagggtggggatgatgaggatgatgacctagaggatgaggaagacgatgagaaggcagacgaggacaaggccgactctgatgccgaggatagcaaggattctgatgatgagaagcagcacgacgagctctagatggcgaggatgatgtttcgcgccgctggcctagatttatcagctctgccactatgaagttctttttttttcccgtgaccaccaagaatgtagaacactgctaataagcagatggacagtttgggtcgccgtagcgctttgtagtcatttttcccattaaagccgataacactgaacaaggaggaaggatcttttgcccacgattgttatctccctttctgatgttaaatgtgagcctttgcggcgagtttaggttc

SEQ ID NO: 12382 - protein, 422 aa, Zea mays subsp. mays
  peptide (1)..(422): Ceres Seq. ID no. 12372650
MAIRKGSSYAVAALLALASVAAVAGEVFFQEKFEDGWESRWVKSEWKKDENMAGEWNHTSGKWNGDAEDKGIQTSEDYRFYAISAEYPEFSNKDKTLVLQFSVKHEQKLDCGGGYVKLLGGGDVDQKKFGGDTSYSIMFGPDICGYSTKKVHTILTKDGKNHLIKKDVPCETDQLTHVYTLIIRPDATYSILIDNEEKQTGSIYEHWDILPPKKIKDPEAKKPEDWDDKEYIPDPEDKKPEGYDDIPKEIPDPDAKKPEDWDDEEDGEWTAPTIPNPEYKGPWKQKKIKNPNYQGKWKAPMIDNPDFKDDPYIYAFDSLKYIGIELWQVKSGTLFDNIIITDDPALAKTFAEETWGKHKEAEKAAFDEAEKKKEEEDAAKGGDDEDDDLEDEEDDEKADEDKADSDAEDSKDSDDEKQHDEL

SEQ ID NO: 12383 - protein, 371 aa, Zea mays subsp. mays
  peptide (1)..(371): Ceres Seq. ID no. 12372651
MAGEWNHTSGKWNGDAEDKGIQTSEDYRFYAISAEYPEFSNKDKTLVLQFSVKHEQKLDCGGGYVKLLGGGDVDQKKFGGDTSYSIMFGPDICGYSTKKVHTILTKDGKNHLIKKDVPCETDQLTHVYTLIIRPDATYSILIDNEEKQTGSIYEHWDILPPKKIKDPEAKKPEDWDDKEYIPDPEDKKPEGYDDIPKEIPDPDAKKPEDWDDEEDGEWTAPTIPNPEYKGPWKQKKIKNPNYQGKWKAPMIDNPDFKDDPYIYAFDSLKYIGIELWQVKSGTLFDNIIITDDPALAKTFAEETWGKHKEAEKAAFDEAEKKKEEEDAAKGGDDEDDDLEDEEDDEKADEDKADSDAEDSKDSDDEKQHDEL

SEQ ID NO: 12384 - protein, 285 aa, Zea mays subsp. mays
  peptide (1)..(285): Ceres Seq. ID no. 12372652
MFGPDICGYSTKKVHTILTKDGKNHLIKKDVPCETDQLTHVYTLIIRPDATYSILIDNEEKQTGSIYEHWDILPPKKIKDPEAKKPEDWDDKEYIPDPEDKKPEGYDDIPKEIPDPDAKKPEDWDDEEDGEWTAPTIPNPEYKGPWKQKKIKNPNYQGKWKAPMIDNPDFKDDPYIYAFDSLKYIGIELWQVKSGTLFDNIIITDDPALAKTFAEETWGKHKEAEKAAFDEAEKKKEEEDAAKGGDDEDDDLEDEEDDEKADEDKADSDAEDSKDSDDEKQHDEL

SEQ ID NO: 12385 - DNA, 1203 bp, Zea mays subsp. mays; identical to SEQ ID NO: 4004
  misc_feature (1)..(1203): Ceres Seq. ID no. 12566771
  misc_feature (1)..(1203): Ortholog of  Ceres SEQ ID NO 14304124 as cited in SEQ ID NO 56378
  misc_feature (1)..(1203): Ortholog of  Ceres SEQ ID NO 12585331 as cited in SEQ ID NO 62912
  misc_feature (1)..(1203): Ortholog of  Ceres SEQ ID NO 13654964 as cited in SEQ ID NO 63176

SEQ ID NO: 12386 - protein, 160 aa, Zea mays subsp. mays; identical to SEQ ID NO: 4005
  peptide (1)..(160): Ceres Seq. ID no. 12566772

SEQ ID NO: 12387 - protein, 158 aa, Zea mays subsp. mays; identical to SEQ ID NO: 4006
  peptide (1)..(158): Ceres Seq. ID no. 12566773

SEQ ID NO: 12388 - protein, 138 aa, Zea mays subsp. mays; identical to SEQ ID NO: 4007
  peptide (1)..(138): Ceres Seq. ID no. 12566774

SEQ ID NO: 12389 - DNA, 1563 bp, Zea mays subsp. mays
  misc_feature (1)..(1563): Ceres Seq. ID no. 12358091
  misc_feature (1)..(1563): Ortholog of  Ceres SEQ ID NO 15177012 as cited in SEQ ID NO 56256
  misc_feature (1)..(1563): Ortholog of  Ceres SEQ ID NO 14314300 as cited in SEQ ID NO 57386
  misc_feature (1)..(1563): Ortholog of  Ceres SEQ ID NO 14311993 as cited in SEQ ID NO 60371
  misc_feature (1)..(1563): Ortholog of  Ceres SEQ ID NO 13596509 as cited in SEQ ID NO 62004
  misc_feature (1)..(1563): Ortholog of  Ceres SEQ ID NO 13659971 as cited in SEQ ID NO 67565
  misc_feature (1)..(1563): Ortholog of  Ceres SEQ ID NO 13500385 as cited in SEQ ID NO 67583
accttcctccacggctccaccatcccctcccctgccctgcccccaccgccccgcttccttccgccttgctccgttgcttcctcccaccacagtccactccactcgccggccctgcagctcagtatttgactgagactggtggtggagctgctagcagcgagcctgctacttcctggtcctgacggtgcgttcagacctcagaccagtgccgacgacgagctgtgaggagagggcaaggaagcaagcctgtgaggaaggcggcgatggagaggtacgaggtgatcaaggacataggatcgggcaacttcggggtggccaagctggtccgggacgtcaggaccaaggagctcttcgccgtcaagttcatcgagcgggggatgaagattgatgagaatgtccaaagggagatcatgaaccacaggtcactgaggcatccaaacatagttaaatttaaggaggttgtgctaactcccacacatttggccatagttatggaatatgctgctggtggtgagctatttgaaaggatctgtaatgctggaagatttagtgaggatgaggcgagatttttcttccaacaactgatttcaggagttagttattgccactcaatgcaaatatgccatagagatttgaaactagaaaacactctcctggatgatagtatagcacctcggctaaagatatgtgattttggttactccaagtcctctgtgttgcactctcaaccaaaatcaactgtcgggacaccagcttacattgctcctgaggtccttgctagaaaggaatatgatggaaaggtcgccgatgtttggtcatgtggagttactctgtatgtgatgcttgttggtgcctatccctttgaggaccccgacgaaccgaagaatttccgcaagacgcttactcggattatcagcgtccagtacgcggttcctgattttgtccgagtttcaatggagtgcaggcatctgctgtctcggatctttgtggcgaaacctgagcaacggataaccatcccagagatcaagaaccacccatggttcttgaagaacctgcccatcgagatgaccgacgagtaccagatgaacctacagctagtcgacatgaatgtcccctcgcaaagcctggaggagatcatgtccatcatactggaggcccggaagcccggcgacgggctgaagcatgcgggacagctccccggccttgggagcatggagctggatgacattgatgttgacgacatagacgttgaggacagtggcgactttgtatgtgccttgtgacgcggttcaggctgtccggcaccgttgctgcggtggactctcccccactctcctggtctttgtgtcttgctgttattccatgttgtttgtttcagcgagctccgagctcccattttgttgttgtaatatcacatgttttgtgtaaccaaggtagtgacgctgtggataaataatagacgttatgtgttgtattcttgctgaattgttgttcagctccttctgtttgccctgtatgaactgggcagtttcatgagtaccacaatgtgtatgttgatggccc

SEQ ID NO: 12390 - protein, 339 aa, Zea mays subsp. mays; identical to SEQ ID NO: 2078
  peptide (1)..(339): Ceres Seq. ID no. 12358092

SEQ ID NO: 12391 - protein, 301 aa, Zea mays subsp. mays; identical to SEQ ID NO: 2079
  peptide (1)..(301): Ceres Seq. ID no. 12358093

SEQ ID NO: 12392 - protein, 290 aa, Zea mays subsp. mays; identical to SEQ ID NO: 2080
  peptide (1)..(290): Ceres Seq. ID no. 12358094

SEQ ID NO: 12393 - DNA, 1108 bp, Zea mays subsp. mays
  misc_feature (1)..(1108): Ceres Seq. ID no. 12414365
  misc_feature (1)..(1108): Ortholog of  Ceres SEQ ID NO 12585656 as cited in SEQ ID NO 68874
acacgcgtgcacgggcgggcaagcaccagaaaggaaaggcggaggccgcgcggcgggcccagctgcagccaagagcccactagtagtagtagtagctagttcaccaccgcctgcttgcctcctttactttgccatatttgctagcgtttcctggattggggacgcttccgtttcgggaagccgtgaagggatcggccacgacgatggtgcgggggaagacggagctgaagcggatagagaacgcgacgagccggcaggtgaccttctcgaagcgccgcaacgggctgctcaagaaggccttcgagctctccgtgctctgcgatgctgaggtcgggctcgtcgtcttctccccgcgcggcaagctctacgagttcgccagcgccgccagcctccagaaaacaattgaccgctacaggacatacacaagggaaaatgtcaataacaagactgttcaacaagatatacagcaagtcaaagcagatgccgtaagcttggcaagtagactcgaagccctagaaaagaccaaacgaatgtttctgggtgaaaatttagaagaatgctccattgaagaactgcataatctggaggttaaactggcgaagagccttcacgtcatcagagggaagaagacacaactgctggagcattcttctaaattttcacccagaaacattcgtaaggtcggcatgcgctacttccacaagtccgcaacaagttctactgccccgcggtcaacatcgagcgcctctggtcgatggtgcccgccgaaaaggcggcggaagccggcggcgacaaggccccgcagatcgacgtcacgcagttcggcttcttcaaggtgctcgggaagggggtgctgccgcccaagcccatcgtcgtcaaggccaagctcatctccaaggtcgccgagaagaagatcaaggccgccggcggcgccgtcgtgctcaccgcctagttttcagtccttattcgcctcttggttttgagatctatatctgaactagcagtctttcttgtctcacctatttgtgttaagaagacgtagtttttaaatccatggctccttcctgtttggacagtgctttcatatcaaatatttcaggtatattag

SEQ ID NO: 12394 - protein, 259 aa, Zea mays subsp. mays
  peptide (1)..(259): Ceres Seq. ID no. 12414366
MVRGKTELKRIENATSRQVTFSKRRNGLLKKAFELSVLCDAEVGLVVFSPRGKLYEFASAASLQKTIDRYRTYTRENVNNKTVQQDIQQVKADAVSLASRLEALEKTKRMFLGENLEECSIEELHNLEVKLAKSLHVIRGKKTQLLEHSSKFSPRNIRKVGMRYFHKSATSSTAPRSTSSASGRWCPPKRRRKPAATRPRRSTSRSSASSRCSGRGCCRPSPSSSRPSSSPRSPRRRSRPPAAPSCSPPSFQSLFASWF

SEQ ID NO: 12395 - protein, 150 aa, Zea mays subsp. mays
  peptide (1)..(150): Ceres Seq. ID no. 12414367
MFLGENLEECSIEELHNLEVKLAKSLHVIRGKKTQLLEHSSKFSPRNIRKVGMRYFHKSATSSTAPRSTSSASGRWCPPKRRRKPAATRPRRSTSRSSASSRCSGRGCCRPSPSSSRPSSSPRSPRRRSRPPAAPSCSPPSFQSLFASWF

SEQ ID NO: 12396 - DNA, 1696 bp, Zea mays subsp. mays
  misc_feature (1)..(1696): Ceres Seq. ID no. 12360761
  misc_feature (1)..(1696): Ortholog of  Ceres SEQ ID NO 15176851 as cited in SEQ ID NO 61348
  misc_feature (1)..(1696): Ortholog of  Ceres SEQ ID NO 14316049 as cited in SEQ ID NO 67036
  misc_feature (1)..(1696): Ortholog of  Ceres SEQ ID NO 14313252 as cited in SEQ ID NO 67134
  misc_feature (1)..(1696): Ortholog of  Ceres SEQ ID NO 14302220 as cited in SEQ ID NO 69121
gcacgagaccattacctagaacatcctaatcgaaaagaacgcttccgccccgccgccaccttccccgctctcctccctccgctcgcctccgcttccgttccgcgccctgcccccggaaggcaagcaaagccctcgctacttgcggagcgtcgttggtcaaaccctagcacacgtacgagcaggccagccccgcccgctcccattcccaggccctcatccatggcggcgctctccgtgcccctccacgccgccgccggatcccgcgccgccgcggccgaccccgtcaaggttccgtgcgtgaggagcactggttcagcccatttcggccgcgccttcccctccgtcgcggtctcctctttggctgcgaggcacatcgagccgatgagagcgatagctacacaggcgccccctgccgtgccacaatatttgagtggcgagaagacaaagatcggcatcaacggctttgggcggattggcaggttggtcctgcgaattgcaactagcagagacgatattgaagttgtggctgtgaatgaccctttcgttgatgctaagtacatggcctatatgttcaagtatgactctactcatggcccgtttaaaggttctatttgtgttgtggatgattcaaccctggagatcaatgggaagaaggtcacaattacaagcaaaagagatcctgcagagattccatggggtaactttggggctgaatatgttgttgaatcttctggtgtctttacaacgactgataaagcatcagcacacttaaagggtggtgctaagaaagtggtgatatctgcaccatcagcagatgctcccatgtttgtagttggagttaatgagaatagctatgattcgaagatgaatgttgtttctaatgcaagttgcaccaccaactgccttgctccacttgccaaggttgtacatgaggaatttggcatcgtggagggccttatgacaactgttcatgccacaacagccacccagaagaccgttgatggtccttcaatgaaggattggagaggaggacgtggtgctggccaaaacataattcctagctccactggtgcagcaaaggctgttggaaaagttctgcctgagctgaatggaaagctcactggcatggccttccgagttccaacaccaaatgtctctgttgtggacttgacatgccggattgagaaaaacgcctcctatgatgatgtgaaagcagccatcaaggcggcatcagagggtgcactcaaaggtattcttggctacacagacgaggacgttgtttccaatgattttgttggtgattctaggtcaagcatctttgatgccaaggctggtatcggactgagctcttctttcatgaagcttgtgtcttggtatgacaacgagtggggctacagcaaccgggttctggatctgatcgcccacatggctctcgtcagtgccgccgccaagctctgatgtccgtactcgtttctccagtagtagcttagaaaaaaagactgcaattttgacggccattttctgttagctgttgtttggaataagatcaaatgctggaacacttcgaactcgcgcgagactggactcagatccatggcctgtattttagttgtagaagtgggcaaatttgcaccgtagtaccctggcatggttatatgcggaattgttgattgatgagtcgttgtacggtttgtcc

SEQ ID NO: 12397 - protein, 485 aa, Zea mays subsp. mays
  peptide (1)..(485): Ceres Seq. ID no. 12360762
ARDHYLEHPNRKERFRPAATFPALLPPLASASVPRPAPGRQAKPSLLAERRWSNPSTRTSRPAPPAPIPRPSSMAALSVPLHAAAGSRAAAADPVKVPCVRSTGSAHFGRAFPSVAVSSLAARHIEPMRAIATQAPPAVPQYLSGEKTKIGINGFGRIGRLVLRIATSRDDIEVVAVNDPFVDAKYMAYMFKYDSTHGPFKGSICVVDDSTLEINGKKVTITSKRDPAEIPWGNFGAEYVVESSGVFTTTDKASAHLKGGAKKVVISAPSADAPMFVVGVNENSYDSKMNVVSNASCTTNCLAPLAKVVHEEFGIVEGLMTTVHATTATQKTVDGPSMKDWRGGRGAGQNIIPSSTGAAKAVGKVLPELNGKLTGMAFRVPTPNVSVVDLTCRIEKNASYDDVKAAIKAASEGALKGILGYTDEDVVSNDFVGDSRSSIFDAKAGIGLSSSFMKLVSWYDNEWGYSNRVLDLIAHMALVSAAAKL

SEQ ID NO: 12398 - protein, 412 aa, Zea mays subsp. mays; identical to SEQ ID NO: 2285
  peptide (1)..(412): Ceres Seq. ID no. 12360763

SEQ ID NO: 12399 - protein, 358 aa, Zea mays subsp. mays; identical to SEQ ID NO: 2286
  peptide (1)..(358): Ceres Seq. ID no. 12360764

SEQ ID NO: 12400 - DNA, 1756 bp, Zea mays subsp. mays
  misc_feature (1)..(1756): Ceres Seq. ID no. 12348840
  misc_feature (1)..(1756): Ortholog of  Ceres SEQ ID NO 15177258 as cited in SEQ ID NO 51386
agtttttgttcctgctcctcgcaccgcgcgccgccgacgccgcagccatgaacggtgacggcagcaaggaggacgccaacaggcgcctcgagtgggccaccttgaacctggagcgcggcgtcgtcgtgagcgagacgacgaagggcgacggcaatggcaatgcaggccggaaggcgccgataagcatcgtccggctcttcttggcctgcatggtctccggcggcatccagtacggctgggcgctgcagctctccctcctctcgccctactctcagactcttgggatctcgcacagctacgtgtctctgacatggatctgcgggcctatcgccggatttgtggtgcaacccatcgtgggctactacagcgaccggtgcacctcgaagatgggccggaggaggcccttcatcctcgcgggatgcatcatcatctgcctctctgtgttggtgatcgggttctcggcggacatcgggcggcgcctcggcgacaccaaggagcactgcagcacgttcaccggctcccgctggtccgccgccgccgtctacattgtcggattttggttccttgacttcgccaacaacacggtacagggaccggctcgcgcgatgatggccgacctggcagctggacagcacggccccaacgttggccaggcgatcttctccctgtggatggccctcggcagcgtgctcggatacttgtccggcgccaacgcgaaatggcacgactggctcccttggctcaaaaccgcggcgtgctgcgatgcgtgcgccaacctcaagggcgccttcttgactgcggtggtcctcattataatcagcatgtctgtcaccttgtggctcgccggcgaggagcggctcgacaaggaaagcgtcgacacctccggcggcgcgtgctccgcgttcatggatctcttcaagaccctcaagaagcttccgcctgccatgttcagcgtgctcgccgtcacggccgtcacatggctctcgtggttccccttcttccagtacaacaccgactggatgggccgggagatcttccacggcgagccgcagggcgcgggcggaaaggcggacctgtacgaagccggcgtccgcgagggcgccatcggcctcctattctgctccgtcgcgctcggtgtcacctccttcttcatccccaggctgtgccggaagctcacgtcccgggtcgtctggtccgtcagcagcctgatggtgttcgtcctcatgacggccatggtcgtcctcggcatggtctccatgaagggctacaggccctcgctcgccgcctccctctctggccccgaccactcgttcaagggcggcgccctcgccatcttcgcgctcatcggcatccctcaggccgtgctctacagcgtgccttgggccgtggcgtctgaggttgccaccgaggacggcggtggtcaaggtctcaccattggcgtcctcaacattgcaatcgtccttccacagctggtgatcgcgctgggcgcaggccccatcgacggcgccttcaacaaaggaaacaccccggccttcggcatcggcgccgccttcgcccttatctgcgcggtcctggcgctcatcctcctcccaaagacgagaggcgtctccaacgccaccgtcatggccggcgggcactgatctattatctatctccaggcaggcttgtcgcagcggctgaccggctgagagtagatcagaaattcagaatctgcttcttggtttcagccccacccgattaaggaggtgtttgattc

SEQ ID NO: 12401 - protein, 545 aa, Zea mays subsp. mays
  peptide (1)..(545): Ceres Seq. ID no. 12348841
FLFLLLAPRAADAAAMNGDGSKEDANRRLEWATLNLERGVVVSETTKGDGNGNAGRKAPISIVRLFLACMVSGGIQYGWALQLSLLSPYSQTLGISHSYVSLTWICGPIAGFVVQPIVGYYSDRCTSKMGRRRPFILAGCIIICLSVLVIGFSADIGRRLGDTKEHCSTFTGSRWSAAAVYIVGFWFLDFANNTVQGPARAMMADLAAGQHGPNVGQAIFSLWMALGSVLGYLSGANAKWHDWLPWLKTAACCDACANLKGAFLTAVVLIIISMSVTLWLAGEERLDKESVDTSGGACSAFMDLFKTLKKLPPAMFSVLAVTAVTWLSWFPFFQYNTDWMGREIFHGEPQGAGGKADLYEAGVREGAIGLLFCSVALGVTSFFIPRLCRKLTSRVVWSVSSLMVFVLMTAMVVLGMVSMKGYRPSLAASLSGPDHSFKGGALAIFALIGIPQAVLYSVPWAVASEVATEDGGGQGLTIGVLNIAIVLPQLVIALGAGPIDGAFNKGNTPAFGIGAAFALICAVLALILLPKTRGVSNATVMAGGH

SEQ ID NO: 12402 - protein, 530 aa, Zea mays subsp. mays
  peptide (1)..(530): Ceres Seq. ID no. 12348842
MNGDGSKEDANRRLEWATLNLERGVVVSETTKGDGNGNAGRKAPISIVRLFLACMVSGGIQYGWALQLSLLSPYSQTLGISHSYVSLTWICGPIAGFVVQPIVGYYSDRCTSKMGRRRPFILAGCIIICLSVLVIGFSADIGRRLGDTKEHCSTFTGSRWSAAAVYIVGFWFLDFANNTVQGPARAMMADLAAGQHGPNVGQAIFSLWMALGSVLGYLSGANAKWHDWLPWLKTAACCDACANLKGAFLTAVVLIIISMSVTLWLAGEERLDKESVDTSGGACSAFMDLFKTLKKLPPAMFSVLAVTAVTWLSWFPFFQYNTDWMGREIFHGEPQGAGGKADLYEAGVREGAIGLLFCSVALGVTSFFIPRLCRKLTSRVVWSVSSLMVFVLMTAMVVLGMVSMKGYRPSLAASLSGPDHSFKGGALAIFALIGIPQAVLYSVPWAVASEVATEDGGGQGLTIGVLNIAIVLPQLVIALGAGPIDGAFNKGNTPAFGIGAAFALICAVLALILLPKTRGVSNATVMAGGH

SEQ ID NO: 12403 - protein, 476 aa, Zea mays subsp. mays
  peptide (1)..(476): Ceres Seq. ID no. 12348843
MVSGGIQYGWALQLSLLSPYSQTLGISHSYVSLTWICGPIAGFVVQPIVGYYSDRCTSKMGRRRPFILAGCIIICLSVLVIGFSADIGRRLGDTKEHCSTFTGSRWSAAAVYIVGFWFLDFANNTVQGPARAMMADLAAGQHGPNVGQAIFSLWMALGSVLGYLSGANAKWHDWLPWLKTAACCDACANLKGAFLTAVVLIIISMSVTLWLAGEERLDKESVDTSGGACSAFMDLFKTLKKLPPAMFSVLAVTAVTWLSWFPFFQYNTDWMGREIFHGEPQGAGGKADLYEAGVREGAIGLLFCSVALGVTSFFIPRLCRKLTSRVVWSVSSLMVFVLMTAMVVLGMVSMKGYRPSLAASLSGPDHSFKGGALAIFALIGIPQAVLYSVPWAVASEVATEDGGGQGLTIGVLNIAIVLPQLVIALGAGPIDGAFNKGNTPAFGIGAAFALICAVLALILLPKTRGVSNATVMAGGH

SEQ ID NO: 12404 - DNA, 1299 bp, Zea mays subsp. mays
  misc_feature (1)..(1299): Ceres Seq. ID no. 12344579
  misc_feature (1)..(1299): Ortholog of  Ceres SEQ ID NO 13647648 as cited in SEQ ID NO 20346
  misc_feature (1)..(1299): Ortholog of  Ceres SEQ ID NO 15179852 as cited in SEQ ID NO 66623
attcttccactccacctcgcccgtggcccgtacccgtcgtcgtcgtccacacagccacaagctgctgctgctgctgcgcgtgcttcctcttcagttcagctgaggtagcggcgcctcacccatcccccccgctacatacacatatctccttcttcgaagaactcggtcctttgggagcgagcaggagcaggagcaggacaggaccaggaagatcattatcaggagaagctaggcggggatatggcgaacgctggcggcggggcggccggggaaggggagtggctcaaggtcgcccagctcagggccctcgtccaggaggaccaccgcgccaaggaggtggacaacctgacgctgcgtcggttcctgcgcgcgcgcggccacaacgtggacaaggcggccgccatgctgctcaagttcctcaggtggcgggcggaggcggcgcccggcggcggcaccgtgcgggaggagcaggtgcgcggggagctggagcaggacaagatctacatgggcggcgtcgacaggaccggccgccccatcatcgtcggcttgctcgccaagcactactccgccaaccgcgacatggcggagttcaagagttttgtggtctacttcttcgacaagatctgtgccaggatccccagagggcaggagaagttcctcgccatcatggatctcaagggctggggctacgcaaactgcgacgtccgggcctacatcgcggccattgagatcatgcagaactactacccggagcggctgggcaaggcgctgatgatcaacgtgccctacatcttcctcaaggtgtggaagacgatgatctaccccttcatcgacgccaacaccagggacaagttcgtgttcgtggatgacaagagcctgcgggagacgctgcggcgggagatcgacgagagccagctcccggagttccttggcgggaagatgcctctcgtctccctcaaggactacgcccagcagcctcagcccgtttgcgagtgagtctgtcgtagcgatggtggccggccggtgacgtgagcgacccaaagccgaaagctgattcgatctagactaagctaatacagcctacaagagggaggaagagaggccctacccgtggaattaagtcattagtttgtggtccaattcaataagaaagtaaatgtggtgtgtgaagatggtatggcattatcagtctttaatcccatattatacatttagatagaagaaaatcaacttatatgtggtagtgttccctactttttatatgagataaataaagggatacggagaatgctgcacgcc

SEQ ID NO: 12405 - protein, 251 aa, Zea mays subsp. mays
  peptide (1)..(251): Ceres Seq. ID no. 12344580
MANAGGGAAGEGEWLKVAQLRALVQEDHRAKEVDNLTLRRFLRARGHNVDKAAAMLLKFLRWRAEAAPGGGTVREEQVRGELEQDKIYMGGVDRTGRPIIVGLLAKHYSANRDMAEFKSFVVYFFDKICARIPRGQEKFLAIMDLKGWGYANCDVRAYIAAIEIMQNYYPERLGKALMINVPYIFLKVWKTMIYPFIDANTRDKFVFVDDKSLRETLRREIDESQLPEFLGGKMPLVSLKDYAQQPQPVCE

SEQ ID NO: 12406 - protein, 241 aa, Zea mays subsp. mays
  peptide (1)..(241): Ceres Seq. ID no. 12344581
SSTPPRPWPVPVVVVHTATSCCCCCACFLFSSAEVAAPHPSPPLHTHISFFEELGPLGASRSRSRTGPGRSLSGEARRGYGERWRRGGRGRGVAQGRPAQGPRPGGPPRQGGGQPDAASVPARARPQRGQGGRHAAQVPQVAGGGGARRRHRAGGAGARGAGAGQDLHGRRRQDRPPHHRRLARQALLRQPRHGGVQEFCGLLLRQDLCQDPQRAGEVPRHHGSQGLGLRKLRRPGLHRGH

SEQ ID NO: 12407 - protein, 197 aa, Zea mays subsp. mays
  peptide (1)..(197): Ceres Seq. ID no. 12344582
MLLKFLRWRAEAAPGGGTVREEQVRGELEQDKIYMGGVDRTGRPIIVGLLAKHYSANRDMAEFKSFVVYFFDKICARIPRGQEKFLAIMDLKGWGYANCDVRAYIAAIEIMQNYYPERLGKALMINVPYIFLKVWKTMIYPFIDANTRDKFVFVDDKSLRETLRREIDESQLPEFLGGKMPLVSLKDYAQQPQPVCE

SEQ ID NO: 12408 - DNA, 1770 bp, Zea mays subsp. mays
  misc_feature (1)..(1770): Ceres Seq. ID no. 12347178
  misc_feature (1)..(1770): Ortholog of  Ceres SEQ ID NO 12779893 as cited in SEQ ID NO 66238
acgaacacatagatccgcatcgtcgatccatccgtcctcctcccgacggtacgccagcctgccagagtccgacgcacgcctagggctcctggacacagcagagcccacgccttgactcgctccgttcgagtggagcgcacaggcaccggccggcgaccagagagggagcggatcgagggggctcggcttgagtggaggagatggaccgcaaggatgtcgggatcctcgccatggacatctacttcccgccctcctgcgtgcagcaggaagcacttgaggcccatgatggggcgagcaaagggaagtacaccattgggcttgggcaagattgcatggccttttgcagcgaggtggaggatgtcatctcaatgagtttgacggttgtcaattctctgctgaaaaaatacaagattgatcccaagctaattggtcgcttggaggtgggaagtgaaacagttatagacaaaagcaaatccatcaaaacttggctgatgcagatttttgaggaaagtgataatactgacattgaaggtgttgactccagcaatgcatgttatggtgggacagcagccctactgaattgtgtgaattgggtcgaaagtaactcctgggatggccgttatggtcttgtcgtttgcacggacagcgcggtttatgcggaaggaccagctcgtccaacaggaggtgctgctgctatagcaatgctcattggtcctaatgctccgatttccttcgagagcaaatatagagcttctcatatggctcatgtttatgatttctacaaacctgatcttgcaagtgaatatccggttgttgatggtaaattatcccaaacatgctacctgatggctcttgactcatgctacagacagttctgcaacaagtatgagaagattgcgggtaaacaattctcaatttcagatgcagaatattttgtgttccattctccatacaacaagctcgtgcagaagagttttgctcgactttactacaatgacttcatgcgcaactgcagctatgttgatgatgatgctaaagagaagctccagtccttttcaaatttgactggtgaagagagctaccagagtcgcgacttggaaaaggcctcacaacaggtcgcaaagcacctgtatggcatcaaagttcagccaacgactctgcttccgaaacagatcggcaacatgtatacggcatccctttatgctgcattggcatctgtgctatataacaagcatgatagtctgaatggacaaagaattgtgatgttctcttacggcagcggcttgacatccactatgttttcgttgaggctaaacaatggccagcatcccttcagtctatcaaacataggttcagttcttggtgtcaccgagaagcttcagtcaagacatgagaccttgcctgagaaattcgttgagacgctgaagctgatggaacaccgatacggcgcaaaagacttcgagacgagcagcgacacgagtctcctgcagccgggcacattctacctcaccaaggtggactccatgtaccggaggttctattcccagaagccggccgaggaaacaggcggcggtaaaaccaagtgctgcaacggcttcgcaaatggccactagtgggagtccgcgtgccgtttgaattgctacgtcgcccttctgtactgttgatcatcattctctgtgttttgatcatgcttgtggttagcgttttcaccctagggtgtttctgaaataatatattactagatatatccccatctgttacatcggggtc

SEQ ID NO: 12409 - protein, 470 aa, Zea mays subsp. mays
  peptide (1)..(470): Ceres Seq. ID no. 12347179
MDRKDVGILAMDIYFPPSCVQQEALEAHDGASKGKYTIGLGQDCMAFCSEVEDVISMSLTVVNSLLKKYKIDPKLIGRLEVGSETVIDKSKSIKTWLMQIFEESDNTDIEGVDSSNACYGGTAALLNCVNWVESNSWDGRYGLVVCTDSAVYAEGPARPTGGAAAIAMLIGPNAPISFESKYRASHMAHVYDFYKPDLASEYPVVDGKLSQTCYLMALDSCYRQFCNKYEKIAGKQFSISDAEYFVFHSPYNKLVQKSFARLYYNDFMRNCSYVDDDAKEKLQSFSNLTGEESYQSRDLEKASQQVAKHLYGIKVQPTTLLPKQIGNMYTASLYAALASVLYNKHDSLNGQRIVMFSYGSGLTSTMFSLRLNNGQHPFSLSNIGSVLGVTEKLQSRHETLPEKFVETLKLMEHRYGAKDFETSSDTSLLQPGTFYLTKVDSMYRRFYSQKPAEETGGGKTKCCNGFANGH

SEQ ID NO: 12410 - protein, 460 aa, Zea mays subsp. mays
  peptide (1)..(460): Ceres Seq. ID no. 12347180
MDIYFPPSCVQQEALEAHDGASKGKYTIGLGQDCMAFCSEVEDVISMSLTVVNSLLKKYKIDPKLIGRLEVGSETVIDKSKSIKTWLMQIFEESDNTDIEGVDSSNACYGGTAALLNCVNWVESNSWDGRYGLVVCTDSAVYAEGPARPTGGAAAIAMLIGPNAPISFESKYRASHMAHVYDFYKPDLASEYPVVDGKLSQTCYLMALDSCYRQFCNKYEKIAGKQFSISDAEYFVFHSPYNKLVQKSFARLYYNDFMRNCSYVDDDAKEKLQSFSNLTGEESYQSRDLEKASQQVAKHLYGIKVQPTTLLPKQIGNMYTASLYAALASVLYNKHDSLNGQRIVMFSYGSGLTSTMFSLRLNNGQHPFSLSNIGSVLGVTEKLQSRHETLPEKFVETLKLMEHRYGAKDFETSSDTSLLQPGTFYLTKVDSMYRRFYSQKPAEETGGGKTKCCNGFANGH

SEQ ID NO: 12411 - protein, 426 aa, Zea mays subsp. mays
  peptide (1)..(426): Ceres Seq. ID no. 12347181
MAFCSEVEDVISMSLTVVNSLLKKYKIDPKLIGRLEVGSETVIDKSKSIKTWLMQIFEESDNTDIEGVDSSNACYGGTAALLNCVNWVESNSWDGRYGLVVCTDSAVYAEGPARPTGGAAAIAMLIGPNAPISFESKYRASHMAHVYDFYKPDLASEYPVVDGKLSQTCYLMALDSCYRQFCNKYEKIAGKQFSISDAEYFVFHSPYNKLVQKSFARLYYNDFMRNCSYVDDDAKEKLQSFSNLTGEESYQSRDLEKASQQVAKHLYGIKVQPTTLLPKQIGNMYTASLYAALASVLYNKHDSLNGQRIVMFSYGSGLTSTMFSLRLNNGQHPFSLSNIGSVLGVTEKLQSRHETLPEKFVETLKLMEHRYGAKDFETSSDTSLLQPGTFYLTKVDSMYRRFYSQKPAEETGGGKTKCCNGFANGH

SEQ ID NO: 12412 - DNA, 831 bp, Zea mays subsp. mays
  misc_feature (1)..(831): Ceres Seq. ID no. 12345704
  misc_feature (1)..(831): Ortholog of  Ceres SEQ ID NO 15224286 as cited in SEQ ID NO 62627
agaaaaagtacacctgtcgcgtaagcgtcctcaggcagcagctccccggtcgcggtctctgtctctctgaagggaaagctctgtttccccttcccggtgccggagtcggggaaggtcaccgcgggcgcgagccgatggacagcaacaacctcctggcggcgtggccggtcctggggccgggcgtcgccggcgccgtattcggcgcaggctggtggttttgggtcgacgccgtcgtctgcagcgccgccgccgtgccattcctccactacctcccagggttcttcgcctcgttcgccgcgctcatgttcaactgcgtcaaccgggaggacatcggcgatggctactactcaccgtacgacgactccgagtggagggtgaagctctggctttttatttcgtacgtggtgtcgtttgtttcgctggccggggcagtgggtttcttggttcaagatgcgcttacggatacggggccatctgcgtggactggcagtgctggcatcctgcagtgcgtgtttgtgttagtgagtgggctgatctactggacgtgccactctgaagattgacttaagaagtataggtatatatggccaaggaggaggaggatggagactgcttttctcagaagcgattgcttttccgtagtacgtttctggaggcacctttggaccgtgctttccgaaacgggtggaataaagagccattttctagttgtttcaagagagatgtagataagctgtactactattttacacgtgtttatagtcgtgtatcatgttgcttaaaactactttgtgaggtgttgttttggagcaagaaacttataggggtgct

SEQ ID NO: 12413 - protein, 186 aa, Zea mays subsp. mays
  peptide (1)..(186): Ceres Seq. ID no. 12345705
KKYTCRVSVLRQQLPGRGLCLSEGKALFPLPGAGVGEGHRGREPMDSNNLLAAWPVLGPGVAGAVFGAGWWFWVDAVVCSAAAVPFLHYLPGFFASFAALMFNCVNREDIGDGYYSPYDDSEWRVKLWLFISYVVSFVSLAGAVGFLVQDALTDTGPSAWTGSAGILQCVFVLVSGLIYWTCHSED

SEQ ID NO: 12414 - protein, 142 aa, Zea mays subsp. mays
  peptide (1)..(142): Ceres Seq. ID no. 12345706
MDSNNLLAAWPVLGPGVAGAVFGAGWWFWVDAVVCSAAAVPFLHYLPGFFASFAALMFNCVNREDIGDGYYSPYDDSEWRVKLWLFISYVVSFVSLAGAVGFLVQDALTDTGPSAWTGSAGILQCVFVLVSGLIYWTCHSED

SEQ ID NO: 12415 - DNA, 1129 bp, Zea mays subsp. mays
  misc_feature (1)..(1129): Ceres Seq. ID no. 12373395
  misc_feature (1)..(1129): Ortholog of  Ceres SEQ ID NO 13598589 as cited in SEQ ID NO 65254
acaatactagttgttcgttcccaccgcaagcaaagcattttcagccgccccaccgcagcagcagagaagaggccgccgccgccgcgaccaagagccgatggatccgaagatgacagaggtgacccagatgttcgcccgcttcaaggcggcctacacccgcaacgacctcgacgcctgcgtcaccctcctctcacagctcaaggtccatctcaccaaattccccagccttccgccctcatttgagcagacacctaaagccgtggaggagctcaaacttgcaagggacatttatgagcatgctgttgttttgagtgtgaaacttgaggaccaagatgcatttgaacgtgatttctgtcagctaaagccttattacatggatacatgtggcataattcccccctcaccagaggagtacccaattttgggactcaatcttctgaggctgttggttcagaatagaattgctgagttccatactgagctggagcttttacctgtcaaggcacttgagcacccttgcatcaagcatgctgtagagcttgagcaatccttcatggagggtgcctacaaccgagtgttaagcgctcggcaagctgtgccacatgagacctatgtttacttcatggaccttctcgccaagacagttagagatgagatcgctgggtgcagcgaaaaggggtatgattccctatctgtaagtgatgcaaaacaaatgcttatgttcagttctgaccaagatctgcacgagtacatcacagaggagcacccggaatgggagcttaagaacggtgccgtcttcttccagaaggcaaaggagtcacagccctacaaggagatcccatccttgcagctcatcaaccagacgctcagctatgcgagggagctggagcgtattgtatgatttaatttcacagtaatccctggttgatgtttatttctgtggtcacttggcatggcatgtactgtcctttacatttgagatcagctctgatcgcagctcatgtcaactctgatcaatctctgaagggcttgatctctgcggcattgtttcaccacattaactgcattgcttgaaagatgcctgtcatccattgctgctgttaacttttgatgggcttaatattgaatt

SEQ ID NO: 12416 - protein, 267 aa, Zea mays subsp. mays
  peptide (1)..(267): Ceres Seq. ID no. 12373396
MDPKMTEVTQMFARFKAAYTRNDLDACVTLLSQLKVHLTKFPSLPPSFEQTPKAVEELKLARDIYEHAVVLSVKLEDQDAFERDFCQLKPYYMDTCGIIPPSPEEYPILGLNLLRLLVQNRIAEFHTELELLPVKALEHPCIKHAVELEQSFMEGAYNRVLSARQAVPHETYVYFMDLLAKTVRDEIAGCSEKGYDSLSVSDAKQMLMFSSDQDLHEYITEEHPEWELKNGAVFFQKAKESQPYKEIPSLQLINQTLSYARELERIV

SEQ ID NO: 12417 - protein, 263 aa, Zea mays subsp. mays
  peptide (1)..(263): Ceres Seq. ID no. 12373397
MTEVTQMFARFKAAYTRNDLDACVTLLSQLKVHLTKFPSLPPSFEQTPKAVEELKLARDIYEHAVVLSVKLEDQDAFERDFCQLKPYYMDTCGIIPPSPEEYPILGLNLLRLLVQNRIAEFHTELELLPVKALEHPCIKHAVELEQSFMEGAYNRVLSARQAVPHETYVYFMDLLAKTVRDEIAGCSEKGYDSLSVSDAKQMLMFSSDQDLHEYITEEHPEWELKNGAVFFQKAKESQPYKEIPSLQLINQTLSYARELERIV

SEQ ID NO: 12418 - protein, 257 aa, Zea mays subsp. mays
  peptide (1)..(257): Ceres Seq. ID no. 12373398
MFARFKAAYTRNDLDACVTLLSQLKVHLTKFPSLPPSFEQTPKAVEELKLARDIYEHAVVLSVKLEDQDAFERDFCQLKPYYMDTCGIIPPSPEEYPILGLNLLRLLVQNRIAEFHTELELLPVKALEHPCIKHAVELEQSFMEGAYNRVLSARQAVPHETYVYFMDLLAKTVRDEIAGCSEKGYDSLSVSDAKQMLMFSSDQDLHEYITEEHPEWELKNGAVFFQKAKESQPYKEIPSLQLINQTLSYARELERIV

SEQ ID NO: 12419 - DNA, 1826 bp, Zea mays subsp. mays
  misc_feature (1)..(1826): Ceres Seq. ID no. 12411550
  misc_feature (1)..(1826): Ortholog of  Ceres SEQ ID NO 13597732 as cited in SEQ ID NO 64810
  misc_feature (1)..(1826): Ortholog of  Ceres SEQ ID NO 14301912 as cited in SEQ ID NO 67786
actacctcccaaactcgcgagcgagtcgaggctccaaccccggcacatcacaggaggaggaggacgacgcgcccaccatggccatggcgacggccctccgcaagctctccgccaacgctctgcgccgccagccgctctcccgcatcacgccgctctactacatggcgtcccttccggcgacggaggagagatccggaatcacctggactaagcagttgaacgcgccgctggaagaggtcgaccccgagattgctgacatcatcgagcacgagaaggcccgccaatggaagggtctggagctcatcccgtcggagaatttcacgtcggtgtcagtgatgcaggcagttgggtcggtaatgaccaacaagtacagcgaggggtaccctggcgcaagatactacgggggaaatgagtttattgatatggcagagtccttgtgtcagaaacgtgctttggaggctttccgtttggacccggcgaaatggggagtgaatgtgcaacctctatccggttcgcccgccaacttccatgtatacactgcactcttgaagccacatgaaaggatcatggctttggatcttcctcacggtggacatctttctcatggttaccagactgacactaagaagatatctgcaacttcaatattttttgagacaatgccttacagattggatgaaagcactggattgattgattacgatcagttgaagaaaagcgctgttctttttaggccaaagttgatcattgccggtgcaagtgcatatgctcggctatatgattatgaccgtatgcggaagatatgcaccaagcagaaggcaatacttctagcagacatggcacatattagtgggcttgttgcagctggtgttgttccatctccttttgattatgcagatgtagtgactaccactactcacaaatcactccgtgggccacgtggagccatgatcttttacaggaagggagtcaaagaaataaataaacaaggaaaagaggttatgtatgattttgaggacaaaatcaatgctgctgtctttcctggtctgcaaggtgggcctcataaccataccattactggcttggctgttgcgctcaaacaggcaactactccagaatacagagcttaccaagagcaagttatcagtaattgtgctaaatttgcgcagagcctgatttcaaaaggatatgaactcgtctctggtgggactgacaaccatttagttctggtgaatctcaagaataaggggatagatggttcaagggtggagaaggttttagaaagtgtgcatattgcagcaaacaagaacacagttcctggtgatgtttcagctatggtgccaggaggcatcaggatgggaaccccagcccttacgtcgagaggatttgttgaagaagatttcgctaaagttgctgacttcttcgatgcagcagtgaatctggccttgaagattaaggctgcaacgacaggtggaacaaagctgaaggactttgttgccactttgcaatctgatagcatccaagttgagattgcaaagcttcgccatgatgtagaggaatttgcaaaacaattcccaacaattggatttgagaaagagaccatgaaatacaagaactaatatctggatgacaagaagagaatgaggtcactcttcttgcagtaagcattcgaagcaagatgccacgatgattattgggagtttaaccatggtgtaatggcatcttatgttaaagagatgttggcaatttacagcatgtggaactttcgtcaatcatattgtagacacataccgcgagatgctatattgaccggacaattgcatttc

SEQ ID NO: 12420 - protein, 538 aa, Zea mays subsp. mays
  peptide (1)..(538): Ceres Seq. ID no. 12411551
YLPNSRASRGSNPGTSQEEEDDAPTMAMATALRKLSANALRRQPLSRITPLYYMASLPATEERSGITWTKQLNAPLEEVDPEIADIIEHEKARQWKGLELIPSENFTSVSVMQAVGSVMTNKYSEGYPGARYYGGNEFIDMAESLCQKRALEAFRLDPAKWGVNVQPLSGSPANFHVYTALLKPHERIMALDLPHGGHLSHGYQTDTKKISATSIFFETMPYRLDESTGLIDYDQLKKSAVLFRPKLIIAGASAYARLYDYDRMRKICTKQKAILLADMAHISGLVAAGVVPSPFDYADVVTTTTHKSLRGPRGAMIFYRKGVKEINKQGKEVMYDFEDKINAAVFPGLQGGPHNHTITGLAVALKQATTPEYRAYQEQVISNCAKFAQSLISKGYELVSGGTDNHLVLVNLKNKGIDGSRVEKVLESVHIAANKNTVPGDVSAMVPGGIRMGTPALTSRGFVEEDFAKVADFFDAAVNLALKIKAATTGGTKLKDFVATLQSDSIQVEIAKLRHDVEEFAKQFPTIGFEKETMKYKN

SEQ ID NO: 12421 - protein, 513 aa, Zea mays subsp. mays
  peptide (1)..(513): Ceres Seq. ID no. 12411552
MAMATALRKLSANALRRQPLSRITPLYYMASLPATEERSGITWTKQLNAPLEEVDPEIADIIEHEKARQWKGLELIPSENFTSVSVMQAVGSVMTNKYSEGYPGARYYGGNEFIDMAESLCQKRALEAFRLDPAKWGVNVQPLSGSPANFHVYTALLKPHERIMALDLPHGGHLSHGYQTDTKKISATSIFFETMPYRLDESTGLIDYDQLKKSAVLFRPKLIIAGASAYARLYDYDRMRKICTKQKAILLADMAHISGLVAAGVVPSPFDYADVVTTTTHKSLRGPRGAMIFYRKGVKEINKQGKEVMYDFEDKINAAVFPGLQGGPHNHTITGLAVALKQATTPEYRAYQEQVISNCAKFAQSLISKGYELVSGGTDNHLVLVNLKNKGIDGSRVEKVLESVHIAANKNTVPGDVSAMVPGGIRMGTPALTSRGFVEEDFAKVADFFDAAVNLALKIKAATTGGTKLKDFVATLQSDSIQVEIAKLRHDVEEFAKQFPTIGFEKETMKYKN

SEQ ID NO: 12422 - protein, 511 aa, Zea mays subsp. mays
  peptide (1)..(511): Ceres Seq. ID no. 12411553
MATALRKLSANALRRQPLSRITPLYYMASLPATEERSGITWTKQLNAPLEEVDPEIADIIEHEKARQWKGLELIPSENFTSVSVMQAVGSVMTNKYSEGYPGARYYGGNEFIDMAESLCQKRALEAFRLDPAKWGVNVQPLSGSPANFHVYTALLKPHERIMALDLPHGGHLSHGYQTDTKKISATSIFFETMPYRLDESTGLIDYDQLKKSAVLFRPKLIIAGASAYARLYDYDRMRKICTKQKAILLADMAHISGLVAAGVVPSPFDYADVVTTTTHKSLRGPRGAMIFYRKGVKEINKQGKEVMYDFEDKINAAVFPGLQGGPHNHTITGLAVALKQATTPEYRAYQEQVISNCAKFAQSLISKGYELVSGGTDNHLVLVNLKNKGIDGSRVEKVLESVHIAANKNTVPGDVSAMVPGGIRMGTPALTSRGFVEEDFAKVADFFDAAVNLALKIKAATTGGTKLKDFVATLQSDSIQVEIAKLRHDVEEFAKQFPTIGFEKETMKYKN

SEQ ID NO: 12423 - DNA, 1481 bp, Zea mays subsp. mays
  misc_feature (1)..(1481): Ceres Seq. ID no. 13493636
  misc_feature (1)..(1481): Ortholog of  Ceres SEQ ID NO 15170447 as cited in SEQ ID NO 52849
  misc_feature (1)..(1481): Ortholog of  Ceres SEQ ID NO 13589042 as cited in SEQ ID NO 60626
  misc_feature (1)..(1481): Ortholog of  Ceres SEQ ID NO 14302887 as cited in SEQ ID NO 66146
aaaatcgcccctgggcgagggggaagccggaggacgctgagggcgggcgaggccgccgtccccagatctcacttccgccgcccgcccgccccgcttttgttactactcttcttttgttcggattgagggaggaaggaaaggaggtgcttcaatatgaaggcgctcattcttgtcgggggttttggaacccgccttcggcctttgactcttagcttcccgaagccccttgtggattttgcaaacaagcccatgattctgcatcagatcgaagctttgaaagaagttggggtcacagaggtggttttggccatcaactaccgcccagaggtaatgattaatttcttgaaggactttgaggataaacttggcatcacaattacatgctcccaagagactgagcccttaggaactgctggccctcttgctctagcaagggacaagcttgcggatggatctggcgagccattctttgtcctcaacagcgatgtcataagcgaatacccatttgctgaactcatcaaatttcacaagtctcatggtggtgaggcaacaattatggtcactaaggtggatgaaccatctaaatatggtgttgtggttatggaggaggcaactggcagggtggaaaggtttgttgagaagccaaaaatatttgtgggcaacaagatcaatgctgggatttacttgcttaacccatctgtccttgaccgcattgaactgagaccaacatcaattgagaaagaggtcttccctcaaattgcagctgatcaacagctctatgcaatggtccttcctggtttttggatggatgttggtcagccaagagactacattactggattgcgtctttatctagactcgcttaggaagaaatcggctgccaggctagctgctggggcacatgttgttggcaacgtgctggtgcatgagagcgccaagattggagaaggttgcctgatcggtcctgatgtcgcaattggacctggatgtgtcgtggaggatggcgtgaggctttcccgctgcactgtcatgcgtggtgtgcgtatcaagaagcatgcctgcatctcgaacagcattatcgggtggcactcaactgttggacaatgggcacggatagagaatatgaccatcctgggcgaggatgttcatgtgtgtgacgaggtatacagcaatggcggtgttgttctcccacataaagagatcaagtcaagcattttgaagcctgagatcgtcatgtgagagttctccagttttaactacagtacattcttaagttcttcgactaagtgaggattgcagatccccttttataagtgatatctattggtatctttggcctaattcaaacagcttcagacatgttcgcttgctaaactgttgacaatgtatccttgttctttgttgaaaagttttgtacttgtagtgtcaatcatatttcacaagtggttgtcatataatactgagggaggttttggaccccc

SEQ ID NO: 12424 - protein, 361 aa, Zea mays subsp. mays
  peptide (1)..(361): Ceres Seq. ID no. 13493637
MKALILVGGFGTRLRPLTLSFPKPLVDFANKPMILHQIEALKEVGVTEVVLAINYRPEVMINFLKDFEDKLGITITCSQETEPLGTAGPLALARDKLADGSGEPFFVLNSDVISEYPFAELIKFHKSHGGEATIMVTKVDEPSKYGVVVMEEATGRVERFVEKPKIFVGNKINAGIYLLNPSVLDRIELRPTSIEKEVFPQIAADQQLYAMVLPGFWMDVGQPRDYITGLRLYLDSLRKKSAARLAAGAHVVGNVLVHESAKIGEGCLIGPDVAIGPGCVVEDGVRLSRCTVMRGVRIKKHACISNSIIGWHSTVGQWARIENMTILGEDVHVCDEVYSNGGVVLPHKEIKSSILKPEIVM

SEQ ID NO: 12425 - protein, 329 aa, Zea mays subsp. mays
  peptide (1)..(329): Ceres Seq. ID no. 13493638
MILHQIEALKEVGVTEVVLAINYRPEVMINFLKDFEDKLGITITCSQETEPLGTAGPLALARDKLADGSGEPFFVLNSDVISEYPFAELIKFHKSHGGEATIMVTKVDEPSKYGVVVMEEATGRVERFVEKPKIFVGNKINAGIYLLNPSVLDRIELRPTSIEKEVFPQIAADQQLYAMVLPGFWMDVGQPRDYITGLRLYLDSLRKKSAARLAAGAHVVGNVLVHESAKIGEGCLIGPDVAIGPGCVVEDGVRLSRCTVMRGVRIKKHACISNSIIGWHSTVGQWARIENMTILGEDVHVCDEVYSNGGVVLPHKEIKSSILKPEIVM

SEQ ID NO: 12426 - protein, 302 aa, Zea mays subsp. mays
  peptide (1)..(302): Ceres Seq. ID no. 13493639
MINFLKDFEDKLGITITCSQETEPLGTAGPLALARDKLADGSGEPFFVLNSDVISEYPFAELIKFHKSHGGEATIMVTKVDEPSKYGVVVMEEATGRVERFVEKPKIFVGNKINAGIYLLNPSVLDRIELRPTSIEKEVFPQIAADQQLYAMVLPGFWMDVGQPRDYITGLRLYLDSLRKKSAARLAAGAHVVGNVLVHESAKIGEGCLIGPDVAIGPGCVVEDGVRLSRCTVMRGVRIKKHACISNSIIGWHSTVGQWARIENMTILGEDVHVCDEVYSNGGVVLPHKEIKSSILKPEIVM

SEQ ID NO: 12427 - DNA, 1426 bp, Zea mays subsp. mays
  misc_feature (1)..(1426): Ceres Seq. ID no. 12347763
  misc_feature (1)..(1426): Ortholog of  Ceres SEQ ID NO 13596048 as cited in SEQ ID NO 68476
  misc_feature (1)..(1426): Ortholog of  Ceres SEQ ID NO 12589137 as cited in SEQ ID NO 0
aatccgttcagcggtcagcggaacatgatacggtctgcgcccttccaagcaatcacatcttcttccccgttataaatcgctcactcgctatcgtcggctacctgtatcctggcgacacccaacagcctgcttgccgcgcttgcattgaggggagttcggggagcggccggtgcggaaggaatcgacacagagttcagttcacatggctgctgaatcagagaacggcaactgcaaagcttgggcagcgagagatccttctggagttctctcaccacacagttttaaccgcagagcagtgcaaagcggcgatgtttcgctgaagatcatatactgtggagtctgttatgcagacgttgcttggacgcggaataagctcaatgattcaaaatatcctttggttcctgggcatgagatagctggagttgtaactcaggttggtgcagatgtcaaaggctttaaagtgggtgaccatgtaggtgttggaacatatgtgaactcttgccgtgattgtgagaactgcaatatctctctagacaaccattgcccaaaagcagtttatactttcaatggcattgatacagatggaactgtcacaaaggggggttactccactcacattgtagtccatgaaaggtattgcttcaaaatacccgatggctaccctttggcgaaggcagcacctcttctgtgtgctggaataaccgtgtatactccaatgatgcgacacaacatgaaccaacctggaaagtcacttggggtcattggtcttggtggtctgggtcacatggctgtgaaatttggtaaagcatttggtcttaaggtcacagttttcagtacaagtgaatcaaagagagatgaagccatcaacctccttggagcagataattttgttatatcatcagacacacagcaaatggagtccctgaagaactccctgcacttcataattgacactgcttccggtgaccatccatttgatccgtatttctctctccttaaggttggtggtgtgatgacattggtaggttttccaagtgagatcaaaatgcatcctgcaagccttatacttggtgcgcggaccttgtctggcagtgttgttggaggtataaaagacatccaagaaatggttaacttctgtgcagccaacaatatctatccggagattgagatcattaagatagattatatcaacgaggctctcgcgaggcttgttaatcgagatgtgaaataccgctttgtaatcgacatcgagaactccttcaagtagcgtgctagtgcacatgctctcgtctttctgttagtgttcaacagttcaagagctattacaaatgtgagtcatgccaaataaacttgatgtaaacaaccataattgaacagcaaggggaaacaggtatattgtgataatgaagtcgctctatgaatatcc

SEQ ID NO: 12428 - protein, 354 aa, Zea mays subsp. mays
  peptide (1)..(354): Ceres Seq. ID no. 12347764
MAAESENGNCKAWAARDPSGVLSPHSFNRRAVQSGDVSLKIIYCGVCYADVAWTRNKLNDSKYPLVPGHEIAGVVTQVGADVKGFKVGDHVGVGTYVNSCRDCENCNISLDNHCPKAVYTFNGIDTDGTVTKGGYSTHIVVHERYCFKIPDGYPLAKAAPLLCAGITVYTPMMRHNMNQPGKSLGVIGLGGLGHMAVKFGKAFGLKVTVFSTSESKRDEAINLLGADNFVISSDTQQMESLKNSLHFIIDTASGDHPFDPYFSLLKVGGVMTLVGFPSEIKMHPASLILGARTLSGSVVGGIKDIQEMVNFCAANNIYPEIEIIKIDYINEALARLVNRDVKYRFVIDIENSFK

SEQ ID NO: 12429 - protein, 183 aa, Zea mays subsp. mays
  peptide (1)..(183): Ceres Seq. ID no. 12347765
MMRHNMNQPGKSLGVIGLGGLGHMAVKFGKAFGLKVTVFSTSESKRDEAINLLGADNFVISSDTQQMESLKNSLHFIIDTASGDHPFDPYFSLLKVGGVMTLVGFPSEIKMHPASLILGARTLSGSVVGGIKDIQEMVNFCAANNIYPEIEIIKIDYINEALARLVNRDVKYRFVIDIENSFK

SEQ ID NO: 12430 - protein, 182 aa, Zea mays subsp. mays
  peptide (1)..(182): Ceres Seq. ID no. 12347766
MRHNMNQPGKSLGVIGLGGLGHMAVKFGKAFGLKVTVFSTSESKRDEAINLLGADNFVISSDTQQMESLKNSLHFIIDTASGDHPFDPYFSLLKVGGVMTLVGFPSEIKMHPASLILGARTLSGSVVGGIKDIQEMVNFCAANNIYPEIEIIKIDYINEALARLVNRDVKYRFVIDIENSFK

SEQ ID NO: 12431 - DNA, 946 bp, Zea mays subsp. mays
  misc_feature (1)..(946): Ceres Seq. ID no. 12340618
  misc_feature (1)..(946): Ortholog of  Ceres SEQ ID NO 14314823 as cited in SEQ ID NO 52565
  misc_feature (1)..(946): Ortholog of  Ceres SEQ ID NO 14307324 as cited in SEQ ID NO 54131
  misc_feature (1)..(946): Ortholog of  Ceres SEQ ID NO 14303336 as cited in SEQ ID NO 54567
  misc_feature (1)..(946): Ortholog of  Ceres SEQ ID NO 13594940 as cited in SEQ ID NO 55819
  misc_feature (1)..(946): Ortholog of  Ceres SEQ ID NO 13599083 as cited in SEQ ID NO 0
atctggtccttgattactcgtcctttttgcttggtgcctgtgtatatcgtcgccccggccgcttgagctagcttcctctagtgctcgctctcgtcgtcgatcggttgtttgcatagcccacggcgagccgaagcaatgtcgtcggcgcccctgcagatcgcgccggtgccggagcatgtgtgctacgtgcactgcaacttctgcaacacaattctcgcggtcagtgtcccgagtcacagcatgctgaacatcgtcacagtccgttgtgggcactgcactagcctgctgtcggtgaacttgagaggactcatccaatcacttcctgtccagaaccaccactactcccagcagcaggagaatttcaccgtccaaaatatgggttttactgaaaattaccctgagtacgcaccttcgtaccgcatgccaacgacgctgtcagtgaaaggtgatctggatcatatgctgcacgtgcgcgctccagagaagaggcagcgtgttccttcagcatataacagatttattaaggaggagatacgaaggattaaagcatgtaacccggacataagccatagggaagccttcagcactgcagcaaagaattgggcacattttccgaatattcattttggtctagggccctgtgaaagtagcaacaatcttgatgaggccaccggtgcaatgtgccatccccagaaagtccaagatctctactaagacctatatcagcactgccctttgtttcctcttagttctggactagttggtgagtgccatatatatatgcatgagtgtgatatgatcatgaggtaaggaattatgattaagatgatatatatgtacgagatgaacatgcccctaggttcatgaaagactaaataaggatcgtcatctcaccatgttatcataggtagtaactattgtttgaaataaattatcctttgtgtgc

SEQ ID NO: 12432 - protein, 192 aa, Zea mays subsp. mays
  peptide (1)..(192): Ceres Seq. ID no. 12340619
MSSAPLQIAPVPEHVCYVHCNFCNTILAVSVPSHSMLNIVTVRCGHCTSLLSVNLRGLIQSLPVQNHHYSQQQENFTVQNMGFTENYPEYAPSYRMPTTLSVKGDLDHMLHVRAPEKRQRVPSAYNRFIKEEIRRIKACNPDISHREAFSTAAKNWAHFPNIHFGLGPCESSNNLDEATGAMCHPQKVQDLY

SEQ ID NO: 12433 - protein, 157 aa, Zea mays subsp. mays
  peptide (1)..(157): Ceres Seq. ID no. 12340620
MLNIVTVRCGHCTSLLSVNLRGLIQSLPVQNHHYSQQQENFTVQNMGFTENYPEYAPSYRMPTTLSVKGDLDHMLHVRAPEKRQRVPSAYNRFIKEEIRRIKACNPDISHREAFSTAAKNWAHFPNIHFGLGPCESSNNLDEATGAMCHPQKVQDLY

SEQ ID NO: 12434 - protein, 112 aa, Zea mays subsp. mays
  peptide (1)..(112): Ceres Seq. ID no. 12340621
MGFTENYPEYAPSYRMPTTLSVKGDLDHMLHVRAPEKRQRVPSAYNRFIKEEIRRIKACNPDISHREAFSTAAKNWAHFPNIHFGLGPCESSNNLDEATGAMCHPQKVQDLY

SEQ ID NO: 12435 - DNA, 1804 bp, Zea mays subsp. mays
  misc_feature (1)..(1804): Ceres Seq. ID no. 12407383
  misc_feature (1)..(1804): Ortholog of  Ceres SEQ ID NO 15169199 as cited in SEQ ID NO 55297
  misc_feature (1)..(1804): Ortholog of  Ceres SEQ ID NO 15175690 as cited in SEQ ID NO 55466
  misc_feature (1)..(1804): Ortholog of  Ceres SEQ ID NO 15171197 as cited in SEQ ID NO 56892
atcccaccagttccccaattccatttctccatccatgacagctcgccatttccccacctgttcctacgctaccgccacctaaaaaaattccaggcactatccatttcaatcttgctcaaaggtcatttcattccggccggtgccttttttaggccgattggagggaaggctggtctgtgttttgttttcctgctgcctcttgggcgagttgaatttgggcgcctcttgctccaggcagtattttatcgagctagagtctggtacccggcgattcttgcttggtccaggcgccaaggcgaggaattgggcctagctccagctcaaatctgtgccttgttgcagacagaaggatttctgcatgggcgaccataactaagatgtgagattgggtggcgtcagctcggctggtgggtgattcttggtgcgtacacagacacatccctggaggcttgagctgatttggcgaggaggacagtgcaggagagagatgtctttcaggagcctgattcaggacatgaaggacgagttcgggagcatctcgcggcacagcctgcggtcccggtctcaccgctccgccgggaacgcggcgcgggcggcggcggcgggaccgtcggaggcgatggatcagagctgctggtcgcagctgccccccgagctcctgcgggaggtgctggtgaggatcgaggcatcggagagctggtggccagcgcgcaaggacgtggtgtcaggcgccggcgtctgccggacctggaggggcatcatgaaggaggccgtgcgcgtcccggaggtgtcagggaagctcacgttccccatctcacttaagcagcctggcccaagggatggcactcttaaatgtttcatcaggaggaatcgaactactcagacatattatctgtatattggattgacagaagcattggctgatgatgggaagtttctacttgctgcacgcaagtgtcgtaagcccacctgcacagactacctaatttctcttgataaggttgatatgtcaaagggaagcagcacctatattggcaagctaagatcaaacttccttggaacaaagttcactgtctatgatgctcatccaccatatgatggagctgcggtctcaaagagtcgctctgcacgtgtggttggtttgaagcaggtctcccctagagttccggctggaaattatcccgtttcacatatttcttacgagctgaatgttctgggctccagaggtccaagaaggatgaactgtgttatggattccatccctgcatcagctgttaaggaaggagggaaaactcctacacagactgaatttccacttagcagccttgactctttcccatcatttccattcttcagatctaaatcagctcggatagacagttcaacgtcgcaatcatccagtcagagggaagataggttggtgctgaagaacaagtctcctaggtggcacgaacaactgcagtgttggtgcctgaatttccgtgggcgggtcactgttgcctcggttaaaaacttccagttggtggcttctgaggacaatggaccagagagccaagagagtgacaaggtgattctccaattcggaaagatcggaaaagacttgttcaccatggactacggttatccaatatcggcatttcaagcttttgcaatttgtctgagcagttttgatacaaaaattgcctgcgaatgaggcaaggtgatttttttcccttctctattccccttgcttgtattatggacatgcagtaaaattttattaaacatgcaatttccaatgtcaaggatgattggatgaagctct

SEQ ID NO: 12436 - protein, 401 aa, Zea mays subsp. mays
  peptide (1)..(401): Ceres Seq. ID no. 12407384
MSFRSLIQDMKDEFGSISRHSLRSRSHRSAGNAARAAAAGPSEAMDQSCWSQLPPELLREVLVRIEASESWWPARKDVVSGAGVCRTWRGIMKEAVRVPEVSGKLTFPISLKQPGPRDGTLKCFIRRNRTTQTYYLYIGLTEALADDGKFLLAARKCRKPTCTDYLISLDKVDMSKGSSTYIGKLRSNFLGTKFTVYDAHPPYDGAAVSKSRSARVVGLKQVSPRVPAGNYPVSHISYELNVLGSRGPRRMNCVMDSIPASAVKEGGKTPTQTEFPLSSLDSFPSFPFFRSKSARIDSSTSQSSSQREDRLVLKNKSPRWHEQLQCWCLNFRGRVTVASVKNFQLVASEDNGPESQESDKVILQFGKIGKDLFTMDYGYPISAFQAFAICLSSFDTKIACE

SEQ ID NO: 12437 - protein, 392 aa, Zea mays subsp. mays
  peptide (1)..(392): Ceres Seq. ID no. 12407385
MKDEFGSISRHSLRSRSHRSAGNAARAAAAGPSEAMDQSCWSQLPPELLREVLVRIEASESWWPARKDVVSGAGVCRTWRGIMKEAVRVPEVSGKLTFPISLKQPGPRDGTLKCFIRRNRTTQTYYLYIGLTEALADDGKFLLAARKCRKPTCTDYLISLDKVDMSKGSSTYIGKLRSNFLGTKFTVYDAHPPYDGAAVSKSRSARVVGLKQVSPRVPAGNYPVSHISYELNVLGSRGPRRMNCVMDSIPASAVKEGGKTPTQTEFPLSSLDSFPSFPFFRSKSARIDSSTSQSSSQREDRLVLKNKSPRWHEQLQCWCLNFRGRVTVASVKNFQLVASEDNGPESQESDKVILQFGKIGKDLFTMDYGYPISAFQAFAICLSSFDTKIACE

SEQ ID NO: 12438 - protein, 357 aa, Zea mays subsp. mays
  peptide (1)..(357): Ceres Seq. ID no. 12407386
MDQSCWSQLPPELLREVLVRIEASESWWPARKDVVSGAGVCRTWRGIMKEAVRVPEVSGKLTFPISLKQPGPRDGTLKCFIRRNRTTQTYYLYIGLTEALADDGKFLLAARKCRKPTCTDYLISLDKVDMSKGSSTYIGKLRSNFLGTKFTVYDAHPPYDGAAVSKSRSARVVGLKQVSPRVPAGNYPVSHISYELNVLGSRGPRRMNCVMDSIPASAVKEGGKTPTQTEFPLSSLDSFPSFPFFRSKSARIDSSTSQSSSQREDRLVLKNKSPRWHEQLQCWCLNFRGRVTVASVKNFQLVASEDNGPESQESDKVILQFGKIGKDLFTMDYGYPISAFQAFAICLSSFDTKIACE

SEQ ID NO: 12439 - DNA, 1434 bp, Zea mays subsp. mays
  misc_feature (1)..(1434): Ceres Seq. ID no. 12359666
  misc_feature (1)..(1434): Ortholog of  Ceres SEQ ID NO 13654431 as cited in SEQ ID NO 67761
agcgccaccaagagttgatccacccaggccagccacccgcccgtcccccggcggcggagatggcgaggaacgaggcggcggccgcggccgcgccgggcgtcgacttccaccttcccgacgagatcctggccgtgatccccaccgacccgtacgagcagctggacgtggcgcgcaagatcacctccatggccatcgcctcccgcgtctcccgcctcgaggccgacgctgcgcgcctccgccgtgacctcgccgaccgtgaccgcgccgaggccgacctccgcgcctgcctcgccgactccgacgcgcgcctgccgccgctctcgacgagaacgcgaagctggcgaaggaaagggactcgctcgcggcgacggtcaaaaagctgaccaggaatttggcgaagttggaggcttttaagaaacaattgatgaaatcattaagtgaagataatctattgcaactgtctgaaaccagtcaagatcacaacgcagaagatttgacagctcgagtcccattttggaaagatgaagtttcgagcagtaacacttcttcagatgcctccagcagatctacaatgactgaatccgtccatggcggaggataccagttctcgatcacaccatatatgcctccaaaattaactcctggctcaacaactatgatttcgtcctctagtggttctccccgagcttattcaactggcccaccctctcccaagttcttatctggtccgacatcacctgcaaaagctcgatctgagggccaattggcattttcatcatggcaaggatcatcaagtcatcagtattcagcacctacctctcctccccaacgccactcattcacagagcggccacgtatagatgggaaggaattcttccgacaagcacggacaagactttcgtatgagcaatttggagcatttttggccaatatcaaggagttcaatgctcagaaacaatcacgggaggacaccctgtcaaaagcagaagagatttttggaacagaacacaatgatctgtacatttctttccagaatatgcttagccgaaactaatcatgaaaatttgtcagaagtagtattttctctcaaaatcaagcagggtaggttctgttggaataaacgatgtccttccgtaggttctcaaagatcacattgtagagatatgtatataggccaccttaattcgaggtgttcgttctcaataatttggagctgtgacttaaaagcggaaatctcatagcatacattcactcattccctgaaattcaaggcttcctgcttgtctttctgctgtaaatccggatgcagatctcttgagctattaaggtgccttccctagttccctttgtagaaagctgtataaaactgccctttgccgttcttctaactgccaagggtacacggaatggatatgatcacggtgcattcgttgt

SEQ ID NO: 12440 - protein, 209 aa, Zea mays subsp. mays
  peptide (1)..(209): Ceres Seq. ID no. 12359667
MKSLSEDNLLQLSETSQDHNAEDLTARVPFWKDEVSSSNTSSDASSRSTMTESVHGGGYQFSITPYMPPKLTPGSTTMISSSSGSPRAYSTGPPSPKFLSGPTSPAKARSEGQLAFSSWQGSSSHQYSAPTSPPQRHSFTERPRIDGKEFFRQARTRLSYEQFGAFLANIKEFNAQKQSREDTLSKAEEIFGTEHNDLYISFQNMLSRN

SEQ ID NO: 12441 - protein, 160 aa, Zea mays subsp. mays
  peptide (1)..(160): Ceres Seq. ID no. 12359668
MTESVHGGGYQFSITPYMPPKLTPGSTTMISSSSGSPRAYSTGPPSPKFLSGPTSPAKARSEGQLAFSSWQGSSSHQYSAPTSPPQRHSFTERPRIDGKEFFRQARTRLSYEQFGAFLANIKEFNAQKQSREDTLSKAEEIFGTEHNDLYISFQNMLSRN

SEQ ID NO: 12442 - protein, 143 aa, Zea mays subsp. mays
  peptide (1)..(143): Ceres Seq. ID no. 12359669
MPPKLTPGSTTMISSSSGSPRAYSTGPPSPKFLSGPTSPAKARSEGQLAFSSWQGSSSHQYSAPTSPPQRHSFTERPRIDGKEFFRQARTRLSYEQFGAFLANIKEFNAQKQSREDTLSKAEEIFGTEHNDLYISFQNMLSRN

SEQ ID NO: 12443 - DNA, 1439 bp, Zea mays subsp. mays
  misc_feature (1)..(1439): Ceres Seq. ID no. 12351772
  misc_feature (1)..(1439): Ortholog of  Ceres SEQ ID NO 13594776 as cited in SEQ ID NO 52157
ctatgggctttgtggccgccctgtcggaaaacccgcgcaagaaaagagaaacccgcaagccgcccgcgcagaccatcgccccgttgccacggtcaaattcgtcggcgtttggtgccgcggcgtgactgtccgccggtcgcggcgcgcgtcctgcctggttggatcccttcggacttccgcagattcccgcgcgggggtgtttgatttggatgagaggagcgcggcggcgggatggggaccccttcgcagggctcggcggccgtgacggcggcccgggtcgacctctgcgcgctcgacctcatgcctgtctttgccaaggagatgatcgccggcggcgtcgccggcgccttctccaaaaccgccatcgcgccgctcgagcgcgtcaagatattgctgcagaccagaacaaatgagtttgggtctcttggagttctcaaatcattgaagaaactgagacaacttgatggagtcatggggttttacaaaggaaatggtgccagtgtgatgagaattgttccttatgctgcattacatttcatggcatatgagcggtaccggtgttggattttgaataactgtccctcactgggaacagggcctttagtagatcttttagccggttcagcatcagggggaactgctgtattgtgtacttatcccttggatttggcccggactaagcttgcctttcaggtcaatagttcagatgaactcagcagagctttgaaaaggggaagtccccagccagcatatggaggaatcattgatgtctttagatgtgtttactcagaaggtggagtgcgggctctttaccgaggtgtaggtccaacactcatggggatacttccttatgctggtcttaagttctacatatatgaagggctgaaggtacatgtaccagaagattacagaagttctgtaacattgaagctgtcatgtggtgctgctgctggtttatttggacagactctgacatatccattagatgttgtcaggaggcagatgcaggttcaaaatcagcaacaacatgaacaatttggtgccccacgaataacgggcacattccagggtcttgtgtccattaaacaaacacagggttggaaacaattatttgctggcttgagcctcaattacatcaaggtggtgccttcagtggccattggtttcaccgcatatgacaccatgaagcatttgctgaagatacctccaagagagaagaataaggtctgagcatggtcctgcttgaaattttggccgctcaattctgcagctagcagaaaagcactgcttctttctaaggcatgggagtgccgtatgaagcttacaatagaatgaagcagcctcgcccgcaattctgttacctagtactaattgcgttgtgtcacgtgatagcttatgtacctgacatattctttcattctaattttcctcattcatct

SEQ ID NO: 12444 - protein, 332 aa, Zea mays subsp. mays
  peptide (1)..(332): Ceres Seq. ID no. 12351773
MGTPSQGSAAVTAARVDLCALDLMPVFAKEMIAGGVAGAFSKTAIAPLERVKILLQTRTNEFGSLGVLKSLKKLRQLDGVMGFYKGNGASVMRIVPYAALHFMAYERYRCWILNNCPSLGTGPLVDLLAGSASGGTAVLCTYPLDLARTKLAFQVNSSDELSRALKRGSPQPAYGGIIDVFRCVYSEGGVRALYRGVGPTLMGILPYAGLKFYIYEGLKVHVPEDYRSSVTLKLSCGAAAGLFGQTLTYPLDVVRRQMQVQNQQQHEQFGAPRITGTFQGLVSIKQTQGWKQLFAGLSLNYIKVVPSVAIGFTAYDTMKHLLKIPPREKNKV

SEQ ID NO: 12445 - protein, 309 aa, Zea mays subsp. mays
  peptide (1)..(309): Ceres Seq. ID no. 12351774
MPVFAKEMIAGGVAGAFSKTAIAPLERVKILLQTRTNEFGSLGVLKSLKKLRQLDGVMGFYKGNGASVMRIVPYAALHFMAYERYRCWILNNCPSLGTGPLVDLLAGSASGGTAVLCTYPLDLARTKLAFQVNSSDELSRALKRGSPQPAYGGIIDVFRCVYSEGGVRALYRGVGPTLMGILPYAGLKFYIYEGLKVHVPEDYRSSVTLKLSCGAAAGLFGQTLTYPLDVVRRQMQVQNQQQHEQFGAPRITGTFQGLVSIKQTQGWKQLFAGLSLNYIKVVPSVAIGFTAYDTMKHLLKIPPREKNKV

SEQ ID NO: 12446 - protein, 302 aa, Zea mays subsp. mays
  peptide (1)..(302): Ceres Seq. ID no. 12351775
MIAGGVAGAFSKTAIAPLERVKILLQTRTNEFGSLGVLKSLKKLRQLDGVMGFYKGNGASVMRIVPYAALHFMAYERYRCWILNNCPSLGTGPLVDLLAGSASGGTAVLCTYPLDLARTKLAFQVNSSDELSRALKRGSPQPAYGGIIDVFRCVYSEGGVRALYRGVGPTLMGILPYAGLKFYIYEGLKVHVPEDYRSSVTLKLSCGAAAGLFGQTLTYPLDVVRRQMQVQNQQQHEQFGAPRITGTFQGLVSIKQTQGWKQLFAGLSLNYIKVVPSVAIGFTAYDTMKHLLKIPPREKNKV

SEQ ID NO: 12447 - DNA, 1292 bp, Zea mays subsp. mays
  misc_feature (1)..(1292): Ceres Seq. ID no. 12341218
  misc_feature (1)..(1292): Ortholog of  Ceres SEQ ID NO 13597057 as cited in SEQ ID NO 68977
aatcctccgggaaccatttgcgcggctacgattcgctcctgcaactgcagcatagaaagtgacgtcgccgtcgccgcattcgcgccgccctgggctccgtccaactaccgttgcaaacccaggcttgcctgacaccagaagctgctcccctctccgatccagcggcgccctgttcgactgcggcggcggcggctaccatcccgatccggtggcgccccggccttgctcgattcctacagctgctatccttttctacctgcggcgccctgctccactctagtggctgctcccctcccaatctgagccccgagatgcctgagtccagggacggcaggagtgaggacctagctgacctttctggtggtgttggtggtggagggttctttatcaggagggtggcctcgccgggagccctagcggtgaggggtgtcaggaagccgttggcgcggcgttatatttcaccctcgaggaacaaggagaacctgctgccggtttgggcgttgagggtcacaccgacaaagaggagcccgcttcctggatggtaccccaggacgccgctccgtgatattacggccattgcaaaggctattcagagaagtcgttcaaggattgctgcagctcagcagcgaagccaaaggatcgagcagtcttcacaatctgtgaacgtgactactccagcacaagcagagcaggatgctcacattgctgaagcctcccatgctgttgcatctggctccggctcaactgaaagagaagctgtagcaaaccctgctactgttttggctgatgacaatttgaatgtgtcttctttgccagcagaaggctcattgaatactccatccaaaccaatggatcctgcccttgctgacaagaaactttccggttcaatagagaaggtagagaagttggtgaggaaaaacctgaagcgaacatcgagggctgcccaggcctccaggagggccacccaaaggcgcaatcttatgtccatgcgatgaatttattgctgtactttgctgggggaagagaaagtccacttcaggcttgtcctccttcctcttgtctgtgctgctcttcttccaatacttgccgtggcgtgatgctcacggccattccttgttcccttctcgaggacaagaatatggaagccattggctctctgcttgaggttctaggactgcagctactagtgtgaggtgtgatctggttcatgctattgctgatgtatgcatacttttctgtgtatccctgtgggccgttgaacaaataaaatctttaatttacttttctgccgc

SEQ ID NO: 12448 - protein, 227 aa, Zea mays subsp. mays
  peptide (1)..(227): Ceres Seq. ID no. 12341219
MPESRDGRSEDLADLSGGVGGGGFFIRRVASPGALAVRGVRKPLARRYISPSRNKENLLPVWALRVTPTKRSPLPGWYPRTPLRDITAIAKAIQRSRSRIAAAQQRSQRIEQSSQSVNVTTPAQAEQDAHIAEASHAVASGSGSTEREAVANPATVLADDNLNVSSLPAEGSLNTPSKPMDPALADKKLSGSIEKVEKLVRKNLKRTSRAAQASRRATQRRNLMSMR

SEQ ID NO: 12449 - DNA, 1418 bp, Zea mays subsp. mays; identical to SEQ ID NO: 9814
  misc_feature (1)..(1418): Ceres Seq. ID no. 12411535
  misc_feature (1)..(1418): Ortholog of  Ceres SEQ ID NO 13504015 as cited in SEQ ID NO 51020
  misc_feature (1)..(1418): Ortholog of  Ceres SEQ ID NO 13597643 as cited in SEQ ID NO 65208

SEQ ID NO: 12450 - protein, 185 aa, Zea mays subsp. mays; identical to SEQ ID NO: 9815
  peptide (1)..(185): Ceres Seq. ID no. 12411536

SEQ ID NO: 12451 - protein, 116 aa, Zea mays subsp. mays; identical to SEQ ID NO: 9816
  peptide (1)..(116): Ceres Seq. ID no. 12411537

SEQ ID NO: 12452 - DNA, 1811 bp, Zea mays subsp. mays; identical to SEQ ID NO: 4035
  misc_feature (1)..(1811): Ceres Seq. ID no. 12423991
  misc_feature (1)..(1811): Ortholog of  Ceres SEQ ID NO 15227226 as cited in SEQ ID NO 54691
  misc_feature (1)..(1811): Ortholog of  Ceres SEQ ID NO 14303169 as cited in SEQ ID NO 65741

SEQ ID NO: 12453 - protein, 568 aa, Zea mays subsp. mays; identical to SEQ ID NO: 4036
  peptide (1)..(568): Ceres Seq. ID no. 12423992

SEQ ID NO: 12454 - protein, 476 aa, Zea mays subsp. mays; identical to SEQ ID NO: 4037
  peptide (1)..(476): Ceres Seq. ID no. 12423993

SEQ ID NO: 12455 - protein, 339 aa, Zea mays subsp. mays; identical to SEQ ID NO: 4038
  peptide (1)..(339): Ceres Seq. ID no. 12423994

SEQ ID NO: 12456 - DNA, 981 bp, Zea mays subsp. mays
  misc_feature (1)..(981): Ceres Seq. ID no. 12414361
  misc_feature (1)..(981): Ortholog of  Ceres SEQ ID NO 13583691 as cited in SEQ ID NO 68890
gttccctcgccatccgccgccgccgccatgccgggcttcgctcagcgtctcgcggggcatcccgtggcggagcatcgcgaggcaaggcctctcccgcgtgttcctggtggcgaaggcctactgcttgatccacgtcgtcaacgaccacctctgctcggtgaccttagtgcggggcgccagcatgctgccgtccctgaacctggcgggcgacgcggtggcggtggacagggtcagcgtgaggctcggccgggtcgcgccgggggacatcgtgctgatgatctcccccgaggacccgcgcaagtcggtcgtcaagcgcgtcgtcgggatgcagggggactccgtcacctaccttgtcgaccccggcaaaagcgactcctccagaaccgtcgtggtaccgcaagatcatgtctgggtgcagggtgacaatatctttgcttctaacgattcgaggcaatttggagctgtgccttatgggctgattacagggaagatcttttgccgggtttggccgccagagagttttggcgcaattgatgacgcaacgaagcagtcttaacgctgaggaggagccgaggagcacatggacccatattgtttgctcgcgcccagagattctatctataacatactgcaggggggcccttccttgagctcgagagctttcgacgacctaccgcagcgcatttctacagcgaagcaaagagcgttgtgtgtcttgattgatgtcccgtgtttttttatagttttggtgtgtgacaagttctgaaacccgtgtttttatagttttggtgtgtgacaggttccgagatagttttttttgttttgttttttggtgatagtgcaagcctgggtttgcaactacactacaacttcacatgcttattcgaaacatttgaactgatttgtcagtcctcgttttgcagaagggcgtgtttgtttgtttatccatgtccatgtcaaaacacacgacgattattgtcc

SEQ ID NO: 12457 - protein, 184 aa, Zea mays subsp. mays
  peptide (1)..(184): Ceres Seq. ID no. 12414362
FPRHPPPPPCRASLSVSRGIPWRSIARQGLSRVFLVAKAYCLIHVVNDHLCSVTLVRGASMLPSLNLAGDAVAVDRVSVRLGRVAPGDIVLMISPEDPRKSVVKRVVGMQGDSVTYLVDPGKSDSSRTVVVPQDHVWVQGDNIFASNDSRQFGAVPYGLITGKIFCRVWPPESFGAIDDATKQS

SEQ ID NO: 12458 - protein, 140 aa, Zea mays subsp. mays
  peptide (1)..(140): Ceres Seq. ID no. 12414363
VPSPSAAAAMPGFAQRLAGHPVAEHREARPLPRVPGGEGLLLDPRRQRPPLLGDLSAGRQHAAVPEPGGRRGGGGQGQREARPGRAGGHRADDLPRGPAQVGRQARRRDAGGLRHLPCRPRQKRLLQNRRGTARSCLGAG

SEQ ID NO: 12459 - protein, 131 aa, Zea mays subsp. mays
  peptide (1)..(131): Ceres Seq. ID no. 12414364
MPGFAQRLAGHPVAEHREARPLPRVPGGEGLLLDPRRQRPPLLGDLSAGRQHAAVPEPGGRRGGGGQGQREARPGRAGGHRADDLPRGPAQVGRQARRRDAGGLRHLPCRPRQKRLLQNRRGTARSCLGAG

SEQ ID NO: 12460 - DNA, 1408 bp, Zea mays subsp. mays
  misc_feature (1)..(1408): Ceres Seq. ID no. 12414737
  misc_feature (1)..(1408): Ortholog of  Ceres SEQ ID NO 15170461 as cited in SEQ ID NO 52853
  misc_feature (1)..(1408): Ortholog of  Ceres SEQ ID NO 14313666 as cited in SEQ ID NO 54618
  misc_feature (1)..(1408): Ortholog of  Ceres SEQ ID NO 13595351 as cited in SEQ ID NO 55934
  misc_feature (1)..(1408): Ortholog of  Ceres SEQ ID NO 13639645 as cited in SEQ ID NO 57488
aacgacctgcctgccttgctcttgccctgtgagcagcggcgtgcgatcgatcgaggcagtcgtagtaataagccaacaaacaaaccggccggaacgccatgctggaggagtacaaaccgtgtgcggccatggtggtgacgcagtgcatctacgccgctctagcgctcttgtccaaggcggcgttcaccggcggcatgagccccctggtgttcgtcgtctacaggcaggccgtcgccaccattgtactcgtccccgtcgtcatcgcggccaacaggaagaagatgaaggagatgacgacgggccttggactgacgggcttctcgctggtcttcgtcgcctcccttgtcgggggcaacggtgaaccagtgcatgtactaccaaggggtgaatctgggctcgtcgtcgatggcaacggccatgaccaacttgatccccgccatcaccttcgtcatggcggcatcagtcggcctagagagggtggaggccaggaggccgaggagcctggccaagatcttcggcacggccgtctgcgtgagcggcgccatggccatggctttcttcaagggcccgaagctgctcggcgacggcccgaacgctctccagctcctcctccacgcgggcggcggcggcaggtgggtggccggcgcgctcttcctcgtgggcagcagctcctgctggtcgctctggctcatcctgcaggtgcccatctgcaagtcgtacgtggagccgctggctctgtcggcgtggatgtgcgtcctgtccacgctccagtccgcgctgctcgtctccttcctcctgccggaccccagcgcctggaggatccactcgctcttcgagctctcctgctgcgtcttctcgggcgtgttcgggtccggcgtcacgttctacctgcagtcgtggtgcatctccgtgaggggcccgctctactccgccatgttcaacccgctctgcaccgtgatcaccaccgtgttcgccgccgccgtcctccgcgaagagctgcacgtcggcagcttgctgggcgcgatcgccgtcatcgcggggctgtacgtggtgctgtggggcaaagcgggcgacgccaacaagggcggggtggagccagagcaccactcggacgatctggagaagacgtcatcagcgcggtcggatcccaattcgacggccggcgtcggcagtggcatcgccgagcccctcctggcgggcggcgatccaacggagaagtagatgggattttgctgctcttcaagtgttctgtgcgtgcgcgcgcggtgttttcagggtcggtatgctagtgctactgtaacagtgccgtcccagttttgtcatgtacactagtggcagcttcaaatgactccgtgctgccgatgtgtattatccgcacaattttgttaagcaacgcggcgtccccgtc

SEQ ID NO: 12461 - protein, 396 aa, Zea mays subsp. mays
  peptide (1)..(396): Ceres Seq. ID no. 12414738
MLEEYKPCAAMVVTQCIYAALALLSKAAFTGGMSPLVFVVYRQAVATIVLVPVVIAANRKKMKEMTTGLGLTGFSLVFVASLVGGNGEPVHVLPRGESGLVVDGNGHDQLDPRHHLRHGGISRPREGGGQEAEEPGQDLRHGRLRERRHGHGFLQGPEAARRRPERSPAPPPRGRRRQVGGRRALPRGQQLLLVALAHPAGAHLQVVRGAAGSVGVDVRPVHAPVRAARLLPPAGPQRLEDPLALRALLLRLLGRVRVRRHVLPAVVVHLREGPALLRHVQPALHRDHHRVRRRRPPRRAARRQLAGRDRRHRGAVRGAVGQSGRRQQGRGGARAPLGRSGEDVISAVGSQFDGRRRQWHRRAPPGGRRSNGEVDGILLLFKCSVRARAVFSGSVC

SEQ ID NO: 12462 - protein, 386 aa, Zea mays subsp. mays
  peptide (1)..(386): Ceres Seq. ID no. 12414739
MVVTQCIYAALALLSKAAFTGGMSPLVFVVYRQAVATIVLVPVVIAANRKKMKEMTTGLGLTGFSLVFVASLVGGNGEPVHVLPRGESGLVVDGNGHDQLDPRHHLRHGGISRPREGGGQEAEEPGQDLRHGRLRERRHGHGFLQGPEAARRRPERSPAPPPRGRRRQVGGRRALPRGQQLLLVALAHPAGAHLQVVRGAAGSVGVDVRPVHAPVRAARLLPPAGPQRLEDPLALRALLLRLLGRVRVRRHVLPAVVVHLREGPALLRHVQPALHRDHHRVRRRRPPRRAARRQLAGRDRRHRGAVRGAVGQSGRRQQGRGGARAPLGRSGEDVISAVGSQFDGRRRQWHRRAPPGGRRSNGEVDGILLLFKCSVRARAVFSGSVC

SEQ ID NO: 12463 - protein, 364 aa, Zea mays subsp. mays
  peptide (1)..(364): Ceres Seq. ID no. 12414740
MSPLVFVVYRQAVATIVLVPVVIAANRKKMKEMTTGLGLTGFSLVFVASLVGGNGEPVHVLPRGESGLVVDGNGHDQLDPRHHLRHGGISRPREGGGQEAEEPGQDLRHGRLRERRHGHGFLQGPEAARRRPERSPAPPPRGRRRQVGGRRALPRGQQLLLVALAHPAGAHLQVVRGAAGSVGVDVRPVHAPVRAARLLPPAGPQRLEDPLALRALLLRLLGRVRVRRHVLPAVVVHLREGPALLRHVQPALHRDHHRVRRRRPPRRAARRQLAGRDRRHRGAVRGAVGQSGRRQQGRGGARAPLGRSGEDVISAVGSQFDGRRRQWHRRAPPGGRRSNGEVDGILLLFKCSVRARAVFSGSVC

SEQ ID NO: 12464 - protein, 283 aa, Zea mays subsp. mays
  peptide (1)..(283): Ceres Seq. ID no. 12414741
MYYQGVNLGSSSMATAMTNLIPAITFVMAASVGLERVEARRPRSLAKIFGTAVCVSGAMAMAFFKGPKLLGDGPNALQLLLHAGGGGRWVAGALFLVGSSSCWSLWLILQVPICKSYVEPLALSAWMCVLSTLQSALLVSFLLPDPSAWRIHSLFELSCCVFSGVFGSGVTFYLQSWCISVRGPLYSAMFNPLCTVITTVFAAAVLREELHVGSLLGAIAVIAGLYVVLWGKAGDANKGGVEPEHHSDDLEKTSSARSDPNSTAGVGSGIAEPLLAGGDPTEK

SEQ ID NO: 12465 - DNA, 472 bp, Zea mays subsp. mays
  misc_feature (1)..(472): Ceres Seq. ID no. 12403917
  misc_feature (1)..(472): Ortholog of  Ceres SEQ ID NO 14302208 as cited in SEQ ID NO 63753
aaacccatcgcagggcattctcgagcatagcttctctgcctctctctcccctcctctcctctcgtccactcctttgtccaaagcttcgagatggctcagcagcagaaggtggtggtcagggttccaaccatgacagatgacaagatcaagcagaaggccatcgaagctgttgcggacatttacggtattgactccatagcagcggatctgaaggagaacaagatgaccatcataggcgagatggatgcagtagcgattgccaagaagttaaagaagattggaaagattgacattgtgtctgttggacctgcaaaagaagaaaagaaggaagaaaagaaagaggagaaaaaggaggaaaagaaagaagagaagaaagaggagaagaaagaagagaagaaagaagagaagaaagaagaaaagaagtgataaacctataaaacatatatatcatcgcatggcctcacttatctcc

SEQ ID NO: 12466 - protein, 111 aa, Zea mays subsp. mays
  peptide (1)..(111): Ceres Seq. ID no. 12403918
MAQQQKVVVRVPTMTDDKIKQKAIEAVADIYGIDSIAADLKENKMTIIGEMDAVAIAKKLKKIGKIDIVSVGPAKEEKKEEKKEEKKEEKKEEKKEEKKEEKKEEKKEEKK

SEQ ID NO: 12467 - protein, 98 aa, Zea mays subsp. mays
  peptide (1)..(98): Ceres Seq. ID no. 12403919
MTDDKIKQKAIEAVADIYGIDSIAADLKENKMTIIGEMDAVAIAKKLKKIGKIDIVSVGPAKEEKKEEKKEEKKEEKKEEKKEEKKEEKKEEKKEEKK

SEQ ID NO: 12468 - protein, 67 aa, Zea mays subsp. mays
  peptide (1)..(67): Ceres Seq. ID no. 12403920
MTIIGEMDAVAIAKKLKKIGKIDIVSVGPAKEEKKEEKKEEKKEEKKEEKKEEKKEEKKEEKKEEKK

SEQ ID NO: 12469 - DNA, 729 bp, Zea mays subsp. mays
  misc_feature (1)..(729): Ceres Seq. ID no. 12404622
  misc_feature (1)..(729): Ortholog of  Ceres SEQ ID NO 13599506 as cited in SEQ ID NO 334
  misc_feature (1)..(729): Ortholog of  Ceres SEQ ID NO 15172970 as cited in SEQ ID NO 51736
  misc_feature (1)..(729): Ortholog of  Ceres SEQ ID NO 13598157 as cited in SEQ ID NO 61570
  misc_feature (1)..(729): Ortholog of  Ceres SEQ ID NO 15173774 as cited in SEQ ID NO 61771
  misc_feature (1)..(729): Ortholog of  Ceres SEQ ID NO 12587829 as cited in SEQ ID NO 62333
atcaacaacagccctacaacttactgcttgctctagctagctagctgctcccggcccatatctactacacaagtaggctagcagcagcagcagcaatggcctcggtgacgaggttcccggccgtggccctcgtcctgctgctcgccgccagcgccttcctggccagcgaggtggcggcgtgcggcggctgcccgaaaccaactcctcctccatcgccaccaccgccgtcgcccaccagcacgccgtgccctccgccgccgtccagctccggcggcaagtgccccaagaacgcgctgaaactgggcgtgtgcgccaacgtgctgggcctcgtcaaggtgtccatcggcaaggtgcccaccgactcgtgctgcccactgctggacgggctcgccgacctggaggccgccgtctgcctctgcaccgcgctcaaggccaacgtgctcggcgtcaacctcgacgtccccgtcaagctcaccctgctcctcaactactgcgggaagagcgtccctcagggcttcctgtgcgcctaatatatatactagtggctagttcgtcactagcttcagttgccatgcatatttgtgattcttcttctttccttctagttcaccactgtatgtacgagcctcctccggatgttttctttggtattgccttctcttctactcttctcctaacttgcttgcattatacattgcgtgagcatgataatatataaatcattgggtg

SEQ ID NO: 12470 - protein, 144 aa, Zea mays subsp. mays
  peptide (1)..(144): Ceres Seq. ID no. 12404623
MASVTRFPAVALVLLLAASAFLASEVAACGGCPKPTPPPSPPPPSPTSTPCPPPPSSSGGKCPKNALKLGVCANVLGLVKVSIGKVPTDSCCPLLDGLADLEAAVCLCTALKANVLGVNLDVPVKLTLLLNYCGKSVPQGFLCA

SEQ ID NO: 12471 - DNA, 1250 bp, Zea mays subsp. mays
  misc_feature (1)..(1250): Ceres Seq. ID no. 12414528
  misc_feature (1)..(1250): Ortholog of  Ceres SEQ ID NO 14313038 as cited in SEQ ID NO 59520
  misc_feature (1)..(1250): Ortholog of  Ceres SEQ ID NO 13595464 as cited in SEQ ID NO 59792
  misc_feature (1)..(1250): Ortholog of  Ceres SEQ ID NO 14316416 as cited in SEQ ID NO 60078
  misc_feature (1)..(1250): Ortholog of  Ceres SEQ ID NO 13664262 as cited in SEQ ID NO 61094
gtccatccatcgtctcgtccccgcctgccattcgcgagcatccaaagctgtagttgctgcaaagctctcgcaaaatcctactcccaccgccgactcgaacagtcgaacctcggctcccctcctccccaatccgtcatcttccttctacacttgtttctgcgggagcgggagagaaggcaccagggaggccgcccccgtcacccatagccaaagtcacgcgccaccaaactttgttctctcacccagtcgctttcgcgttcagcgcgagccgagcccagccggtgggtcggtcgctgaaggcggagccataaaggcgtcggcgacggcaggatgatgagcggcagatcgggcggcagggacggcgaggcggccggccccgtcatcaggatcagggtttcccacggagccaccttccgcgaggtcgtcgtgccggcgcaggctaccttcggtgagttgaagaggatccttgttcagactactggcttggagcctgagaggcagaggctcttcttccgtgggaaggagaagagtgacagagagttcctgcacgcggcaggtgttaaggatggcgcgaagttgcttctgcttgagaagcctgcccctgccaacatagagcagaaggttgagcctgtgattatggatgagagcgtgatgaaggcatgtgaggctgttgctcgtgttagagctgaagttgataggctgtctgctaaggtgtgtgacttggagaagaatgtgcttgcagggagaaaagttgatgataaagaatttgtcgtcttgacggaactgcttatgatacagctgctgaaactcgatggcatagaagctgaaggagaagcaagggcacagaggaaggctgaggtccgccgagttcagtcccttgtggagaccttggataagctgaaggcaagaaatgcgaaccctttcagcgatcataacaacgctgtttcagtgacgacgcagtgggagacgtttgagaacggtatgggcagcttgagcgctcccccgccccacgttccttcggagcaagttaacactaactgggagcagcagttcgactaggctcagctgaagctgttgatgtatcgtgagatcggtatgggcattccttttcccaggcagcgaggtgttttgtgtatatgcaccgcgtttggtgcctttggtgtcctaactgcctgtgaatgttaccagatcatcataccatactaccatgtggattgcattgcaccgctcattgagggccatgtttcgct

SEQ ID NO: 12472 - protein, 242 aa, Zea mays subsp. mays
  peptide (1)..(242): Ceres Seq. ID no. 12414529
MMSGRSGGRDGEAAGPVIRIRVSHGATFREVVVPAQATFGELKRILVQTTGLEPERQRLFFRGKEKSDREFLHAAGVKDGAKLLLLEKPAPANIEQKVEPVIMDESVMKACEAVARVRAEVDRLSAKVCDLEKNVLAGRKVDDKEFVVLTELLMIQLLKLDGIEAEGEARAQRKAEVRRVQSLVETLDKLKARNANPFSDHNNAVSVTTQWETFENGMGSLSAPPPHVPSEQVNTNWEQQFD

SEQ ID NO: 12473 - protein, 241 aa, Zea mays subsp. mays
  peptide (1)..(241): Ceres Seq. ID no. 12414530
MSGRSGGRDGEAAGPVIRIRVSHGATFREVVVPAQATFGELKRILVQTTGLEPERQRLFFRGKEKSDREFLHAAGVKDGAKLLLLEKPAPANIEQKVEPVIMDESVMKACEAVARVRAEVDRLSAKVCDLEKNVLAGRKVDDKEFVVLTELLMIQLLKLDGIEAEGEARAQRKAEVRRVQSLVETLDKLKARNANPFSDHNNAVSVTTQWETFENGMGSLSAPPPHVPSEQVNTNWEQQFD

SEQ ID NO: 12474 - protein, 140 aa, Zea mays subsp. mays
  peptide (1)..(140): Ceres Seq. ID no. 12414531
MDESVMKACEAVARVRAEVDRLSAKVCDLEKNVLAGRKVDDKEFVVLTELLMIQLLKLDGIEAEGEARAQRKAEVRRVQSLVETLDKLKARNANPFSDHNNAVSVTTQWETFENGMGSLSAPPPHVPSEQVNTNWEQQFD

SEQ ID NO: 12475 - DNA, 627 bp, Zea mays subsp. mays
  misc_feature (1)..(627): Ceres Seq. ID no. 12336893
  misc_feature (1)..(627): Ortholog of  Ceres SEQ ID NO 13583505 as cited in SEQ ID NO 62240
agaaaaaccctacagttcatccctctcgacgcgccgccgccgtctcgccgctgcccacccagattgacggctccaattggcgcccatggcggaagaaaccaacataaaaaaggaggaagaggagttcagcaccggtcctctctcggtgctcatgatgagcgtcaagaataatacccaggttcttatcaactgccggaacaacaagaagttgcttggtcgcgtgcgagccttcgatcggcactgcaacatggttcttgagaatgttcgtgagatgtggaccgaggtaccgaagaccggtaaaggcaagaagaaggctctcccggtgaacaaggacaggttcataagcaagatgttcctccgcggggattcggtcatcatcgtcctcaggaacccgaaatgagtaccctgtacacgtagagagtctgtttgctagcagtacgttgtgctattgggtgtaaggtgtatgccaaatgctcaaagcatgggagtgtaagtcgcggcagaattcgctatgtgtgttgatggtgggggattcagcttaaggcaggatgctagggctggattttgcttcttgtagcagacttgaacaggatgcttctttgatgtatcgacagaccccactgcttg

SEQ ID NO: 12476 - protein, 104 aa, Zea mays subsp. mays
  peptide (1)..(104): Ceres Seq. ID no. 12336894
MAEETNIKKEEEEFSTGPLSVLMMSVKNNTQVLINCRNNKKLLGRVRAFDRHCNMVLENVREMWTEVPKTGKGKKKALPVNKDRFISKMFLRGDSVIIVLRNPK

SEQ ID NO: 12477 - protein, 82 aa, Zea mays subsp. mays
  peptide (1)..(82): Ceres Seq. ID no. 12336895
MMSVKNNTQVLINCRNNKKLLGRVRAFDRHCNMVLENVREMWTEVPKTGKGKKKALPVNKDRFISKMFLRGDSVIIVLRNPK

SEQ ID NO: 12478 - protein, 81 aa, Zea mays subsp. mays
  peptide (1)..(81): Ceres Seq. ID no. 12336896
MSVKNNTQVLINCRNNKKLLGRVRAFDRHCNMVLENVREMWTEVPKTGKGKKKALPVNKDRFISKMFLRGDSVIIVLRNPK

SEQ ID NO: 12479 - DNA, 1224 bp, Zea mays subsp. mays
  misc_feature (1)..(1224): Ceres Seq. ID no. 12365098
  misc_feature (1)..(1224): Ortholog of  Ceres SEQ ID NO 13623756 as cited in SEQ ID NO 381
ccccaaagtttcgaacaaaagtccacaaatccccttcgccgtctccggcgagccccgcccctcatcgccgccgcgccaaagagacagtgagaggggggatggatcagtccatcagaaccgcatgcgagttcctctcgtcggtgctaaaccacgctgagtcctcgtcccgcgagctcgccgacgccgtctcccaacgccccgtccacctcgagatggcgaggacctcgttcctgcagaagctggagcacagggtggaggcgtcggccgccgacttgcagcacatcgagtccatcgccctcgacaccgtctccttcgaggagctcctcggccactgcggcgaggcgctcaaagtctacgcgcgccacgccgacgccctccagtcgcacctcgcttcctttggctacgagcccccggacgcacaacaccccgagatcgatgtggatgtggaagatggagatgtcgggaaggttggggaccctggagatagatgcctcagcgtgtcgcgttcagtgctcaggtcgggtaagcggcggtttgatagccacagcgatgcgatatttgaagagtcactgaaggatcttgggttttcagatgcttgtctagccactctttcttctgaaggcgcacattatggtgagagcccaaagaagctttacaagaatgctgaaagtactgatgatggcgaaaagatcatgaatgaagctgaaattatgactcccctaaatgaaagaaatggtcaaggtaattcttttgaaggagtgataagggcatcaaaggaggattatgagcaactccctccttatatgaagagtctagcatcatgggaggagttgcaggagggaatatccaaactaaattcatacttgggtggtgacaagttgcaggggagtgttgctttgaaccaggaccgtgttgcagagataggattggggcgcaaaggaagagcctgtttgctgatgctgttgcgactcaatcagctaactatggagacagttgatggctctaccttttacaccctgtgcaagaacaacgtgtagcctgatactgctactgctacagcgtgtcatgcttaagttttcctttttcttttcgtatgtcgagtctggctagaatattgtatcatgttgatgtagcactcgatctcagctcaaaatattgtttttttctgagcagttctggtcatgtgatcttcattccaaccatgaaataaagtgtgtttgaggc

SEQ ID NO: 12480 - protein, 344 aa, Zea mays subsp. mays
  peptide (1)..(344): Ceres Seq. ID no. 12365099
PKFRTKVHKSPSPSPASPAPHRRRAKETVRGGMDQSIRTACEFLSSVLNHAESSSRELADAVSQRPVHLEMARTSFLQKLEHRVEASAADLQHIESIALDTVSFEELLGHCGEALKVYARHADALQSHLASFGYEPPDAQHPEIDVDVEDGDVGKVGDPGDRCLSVSRSVLRSGKRRFDSHSDAIFEESLKDLGFSDACLATLSSEGAHYGESPKKLYKNAESTDDGEKIMNEAEIMTPLNERNGQGNSFEGVIRASKEDYEQLPPYMKSLASWEELQEGISKLNSYLGGDKLQGSVALNQDRVAEIGLGRKGRACLLMLLRLNQLTMETVDGSTFYTLCKNNV

SEQ ID NO: 12481 - protein, 312 aa, Zea mays subsp. mays
  peptide (1)..(312): Ceres Seq. ID no. 12365100
MDQSIRTACEFLSSVLNHAESSSRELADAVSQRPVHLEMARTSFLQKLEHRVEASAADLQHIESIALDTVSFEELLGHCGEALKVYARHADALQSHLASFGYEPPDAQHPEIDVDVEDGDVGKVGDPGDRCLSVSRSVLRSGKRRFDSHSDAIFEESLKDLGFSDACLATLSSEGAHYGESPKKLYKNAESTDDGEKIMNEAEIMTPLNERNGQGNSFEGVIRASKEDYEQLPPYMKSLASWEELQEGISKLNSYLGGDKLQGSVALNQDRVAEIGLGRKGRACLLMLLRLNQLTMETVDGSTFYTLCKNNV

SEQ ID NO: 12482 - protein, 274 aa, Zea mays subsp. mays
  peptide (1)..(274): Ceres Seq. ID no. 12365101
MARTSFLQKLEHRVEASAADLQHIESIALDTVSFEELLGHCGEALKVYARHADALQSHLASFGYEPPDAQHPEIDVDVEDGDVGKVGDPGDRCLSVSRSVLRSGKRRFDSHSDAIFEESLKDLGFSDACLATLSSEGAHYGESPKKLYKNAESTDDGEKIMNEAEIMTPLNERNGQGNSFEGVIRASKEDYEQLPPYMKSLASWEELQEGISKLNSYLGGDKLQGSVALNQDRVAEIGLGRKGRACLLMLLRLNQLTMETVDGSTFYTLCKNNV

SEQ ID NO: 12483 - DNA, 1423 bp, Zea mays subsp. mays
  misc_feature (1)..(1423): Ceres Seq. ID no. 12343924
  misc_feature (1)..(1423): Ortholog of  Ceres SEQ ID NO 12638221 as cited in SEQ ID NO 0
aaaggcccatcaaccgagagccttcgtcttccttctctcatcctttgctcctcttcaaacgctcgagaaagagagagagactaaatcctccctcgaaaccctagcatagccactgccttcccgcacgctaggaaggggaagatatgggcgccgaggaggacgccgctgcacgccgcgagcgtctccgcgccctccgtgccgccaaggacctcctctccaccctacggcgccccaaccccttccaccgacggagaacaccaaaatggcaaccatgatatggcagaagagccagaattaccaggtcatcaggatgcacctggtgaggctgctaaagaggatggtagccccactgaggaggccgaagaggttgaagatgatggtgagcttccagccatgaagttcagaaactaccttccccatgatgaacaacttcgaggaggcaagctggctccagtgtctcttcccaagtttgaagacccaattagtgccgaaactgcagagccaaaggaagtggagaacctttttggaaacatagcaccaaagaatccaaattgggatctgaaacgtgatgtgcagaagagaattgataaactggaaaggcgcacgcagaaagcgttggctgagattgcattggaacagcagagggagaaggaagccttggaggaatctcaagattgaccgacctgtataagtgaccagtgactcatgctggttggtccctcgagcagacgtcattatcttatttagataatgtaatgtactttgggatgctctgtgtatctaccatcttgggatgtactgaattgagtttgggacgtgtatctacctaccatcttgtattgtcagctcaaggatgtagcaaactagtagcaacttcaaaaaatgagatgtagcagtcctgttctgttagacggacctggtcaaacttgcaggttacatccatgggccgccaattcacgccatccgccatatatgcctaggatctgttcataacccttcatttgttcgtatattgtaatcaaaagttacccgccgtgtgtctacaacgtgtcgtcgcaatggacgcagcaggtgcctgcctattcattcattcataccgttttggtcgtcgagaggtgcgttcaataagttactagtccagtgtccgttataggggagtccggtagtgtccgttataggggagtccggtattattattattattgtttcatcttcttcttcgccctttctctgggtaataattgggttacttggaaactgttgatcagtgggtcagttagaatgtgaactggttgttgctgggtaagtatgtggtttgttggtatattgagtctggggacagagagtgaggtcctgatctgcttgtaacagtacctgctttggttttgtgattgctatatactgaaacccaaatccctctgtt

SEQ ID NO: 12484 - protein, 133 aa, Zea mays subsp. mays
  peptide (1)..(133): Ceres Seq. ID no. 12343925
MAEEPELPGHQDAPGEAAKEDGSPTEEAEEVEDDGELPAMKFRNYLPHDEQLRGGKLAPVSLPKFEDPISAETAEPKEVENLFGNIAPKNPNWDLKRDVQKRIDKLERRTQKALAEIALEQQREKEALEESQD

SEQ ID NO: 12485 - protein, 94 aa, Zea mays subsp. mays
  peptide (1)..(94): Ceres Seq. ID no. 12343926
MKFRNYLPHDEQLRGGKLAPVSLPKFEDPISAETAEPKEVENLFGNIAPKNPNWDLKRDVQKRIDKLERRTQKALAEIALEQQREKEALEESQD

SEQ ID NO: 12486 - DNA, 795 bp, Zea mays subsp. mays
  misc_feature (1)..(795): Ceres Seq. ID no. 12350319
  misc_feature (1)..(795): Ortholog of  Ceres SEQ ID NO 14316320 as cited in SEQ ID NO 60027
aacgtccagattgggaattccatcacgcctcgtcctctccgtcccgaccagaatcatcgcttcttcctgctccggcgatatccgccgccgcctgcggtccggcagagatgggaagcacttcctctatgctcacccaatacgatatcgaggaggtccaggaccattgtaaccacgcattctcgcagcaggagatcgtatcgctgtaccaccgcttctgccagctcgaccgtaacggtggtggcttcgtctccgctgacgagttcatgtcggtccctgagttcgccgtaaatcccctctcccagaggctcctgaggatgctggatgggctcaacttcaaggagtttgtagcatttttgtcagcttttagcccccgcacaagcctgcagcaaaagattgaatttattttcagggtttatgatactgactgcaacgggaaggttgcttttgatgacatcttgagcatcttgcgagatctgacaggttcatttatgacagagcaacagagacagaaagtcttgattcatgtgttagaagaagctggatacacaaaagattcacattttacactcccagactttatgaagattattggcaattctgagctcaagatggaggttgaagttcctattgactaaaaacctaacaagcatcatctagttgcttcaggcctgtatcttcatttgtgttaaattaagtagatggtatatttatatccttgcaactcaaatcatgatcagagatgtaattaaggaaacatatgtacctgctatttggaggtttagttggctcgcactc

SEQ ID NO: 12487 - protein, 210 aa, Zea mays subsp. mays
  peptide (1)..(210): Ceres Seq. ID no. 12350320
RPDWEFHHASSSPSRPESSLLPAPAISAAACGPAEMGSTSSMLTQYDIEEVQDHCNHAFSQQEIVSLYHRFCQLDRNGGGFVSADEFMSVPEFAVNPLSQRLLRMLDGLNFKEFVAFLSAFSPRTSLQQKIEFIFRVYDTDCNGKVAFDDILSILRDLTGSFMTEQQRQKVLIHVLEEAGYTKDSHFTLPDFMKIIGNSELKMEVEVPID

SEQ ID NO: 12488 - protein, 175 aa, Zea mays subsp. mays
  peptide (1)..(175): Ceres Seq. ID no. 12350321
MGSTSSMLTQYDIEEVQDHCNHAFSQQEIVSLYHRFCQLDRNGGGFVSADEFMSVPEFAVNPLSQRLLRMLDGLNFKEFVAFLSAFSPRTSLQQKIEFIFRVYDTDCNGKVAFDDILSILRDLTGSFMTEQQRQKVLIHVLEEAGYTKDSHFTLPDFMKIIGNSELKMEVEVPID

SEQ ID NO: 12489 - protein, 169 aa, Zea mays subsp. mays
  peptide (1)..(169): Ceres Seq. ID no. 12350322
MLTQYDIEEVQDHCNHAFSQQEIVSLYHRFCQLDRNGGGFVSADEFMSVPEFAVNPLSQRLLRMLDGLNFKEFVAFLSAFSPRTSLQQKIEFIFRVYDTDCNGKVAFDDILSILRDLTGSFMTEQQRQKVLIHVLEEAGYTKDSHFTLPDFMKIIGNSELKMEVEVPID

SEQ ID NO: 12490 - DNA, 743 bp, Zea mays subsp. mays
  misc_feature (1)..(743): Ceres Seq. ID no. 12404618
  misc_feature (1)..(743): Ortholog of  Ceres SEQ ID NO 13638769 as cited in SEQ ID NO 51773
  misc_feature (1)..(743): Ortholog of  Ceres SEQ ID NO 12583723 as cited in SEQ ID NO 58297
  misc_feature (1)..(743): Ortholog of  Ceres SEQ ID NO 12623263 as cited in SEQ ID NO 60988
  misc_feature (1)..(743): Ortholog of  Ceres SEQ ID NO 15225568 as cited in SEQ ID NO 61512
  misc_feature (1)..(743): Ortholog of  Ceres SEQ ID NO 13664236 as cited in SEQ ID NO 66530
  misc_feature (1)..(743): Ortholog of  Ceres SEQ ID NO 13590249 as cited in SEQ ID NO 68385
  misc_feature (1)..(743): Ortholog of  Ceres SEQ ID NO 12635807 as cited in SEQ ID NO 0
  misc_feature (1)..(743): Ortholog of  Ceres SEQ ID NO 15179245 as cited in SEQ ID NO 0
atttttcttccgcacgcatccctcgccgcctcgcgcctgcaccggagaatcggtcccattgcccgcgaacctgcgtgtgtgaggtatcgaacaccccaagatggcaactttcgcctcaccactcctctgcaacttcatggccatcgaacagaagaacgcgcctcagctgaccaacagcagaaagccgtccctgcgcctgagcttcccaacgacaaggagcatgccaacattgccgttgccgtgcttcagagcgaggccagactggcgcgtcgccgccgtctacaaggtgaagctcatcggccccgaaggacaggagagcgtgatccaagtgccagaggacagctacatcctggacgcggccgaggaggccggtatagacctgccctactcctgccgcgctggtgcgtgctccacgtgcgccggcaaggtgctggagggctccgtcgaccaggcggaccagtcgttcctggacgacgcgcaggtcggtgccgggtatgcgctcacctgcgtcgcgtacccgacgtctgactgcgtcatccagacgcacagggaggccgacctgtactaggcagcccagtcccacgcgtaaccggatcaacgactgtgcacttccatagctcccattcggattcgatcttgagttcttgacactgattcgcacttgtgcttttgtccttgcaggtagctggaactagtagtgcattctttaatcgttattgttcaagtgtaggttgctttggttt

SEQ ID NO: 12491 - protein, 175 aa, Zea mays subsp. mays
  peptide (1)..(175): Ceres Seq. ID no. 12404619
IFLPHASLAASRLHRRIGPIAREPACVRYRTPQDGNFRLTTPLQLHGHRTEERASADQQQKAVPAPELPNDKEHANIAVAVLQSEARLARRRRLQGEAHRPRRTGERDPSARGQLHPGRGRGGRYRPALLLPRWCVLHVRRQGAGGLRRPGGPVVPGRRAGRCRVCAHLRRVPDV

SEQ ID NO: 12492 - protein, 155 aa, Zea mays subsp. mays
  peptide (1)..(155): Ceres Seq. ID no. 12404620
MATFASPLLCNFMAIEQKNAPQLTNSRKPSLRLSFPTTRSMPTLPLPCFRARPDWRVAAVYKVKLIGPEGQESVIQVPEDSYILDAAEEAGIDLPYSCRAGACSTCAGKVLEGSVDQADQSFLDDAQVGAGYALTCVAYPTSDCVIQTHREADLY

SEQ ID NO: 12493 - protein, 143 aa, Zea mays subsp. mays
  peptide (1)..(143): Ceres Seq. ID no. 12404621
MAIEQKNAPQLTNSRKPSLRLSFPTTRSMPTLPLPCFRARPDWRVAAVYKVKLIGPEGQESVIQVPEDSYILDAAEEAGIDLPYSCRAGACSTCAGKVLEGSVDQADQSFLDDAQVGAGYALTCVAYPTSDCVIQTHREADLY

SEQ ID NO: 12494 - DNA, 910 bp, Zea mays subsp. mays
  misc_feature (1)..(910): Ceres Seq. ID no. 12368950
  misc_feature (1)..(910): Ortholog of  Ceres SEQ ID NO 13599287 as cited in SEQ ID NO 338
  misc_feature (1)..(910): Ortholog of  Ceres SEQ ID NO 15172934 as cited in SEQ ID NO 51783
  misc_feature (1)..(910): Ortholog of  Ceres SEQ ID NO 14314817 as cited in SEQ ID NO 52571
  misc_feature (1)..(910): Ortholog of  Ceres SEQ ID NO 15174056 as cited in SEQ ID NO 0
aacacgctaccgtctcacagccgtaaacgcccctcccggatcccgctagttcgccaccgccgcccgcccgcccgccgttcgcctcatcatggccgcctcgtcgaccgccacctccgtccacgacttcatcgtcaaggatgcgagcggcaaagacgttgacctcagcacctacaaggggaaggttcttctcattgttaacgtcgcatcccagtgtggcttaaccaactccaactacactgagctggcccagctctatgagaagtacaaggaccaaggctttgaaatcctggctttcccatgcaaccagtttggtgggcaggagcctggtaccaatgaggagattgtccagtttgcctgcacacgcttcaaggctgagtaccccatcttcgacaaggttgatgtcaacggtagcaatgctgcgcccatctacaagttcttgaaatctagcaaaggtggccttttcggcgacagcatcaagtggaacttttccaagttcttggttgacaaggagggacgtgttgtggatcgctatgctccaaccacttcacccctgagcattgagaaggatatcaagaagctgcttgggagctcttaatcagtatctgggtgcaaagctgtagaaaaacatgtatcaacaatgccctgagcgataaaatatatgataagttgtattaataaagtattgtcgtacttgagaggttgcagtatctgctctatttcccttgcatacactccgtacttgtatatccccttcggagctgatttggtgacccgggatcccaggaggatcggaggggattgagaaggaaattagttgatttcccccttaatccccttcaatcctcccgggatccccttgtcaccaaatcagccctcgaatgaattccaatgctgtatcagtttgctaccc

SEQ ID NO: 12495 - protein, 168 aa, Zea mays subsp. mays
  peptide (1)..(168): Ceres Seq. ID no. 12368951
MAASSTATSVHDFIVKDASGKDVDLSTYKGKVLLIVNVASQCGLTNSNYTELAQLYEKYKDQGFEILAFPCNQFGGQEPGTNEEIVQFACTRFKAEYPIFDKVDVNGSNAAPIYKFLKSSKGGLFGDSIKWNFSKFLVDKEGRVVDRYAPTTSPLSIEKDIKKLLGSS

SEQ ID NO: 12496 - DNA, 1202 bp, Zea mays subsp. mays
  misc_feature (1)..(1202): Ceres Seq. ID no. 12350843
  misc_feature (1)..(1202): Ortholog of  Ceres SEQ ID NO 13597609 as cited in SEQ ID NO 65216
ttagcaaagcgtacatccctccaacaaaccttgagttgagagaggagagaggagagaggagacagcaagcgacacaacacagaggtaaccggctcacgcctgtctcggtggccgtgggcaatcatggccactgtgggacagtccggggccctgaggagggtcaccgtgcactacgccaactcgcccacaggcagcacggtggcagaggtgagctttgacgaccttgacgacgagctgctcctgtttgtgctcgccgatcttcttcctggccaggaaggtttacaccagtcgatcttggaaggaacatacaacaaccaggagaaccacatgagaggtgcagcacccagtgcaccatatggttattcacggccagaggaataccgtgcagagagcagcactgctgcagcagcagcaactggttctaggaattcaggcatggatgaacagatcgcctcggacttcgagtacgccaagcagctgcagcaggagatggaggacctcagcgtcaaagacgaagacgacaacgatatcagctgcgtgccgtctccatctgactctgacgatgagcacgagcatcatgacgaagaggaagaggctgacaggcaggaggacggtgatggtgatgatggtccagacaacatgacttatgagcaaggacaggcacttgtagaatctgtggggactgagtacagaggtctatccgatgagctcatctcctacctgcagtcatggaagtacaagtcttcagggctcttctcccggaaaacaaaccatgaagactgcccgatctgcctgtccactttcagaaaccgggaaaccatgataacgttgccgtgcaggcatcactaccacgcagcttgtgtcaccagatggctcaaggtcaacaagacatgccctgtatgcaaatacgaactgtttggaccttcctaggatccgaccacgtcgacgatggagctgagaagataatgatgatgacgacgacaacgacagatggttgtgtcatctgctctctttttttagcgccaagaaaactggaaatgaaaaagggaaatcaatccgaaaggagaatagaaattaggaagtataggtagaatatctctcttgccagtgactatgtatttgttgtgcgatgaattaagcatacctcgtgctatttatgatgtattggatttttttatatataagaacttccccgtggaatc

SEQ ID NO: 12497 - protein, 268 aa, Zea mays subsp. mays
  peptide (1)..(268): Ceres Seq. ID no. 12350844
MATVGQSGALRRVTVHYANSPTGSTVAEVSFDDLDDELLLFVLADLLPGQEGLHQSILEGTYNNQENHMRGAAPSAPYGYSRPEEYRAESSTAAAAATGSRNSGMDEQIASDFEYAKQLQQEMEDLSVKDEDDNDISCVPSPSDSDDEHEHHDEEEEADRQEDGDGDDGPDNMTYEQGQALVESVGTEYRGLSDELISYLQSWKYKSSGLFSRKTNHEDCPICLSTFRNRETMITLPCRHHYHAACVTRWLKVNKTCPVCKYELFGPS

SEQ ID NO: 12498 - protein, 200 aa, Zea mays subsp. mays
  peptide (1)..(200): Ceres Seq. ID no. 12350845
MRGAAPSAPYGYSRPEEYRAESSTAAAAATGSRNSGMDEQIASDFEYAKQLQQEMEDLSVKDEDDNDISCVPSPSDSDDEHEHHDEEEEADRQEDGDGDDGPDNMTYEQGQALVESVGTEYRGLSDELISYLQSWKYKSSGLFSRKTNHEDCPICLSTFRNRETMITLPCRHHYHAACVTRWLKVNKTCPVCKYELFGPS

SEQ ID NO: 12499 - protein, 164 aa, Zea mays subsp. mays
  peptide (1)..(164): Ceres Seq. ID no. 12350846
MDEQIASDFEYAKQLQQEMEDLSVKDEDDNDISCVPSPSDSDDEHEHHDEEEEADRQEDGDGDDGPDNMTYEQGQALVESVGTEYRGLSDELISYLQSWKYKSSGLFSRKTNHEDCPICLSTFRNRETMITLPCRHHYHAACVTRWLKVNKTCPVCKYELFGPS

SEQ ID NO: 12500 - DNA, 1795 bp, Zea mays subsp. mays
  misc_feature (1)..(1795): Ceres Seq. ID no. 12411527
  misc_feature (1)..(1795): Ortholog of  Ceres SEQ ID NO 13663060 as cited in SEQ ID NO 60964
  misc_feature (1)..(1795): Ortholog of  Ceres SEQ ID NO 13655298 as cited in SEQ ID NO 68914
acagaacagggagggaggtagagaggactagaggagtcggagcctcggaggagggagagggcgaagagtagggggaaccaaatcttggaggggaaacgtagagttctttcgtggaggaagcgggtgcaactggaggagggtagaggtagctcaatagatctactgctgtcgggggagttaatgcaaagctgagttgctgcacgttggctttcttcagagatggcttcagctggtgtagccccatctgggtacaaaaacagcagcagcactagcattggtgccgagaagttgcaagatcagatgaacgagctaaagattagagatgataaggaagttgaagcaaccataattaatgggaaagggactgaaactgggcacataattgtcaccactactggtggcaagaatggtcaaccaaaacagacagtgagctacatggctgagcgcattgtaggtcaaggttcttttgggattgtcttccaggctaagtgtttggagacgggtgagactgttgccataaagaaggttcttcaggataagcgttacaagaaccgtgagttgcagaccatgcgccttcttgaccaccctaatgttgttgctttgaagcattgcttcttttcaactactgagaaggatgagctttatctgaacttggtccttgagtatgtgccggagacagttcatcgagttgtgaagcatcacaacaagatgaaccaacgcatgccacttatttatgtgaagctgtatatgtaccagatatgtagggcattggcttacattcatggcactattggtgtctgccacagagatattaagccacaaaaccttctggtgaacccacacacccaccagcttaaactatgtgactttggcagtgcaaaagttctggtcaagggggaaccaaacatatcgtacatctgctcccgatactatagggctccagagctcatatttggtgccactgagtataccacagcgattgacatttggtctgctggatgtgttcttgctgagcttatgctagggcagcctttgtttccgggtgaaagtggtgtggaccaacttgtcgaaatcatcaaggtcctcggtacgccaacaagggaagaaattaaatgcatgaacccaaattacacagagtttaagttcccacaaatcaaagcacacccatggcacaaggtattccacaaaaggatgccgccagaagctgttgatctggtctctcggctactccagtactccccaaatctgagatgcactgctatggaggcacttgttcacccattctttgatgagcttcgagatcctaatactcgccttccaaatggtcgctttttgccaccactattcaatttcaagcctcacgaacttaaaggagtcccatcagacattgtcgcgaaattgattccagaacatgcaaagaagcaatgctcctatgttggattgtgaaatgaccgcgccttgagactggaacctgtggttgcaactgtgcatttcccctgggatgtttgacgatctgaggcatgcgagcctgttgttgaagatgcaaggttacgtacttgtacgacaatgtgacctgtgtagctgagtagtctatgtcgcagtgacatgtaacggcaccccccttcctactaactgacgcttactcgagattgccatagttgatcttgtaatttgttatagagcagtatgaatgtatttatggtagcttgaatctatgtatggattcacttcgtttttccatgttcccttgtctccagacccagattgctaccgtattgtttcagaattcctagcc

SEQ ID NO: 12501 - protein, 408 aa, Zea mays subsp. mays
  peptide (1)..(408): Ceres Seq. ID no. 12411528
MASAGVAPSGYKNSSSTSIGAEKLQDQMNELKIRDDKEVEATIINGKGTETGHIIVTTTGGKNGQPKQTVSYMAERIVGQGSFGIVFQAKCLETGETVAIKKVLQDKRYKNRELQTMRLLDHPNVVALKHCFFSTTEKDELYLNLVLEYVPETVHRVVKHHNKMNQRMPLIYVKLYMYQICRALAYIHGTIGVCHRDIKPQNLLVNPHTHQLKLCDFGSAKVLVKGEPNISYICSRYYRAPELIFGATEYTTAIDIWSAGCVLAELMLGQPLFPGESGVDQLVEIIKVLGTPTREEIKCMNPNYTEFKFPQIKAHPWHKVFHKRMPPEAVDLVSRLLQYSPNLRCTAMEALVHPFFDELRDPNTRLPNGRFLPPLFNFKPHELKGVPSDIVAKLIPEHAKKQCSYVGL

SEQ ID NO: 12502 - protein, 381 aa, Zea mays subsp. mays
  peptide (1)..(381): Ceres Seq. ID no. 12411529
MNELKIRDDKEVEATIINGKGTETGHIIVTTTGGKNGQPKQTVSYMAERIVGQGSFGIVFQAKCLETGETVAIKKVLQDKRYKNRELQTMRLLDHPNVVALKHCFFSTTEKDELYLNLVLEYVPETVHRVVKHHNKMNQRMPLIYVKLYMYQICRALAYIHGTIGVCHRDIKPQNLLVNPHTHQLKLCDFGSAKVLVKGEPNISYICSRYYRAPELIFGATEYTTAIDIWSAGCVLAELMLGQPLFPGESGVDQLVEIIKVLGTPTREEIKCMNPNYTEFKFPQIKAHPWHKVFHKRMPPEAVDLVSRLLQYSPNLRCTAMEALVHPFFDELRDPNTRLPNGRFLPPLFNFKPHELKGVPSDIVAKLIPEHAKKQCSYVGL

SEQ ID NO: 12503 - protein, 336 aa, Zea mays subsp. mays
  peptide (1)..(336): Ceres Seq. ID no. 12411530
MAERIVGQGSFGIVFQAKCLETGETVAIKKVLQDKRYKNRELQTMRLLDHPNVVALKHCFFSTTEKDELYLNLVLEYVPETVHRVVKHHNKMNQRMPLIYVKLYMYQICRALAYIHGTIGVCHRDIKPQNLLVNPHTHQLKLCDFGSAKVLVKGEPNISYICSRYYRAPELIFGATEYTTAIDIWSAGCVLAELMLGQPLFPGESGVDQLVEIIKVLGTPTREEIKCMNPNYTEFKFPQIKAHPWHKVFHKRMPPEAVDLVSRLLQYSPNLRCTAMEALVHPFFDELRDPNTRLPNGRFLPPLFNFKPHELKGVPSDIVAKLIPEHAKKQCSYVGL

SEQ ID NO: 12504 - DNA, 1412 bp, Zea mays subsp. mays
  misc_feature (1)..(1412): Ceres Seq. ID no. 12358726
  misc_feature (1)..(1412): Ortholog of  Ceres SEQ ID NO 14308120 as cited in SEQ ID NO 58423
  misc_feature (1)..(1412): Ortholog of  Ceres SEQ ID NO 15169380 as cited in SEQ ID NO 58483
  misc_feature (1)..(1412): Ortholog of  Ceres SEQ ID NO 15177787 as cited in SEQ ID NO 59431
  misc_feature (1)..(1412): Ortholog of  Ceres SEQ ID NO 12617197 as cited in SEQ ID NO 63406
  misc_feature (1)..(1412): Ortholog of  Ceres SEQ ID NO 13597804 as cited in SEQ ID NO 64182
  misc_feature (1)..(1412): Ortholog of  Ceres SEQ ID NO 14301622 as cited in SEQ ID NO 65156
  misc_feature (1)..(1412): Ortholog of  Ceres SEQ ID NO 13598597 as cited in SEQ ID NO 65496
aaacaaatgatgatccatcgatagtggctgaggtgacagctctccaagtttcgtctgttcgctcgtggtggaaattccgctgagcgagcgagcgagcgaatcctcctcttcccagccccggcgtgaggagcgccggcgatgtcgaccggcggcaggaagatgaggacggcgtgcgtgaccggaggaaacgggtatatcgcctcggcgctcatcaaggtgctgctggagaagggctacgccgtcaagacgacggtcaggaaccctgatgacatggagaagaactcccacctcaaggacctgcaggcgctcgggtccttggaggtcttccgcgccgacctggacgaagacggcagcttcgatgacgccgtcgccggctgcgactacgccttcctggtcgccgctccggtgaacctccacacgaagaaccccgaggaagaaatgatcgagccggccgtcaggggaactctgaacgtgatgcggtcgtgcgtgaaggcgggcacggtgaggcgcgtggtcctgacctcgtcggcggccgcggtcaccaccaggccgcagctgcaaggcgatgggcacgtgctggacgaggagtcctggtccgacgtcgagtacctcagagcccacaagcctgcaggcccctgggggtacccggtgtccaaggtgctcctggagaaggaggcgagcaggttcgcggaggagcacggcatcggcctcgtcaccgtctgccccggcctcaccgtgggcgccgcgccgggccccgaccgcccgcaccaggcgtccccaactgcctctcccttctatccggcgacgaagccgcgttcgccgtgctggacgccatcgagagcgccaccgggtgcctgccgctggtccacgtcgacgacgtctgccgcgccgagctgttcgccgccgaggagggcgcggccgcgaggaggtacgtctgctgcggcctcaacacgaccgtcgccgagctcgcgcgtttcctggcggacaagtacccgcagtacggcgtcaaaacgaacctgctctccggcgagcggcttgagaagccgagagtgtgtctgtcgtccgcgaagctggtgaaggaaggtttcgagttcaggtacaggacgttggatgacatatacgacgacatggtcgagtacggcaaggccctgggaatcctgcccgacttgtgatgctgcttcctctgctctcgggccggcgatcaggagttcaggactggactttaaaccgtccgacaaaataagtctatttatgctgctactgtgcccaaccgtaattggaccttaaaaaatgtcattacaaacaatcaactgtgtcaagaaaaattgtctatgttttgctttttttttttggtctactcagaaccgtttgtctgactagtaatttctacctcaatcttccatcggaaaccc

SEQ ID NO: 12505 - protein, 312 aa, Zea mays subsp. mays
  peptide (1)..(312): Ceres Seq. ID no. 12358727
MSTGGRKMRTACVTGGNGYIASALIKVLLEKGYAVKTTVRNPDDMEKNSHLKDLQALGSLEVFRADLDEDGSFDDAVAGCDYAFLVAAPVNLHTKNPEEEMIEPAVRGTLNVMRSCVKAGTVRRVVLTSSAAAVTTRPQLQGDGHVLDEESWSDVEYLRAHKPAGPWGYPVSKVLLEKEASRFAEEHGIGLVTVCPGLTVGAAPGPDRPHQASPTASPFYPATKPRSPCWTPSRAPPGACRWSTSTTSAAPSCSPPRRARPRGGTSAAASTRPSPSSRVSWRTSTRSTASKRTCSPASGLRSRECVCRPRSW

SEQ ID NO: 12506 - protein, 305 aa, Zea mays subsp. mays
  peptide (1)..(305): Ceres Seq. ID no. 12358728
MRTACVTGGNGYIASALIKVLLEKGYAVKTTVRNPDDMEKNSHLKDLQALGSLEVFRADLDEDGSFDDAVAGCDYAFLVAAPVNLHTKNPEEEMIEPAVRGTLNVMRSCVKAGTVRRVVLTSSAAAVTTRPQLQGDGHVLDEESWSDVEYLRAHKPAGPWGYPVSKVLLEKEASRFAEEHGIGLVTVCPGLTVGAAPGPDRPHQASPTASPFYPATKPRSPCWTPSRAPPGACRWSTSTTSAAPSCSPPRRARPRGGTSAAASTRPSPSSRVSWRTSTRSTASKRTCSPASGLRSRECVCRPRSW

SEQ ID NO: 12507 - protein, 268 aa, Zea mays subsp. mays
  peptide (1)..(268): Ceres Seq. ID no. 12358729
MEKNSHLKDLQALGSLEVFRADLDEDGSFDDAVAGCDYAFLVAAPVNLHTKNPEEEMIEPAVRGTLNVMRSCVKAGTVRRVVLTSSAAAVTTRPQLQGDGHVLDEESWSDVEYLRAHKPAGPWGYPVSKVLLEKEASRFAEEHGIGLVTVCPGLTVGAAPGPDRPHQASPTASPFYPATKPRSPCWTPSRAPPGACRWSTSTTSAAPSCSPPRRARPRGGTSAAASTRPSPSSRVSWRTSTRSTASKRTCSPASGLRSRECVCRPRSW

SEQ ID NO: 12508 - DNA, 991 bp, Zea mays subsp. mays
  misc_feature (1)..(991): Ceres Seq. ID no. 12407888
  misc_feature (1)..(991): Ortholog of  Ceres SEQ ID NO 15176678 as cited in SEQ ID NO 59743
  misc_feature (1)..(991): Ortholog of  Ceres SEQ ID NO 15173314 as cited in SEQ ID NO 60298
  misc_feature (1)..(991): Ortholog of  Ceres SEQ ID NO 12618747 as cited in SEQ ID NO 65714
gtgtccactgttcagtcggctcgagtaacaacagcaatagaatgggtggcggcggcgggagcccggcagcgagcggcgggagcagcagcagcgaggatgacggagacgccgcgtggaaggcagccattgactccatcgcgtccgttgggttcagcgtcccttcgtccaacggcgtggcgaaggcagcctctagcggcagccgcgaggtgaacaaccgcgctgatctggaagagccgcgtgaggggaagccaaagagtcctgggcttaagctgtaccaggtcaaggtaagaaacatgttggatgatatgttagagaaaaatctcgaaatagtcaaagctccgtgcttgaacttagtagaccccatggaaacaggaggaggaataaagttatttaaaaaagcaccacctggtattagcatggattctacggataaatggcacgtgcaactcaagcgaccaagaatcgtgcctggggtagaggtcgatgagaaatcaaagaagttccggcatatgctccggtctgttgttgtcgacggcagtgacatagttgtttctgcaaagaaagcatctgagagatcattggctagattggaagtgagagaagctgcagcaaaggcaaaagccaagagggaggaagaaagggtgcaggaactaaagaaggttaggggagagaaatggcttccttctgttgctagacaaatgaaggaggaaaaggcttgggagctgcgaaggcagagttccttttctaaggtcttaatcaattgtaataaaacgaaatacagtcaggatttttttgtgatttttacttgatctgtgagcgaacactgggtctttcaccttgtcatccaatgggttctgctccttggtgaaatctcccaccagccagtaaagaactgggttgttttcataatatatgcttttgctatgcagcctctgctgttgtaaggaattgcattgttatcttatatcactgtatggtgatgtttaacttt

SEQ ID NO: 12509 - protein, 268 aa, Zea mays subsp. mays
  peptide (1)..(268): Ceres Seq. ID no. 12407889
VHCSVGSSNNSNRMGGGGGSPAASGGSSSSEDDGDAAWKAAIDSIASVGFSVPSSNGVAKAASSGSREVNNRADLEEPREGKPKSPGLKLYQVKVRNMLDDMLEKNLEIVKAPCLNLVDPMETGGGIKLFKKAPPGISMDSTDKWHVQLKRPRIVPGVEVDEKSKKFRHMLRSVVVDGSDIVVSAKKASERSLARLEVREAAAKAKAKREEERVQELKKVRGEKWLPSVARQMKEEKAWELRRQSSFSKVLINCNKTKYSQDFFVIFT

SEQ ID NO: 12510 - protein, 255 aa, Zea mays subsp. mays
  peptide (1)..(255): Ceres Seq. ID no. 12407890
MGGGGGSPAASGGSSSSEDDGDAAWKAAIDSIASVGFSVPSSNGVAKAASSGSREVNNRADLEEPREGKPKSPGLKLYQVKVRNMLDDMLEKNLEIVKAPCLNLVDPMETGGGIKLFKKAPPGISMDSTDKWHVQLKRPRIVPGVEVDEKSKKFRHMLRSVVVDGSDIVVSAKKASERSLARLEVREAAAKAKAKREEERVQELKKVRGEKWLPSVARQMKEEKAWELRRQSSFSKVLINCNKTKYSQDFFVIFT

SEQ ID NO: 12511 - protein, 171 aa, Zea mays subsp. mays
  peptide (1)..(171): Ceres Seq. ID no. 12407891
MLDDMLEKNLEIVKAPCLNLVDPMETGGGIKLFKKAPPGISMDSTDKWHVQLKRPRIVPGVEVDEKSKKFRHMLRSVVVDGSDIVVSAKKASERSLARLEVREAAAKAKAKREEERVQELKKVRGEKWLPSVARQMKEEKAWELRRQSSFSKVLINCNKTKYSQDFFVIFT

SEQ ID NO: 12512 - DNA, 1494 bp, Zea mays subsp. mays
  misc_feature (1)..(1494): Ceres Seq. ID no. 12342482
  misc_feature (1)..(1494): Ortholog of  Ceres SEQ ID NO 13495070 as cited in SEQ ID NO 53216
  misc_feature (1)..(1494): Ortholog of  Ceres SEQ ID NO 13656228 as cited in SEQ ID NO 65648
  misc_feature (1)..(1494): Ortholog of  Ceres SEQ ID NO 15176717 as cited in SEQ ID NO 0
  misc_feature (1)..(1494): Ortholog of  Ceres SEQ ID NO 15179618 as cited in SEQ ID NO 0
agcgttgttaaaaccagtgccattagccatcctagccttcaccctcgcggagaagaagaaagaaaccacctcacctcaagaacagctagctgcaaggataaaaaaaaacaaagctgctgatctatatataataattaggctttgcagtgtcttgttttggagagcaaaggatcatcgtcaagtgatggccaagtcaggggcgctagaacttgctcggagcaccggagggtcgcttagcaaggaccaagtcaaatccgccgttgatcagtatgtcaaataccacgacctccatggaggcaaacaagaatcaaggaagtcaaattacaccgatttggcaaacaagtactatgatcttgtcactggcttttacgaatatggatggggcgactcattccatcttgctggcggatatccgggtgagacttcccgtgaagccattaagcggcaccagcattttttggcactacaattggggctcaagaagggtatgaaggttttggatgtgggatgtggaattgggggacctttaatagaaatcgccagattcagctcaacatcgataactggactgaacaacaatgactaccacatctcaaggggcaaggagctcattttttcagcaggtttgagtgagcaatgctgcttcttgaagggggacttcatggacatgccaatatctgataacacctttgatgcggcctatgcaatacagactacatgtcatgcaccagatgcacaaggcgtctatagtgaggtctaccgtgtgctgaaacctgggcagtattttgcactggatgaatggtgcttgaccgaccgatttgatcccaacaacgccaagcatttggccatcaaggctgagattgagctcggtgatggcctacctgacatccgtaccactcgccaatgtgtccaagctatgaaagatgcaggatttgaggtcgtttttgcaaaggatcttgctcaagtttttccttgcccgtggtaccgggtgatggatcccacctacttttcatgggctcacttccaatgcacacgcccaggacggatcgtcacccgtgcaattgtcaatacactagagttcctccgtattgccccagcaggcagcatgggagcctacaacgtcctgatgagtgcctctgatggccttctaaaaggtggccgggaaggtatcttcacagcgaccttcttcgtcctgggccgcaagcctctcaaggaagttgatatagtaagcctctcaagaaagttgatatagtgaacggcggcgtcctttgagctgcaagattagtatggggctgtactcataagagctatgaatcatggccaacgtgttctgtgccgaggtgtgtttactggattgtcttatgggttatggcccttgcgctgtgtgctggcctgctgggtcatgttcccgcagtagcctgtatctgcttgtcagcttgtgtgctgtgtactatgcactatctgaataaaaatgcagttttacgcattgttatt

SEQ ID NO: 12513 - protein, 416 aa, Zea mays subsp. mays
  peptide (1)..(416): Ceres Seq. ID no. 12342483
ALLKPVPLAILAFTLAEKKKETTSPQEQLAARIKKNKAADLYIIIRLCSVLFWRAKDHRQVMAKSGALELARSTGGSLSKDQVKSAVDQYVKYHDLHGGKQESRKSNYTDLANKYYDLVTGFYEYGWGDSFHLAGGYPGETSREAIKRHQHFLALQLGLKKGMKVLDVGCGIGGPLIEIARFSSTSITGLNNNDYHISRGKELIFSAGLSEQCCFLKGDFMDMPISDNTFDAAYAIQTTCHAPDAQGVYSEVYRVLKPGQYFALDEWCLTDRFDPNNAKHLAIKAEIELGDGLPDIRTTRQCVQAMKDAGFEVVFAKDLAQVFPCPWYRVMDPTYFSWAHFQCTRPGRIVTRAIVNTLEFLRIAPAGSMGAYNVLMSASDGLLKGGREGIFTATFFVLGRKPLKEVDIVSLSRKLI

SEQ ID NO: 12514 - protein, 355 aa, Zea mays subsp. mays
  peptide (1)..(355): Ceres Seq. ID no. 12342484
MAKSGALELARSTGGSLSKDQVKSAVDQYVKYHDLHGGKQESRKSNYTDLANKYYDLVTGFYEYGWGDSFHLAGGYPGETSREAIKRHQHFLALQLGLKKGMKVLDVGCGIGGPLIEIARFSSTSITGLNNNDYHISRGKELIFSAGLSEQCCFLKGDFMDMPISDNTFDAAYAIQTTCHAPDAQGVYSEVYRVLKPGQYFALDEWCLTDRFDPNNAKHLAIKAEIELGDGLPDIRTTRQCVQAMKDAGFEVVFAKDLAQVFPCPWYRVMDPTYFSWAHFQCTRPGRIVTRAIVNTLEFLRIAPAGSMGAYNVLMSASDGLLKGGREGIFTATFFVLGRKPLKEVDIVSLSRKLI

SEQ ID NO: 12515 - protein, 254 aa, Zea mays subsp. mays
  peptide (1)..(254): Ceres Seq. ID no. 12342485
MKVLDVGCGIGGPLIEIARFSSTSITGLNNNDYHISRGKELIFSAGLSEQCCFLKGDFMDMPISDNTFDAAYAIQTTCHAPDAQGVYSEVYRVLKPGQYFALDEWCLTDRFDPNNAKHLAIKAEIELGDGLPDIRTTRQCVQAMKDAGFEVVFAKDLAQVFPCPWYRVMDPTYFSWAHFQCTRPGRIVTRAIVNTLEFLRIAPAGSMGAYNVLMSASDGLLKGGREGIFTATFFVLGRKPLKEVDIVSLSRKLI

SEQ ID NO: 12516 - DNA, 729 bp, Zea mays subsp. mays
  misc_feature (1)..(729): Ceres Seq. ID no. 12454766
  misc_feature (1)..(729): Ortholog of  Ceres SEQ ID NO 15175269 as cited in SEQ ID NO 63840
  misc_feature (1)..(729): Ortholog of  Ceres SEQ ID NO 15176141 as cited in SEQ ID NO 0
aatctccctcctcctctccgccctcgccccctcgccctcgcccgcctgtttaaacctgactgtctataacttaccgccggtccgcacccgcccaccgtccctgtccccttccccgtctaagcactcggatcctctgccgccgcgatgagctactacggccagcagcagccgcccgtcagcgcgccgccggaagggtttatcccgggaaggacgcgtacccgccgccgggctacccgcccgcgggatatcctccgccggcgcagggctacccaccgcagggctacccgccgcagggctaccctccgcagcaggggtatccgcagcagggatacccgccgcagtactcgcagccgccgccgccgccccgccagcagcagagcagcgggccctctttcatggagggatgcttggccgccctttgttgctgctgcctattggaagcctgcttctgagatctaagctgcgcacaacttgttctagaaacaccacttcaatttgcacggttgatataactggggattggcttgttagcgaagaaccgaagataccatgggttcttatgcaaatcacagttctcctagttctttctatcgttctgattgtccgttgcgatgtttggtgtacctagtagtatcttaattatataccttacactgtttacctatccaatggaattcttggtctagctaacattgtgagattatgtcacttttctcgttctctgtagtg

SEQ ID NO: 12517 - protein, 104 aa, Zea mays subsp. mays
  peptide (1)..(104): Ceres Seq. ID no. 12454767
MSYYGQQQPPVSAPPEGFIPGRTRTRRRATRPRDILRRRRATHRRATRRRATLRSRGIRSRDTRRSTRSRRRRPASSRAAGPLSWRDAWPPFVAAAYWKPASEI

SEQ ID NO: 12518 - protein, 74 aa, Zea mays subsp. mays
  peptide (1)..(74): Ceres Seq. ID no. 12454768
MLGRPLLLLPIGSLLLRSKLRTTCSRNTTSICTVDITGDWLVSEEPKIPWVLMQITVLLVLSIVLIVRCDVWCT

SEQ ID NO: 12519 - DNA, 1228 bp, Zea mays subsp. mays
  misc_feature (1)..(1228): Ceres Seq. ID no. 12353510
  misc_feature (1)..(1228): Ortholog of  Ceres SEQ ID NO 14305963 as cited in SEQ ID NO 52290
  misc_feature (1)..(1228): Ortholog of  Ceres SEQ ID NO 14307492 as cited in SEQ ID NO 59504
  misc_feature (1)..(1228): Ortholog of  Ceres SEQ ID NO 13597255 as cited in SEQ ID NO 63874
gagacttgagacagagacgcaggagcgcggaggaaaaggaggcccagaccaccgacggggaaaaaaacatcacgaacaccgttctccatagcgggagtagtgaggaacgaaagagagggggcggcctagggcttcgattccgcagccatggacgccgctgacgtgtggggccgctcatcgtcctcgtcttcttcgtccgccgccgccgcgaggcgcctgcaggcgcgctacgatctgtacatggggatcgacgacgcggacgccggcttggacgaggtgacggagccgcgcggcggggcggagtcctacaactgccccttctgcggcgaggacttcgactttgtcggcctctgctgtcacatcgacgacgagcatgccgttgaggctaagagcggggcatgccccatctgtgctacaagggtcggaatggacttgataggacatttgactatgcaacatggaagttatttcaagatgcaacgcaggcgcagagtccgaaaagtatcttctgggtcccattctttattatctttgttgagaaaggacttgagaaatggcagtttgcagtcatttctcggtggatcatcctatgtatccaatcctcctgctgcagcaccagatccatttgtgtcatctttaatttgtactttgcctgtggctgaaccatccaaagatttacattccgactcatctgacaataactttttgctaaataaattcccagatgaaaagcctgtagagagggctgaaccatcattgtcggagaaagatcagaaggaaagggttcaaaggagcaaattcgtccgagggcttgtgctctcgacaatatttgatgatgataacttgtaaagggggtcatcaaacttgataacagcatcacaatagttaaggaacacgaagagaatcatcagactctgctgctgttgtcgtgatcacacaagaggcccatctaagttcgtatatgtacggatggaatatttatgcatgtatgtatttatgtttatctccctgcatttacccttagtgcaacagggtggtaggggacggttgtagtattccaaatttatgtatcaaataaatgaggacactgtccttggggtgcaattgtgtatataatataataatagggagctactcgccatgatttaggatattttatttaactgttgtaataatatgcagtgttttgtatgatgaccccatttttttatatataactgttcatttt

SEQ ID NO: 12520 - protein, 233 aa, Zea mays subsp. mays
  peptide (1)..(233): Ceres Seq. ID no. 12353511
MDAADVWGRSSSSSSSSAAAARRLQARYDLYMGIDDADAGLDEVTEPRGGAESYNCPFCGEDFDFVGLCCHIDDEHAVEAKSGACPICATRVGMDLIGHLTMQHGSYFKMQRRRRVRKVSSGSHSLLSLLRKDLRNGSLQSFLGGSSYVSNPPAAAPDPFVSSLICTLPVAEPSKDLHSDSSDNNFLLNKFPDEKPVERAEPSLSEKDQKERVQRSKFVRGLVLSTIFDDDNL

SEQ ID NO: 12521 - protein, 202 aa, Zea mays subsp. mays
  peptide (1)..(202): Ceres Seq. ID no. 12353512
MGIDDADAGLDEVTEPRGGAESYNCPFCGEDFDFVGLCCHIDDEHAVEAKSGACPICATRVGMDLIGHLTMQHGSYFKMQRRRRVRKVSSGSHSLLSLLRKDLRNGSLQSFLGGSSYVSNPPAAAPDPFVSSLICTLPVAEPSKDLHSDSSDNNFLLNKFPDEKPVERAEPSLSEKDQKERVQRSKFVRGLVLSTIFDDDNL

SEQ ID NO: 12522 - protein, 140 aa, Zea mays subsp. mays
  peptide (1)..(140): Ceres Seq. ID no. 12353513
MDLIGHLTMQHGSYFKMQRRRRVRKVSSGSHSLLSLLRKDLRNGSLQSFLGGSSYVSNPPAAAPDPFVSSLICTLPVAEPSKDLHSDSSDNNFLLNKFPDEKPVERAEPSLSEKDQKERVQRSKFVRGLVLSTIFDDDNL

SEQ ID NO: 12523 - DNA, 1292 bp, Zea mays subsp. mays
  misc_feature (1)..(1292): Ceres Seq. ID no. 12408296
  misc_feature (1)..(1292): Ortholog of  Ceres SEQ ID NO 13654574 as cited in SEQ ID NO 68569
ggttcacacatggcttccttgttgcgctggaaggacaagtacgtgaaggagaggctgcagggcctgtcctgctcctcggcggccgccacctccgtcgtcccctccaatggccgcgccatcgaccggcactctccgcacctccgggaccctcaccggcgtctcccgccaccggtgcccaagccacccagacccagctctagtttcagtactaccaaagattcgtcctcctcctcctacaagcagcggcagcagatttgccacttcgacgtcgatggcaaagacaaaaggaagaataagaagaagaagagcacagcagcagcagccgctggtagtggtagctcgccgtcggagcataggagaaacggcaaggagaaggcgctgcagctgcagcaggtgagccccgcgagctcgtcccggttcctgctcaactcctccaggctcatgatgcagtccgacgacgaaaccactgccgtcgactccctgccgccacttccgtccccgcggcggccctccttcgttgacgccgccgccgaggacgacacagacacattccccagcagccacggcgatgccgcgtcgccggctgttccgtcaagaaggcctcagctcgtggcgccggcgccgccactggaattattcgctgagccgtctgcatcaggcgcaggctcctcctcctcttcgtcgtcagagataactggaggccatgtcgtcgccgccgctgacaacactgtcgtggtgagatcatgttccacgagaacagggcagcaccaggtagtggttttgagggtatctctgcactgcaaggggtgcgctggcaaggtgaagaagcacctctccaagatggaaggcgttacttctttcgacatcgacatcgcgacgaagaaggtgacggtggtgggagatgtgacgccgctaggcgtcctcaacagcatctccaaggtcaagagcgcccagttctggcctgactctcgctcctctttctctacgccaccgcgtgcctctgcctccttctgagctgcccactagcttcgtcacaaacttaatggttgggacgccaacacggtggtctttcaaatatatagttccttttttctccatattatcgatcgaggaaaatatatatatttgcacaatccaatcaaaagttcctctaccacaaaagatgcattatacaaaatttaactttaactatatatataggcgtctttttatgttttgaagctcgttgtaataagattatgaaagtataatgtatattttcaattttattaaatacaaaaatagggggaccc

SEQ ID NO: 12524 - protein, 337 aa, Zea mays subsp. mays
  peptide (1)..(337): Ceres Seq. ID no. 12408297
GSHMASLLRWKDKYVKERLQGLSCSSAAATSVVPSNGRAIDRHSPHLRDPHRRLPPPVPKPPRPSSSFSTTKDSSSSSYKQRQQICHFDVDGKDKRKNKKKKSTAAAAAGSGSSPSEHRRNGKEKALQLQQVSPASSSRFLLNSSRLMMQSDDETTAVDSLPPLPSPRRPSFVDAAAEDDTDTFPSSHGDAASPAVPSRRPQLVAPAPPLELFAEPSASGAGSSSSSSSEITGGHVVAAADNTVVVRSCSTRTGQHQVVVLRVSLHCKGCAGKVKKHLSKMEGVTSFDIDIATKKVTVVGDVTPLGVLNSISKVKSAQFWPDSRSSFSTPPRASASF

SEQ ID NO: 12525 - protein, 334 aa, Zea mays subsp. mays
  peptide (1)..(334): Ceres Seq. ID no. 12408298
MASLLRWKDKYVKERLQGLSCSSAAATSVVPSNGRAIDRHSPHLRDPHRRLPPPVPKPPRPSSSFSTTKDSSSSSYKQRQQICHFDVDGKDKRKNKKKKSTAAAAAGSGSSPSEHRRNGKEKALQLQQVSPASSSRFLLNSSRLMMQSDDETTAVDSLPPLPSPRRPSFVDAAAEDDTDTFPSSHGDAASPAVPSRRPQLVAPAPPLELFAEPSASGAGSSSSSSSEITGGHVVAAADNTVVVRSCSTRTGQHQVVVLRVSLHCKGCAGKVKKHLSKMEGVTSFDIDIATKKVTVVGDVTPLGVLNSISKVKSAQFWPDSRSSFSTPPRASASF

SEQ ID NO: 12526 - protein, 190 aa, Zea mays subsp. mays
  peptide (1)..(190): Ceres Seq. ID no. 12408299
MMQSDDETTAVDSLPPLPSPRRPSFVDAAAEDDTDTFPSSHGDAASPAVPSRRPQLVAPAPPLELFAEPSASGAGSSSSSSSEITGGHVVAAADNTVVVRSCSTRTGQHQVVVLRVSLHCKGCAGKVKKHLSKMEGVTSFDIDIATKKVTVVGDVTPLGVLNSISKVKSAQFWPDSRSSFSTPPRASASF

SEQ ID NO: 12527 - DNA, 1013 bp, Zea mays subsp. mays
  misc_feature (1)..(1013): Ceres Seq. ID no. 12342385
  misc_feature (1)..(1013): Ortholog of  Ceres SEQ ID NO 12610239 as cited in SEQ ID NO 56199
  misc_feature (1)..(1013): Ortholog of  Ceres SEQ ID NO 12782126 as cited in SEQ ID NO 60168
aaagtaactaaccatattggccgtgcgtccgtggctttgcatctgcaaccccgcccgatcaatcttcctcgttccgccgctccctcgcctccggcagcgaggtgaggccaccgatcggaccttccctagcggcggcgcctaccaacctcaaggagcgatggctctgtctgcgacgctacggatttctcttagcgtcgcgttctttggggttctggcgttcgtgcttggtgtcatcgccgaaaacaaaaagcctgcttccgggactcctatcctaggaaaggatgtcgtcatctgcacgtttccaagtgatccgactcttgcgatggggagcctgtccattgtggcacttgtggtagctgccatcgtaggccatgttgccatcttctttccatactcgggcaagtcagttcctcgtggagcgctgtttcaaagcaccagcttgacagtgttctttgttgttgctgagcttgtctcagccctggctcttgcaatgtcgctgtgggcaactgtcaccgagggtcttcaccgcagcaagaacatccaccacgacatggactaccagtgccctactgccaagaccggcctgttcggcggcgccgctttcctcgcccttgacgctgctctcttctggcttgtttgccagatgctggccctcaatgcaagggctgactaccttgacgaggatgacggcaagggagaatatggccagatttatgctgctcaagtcgatgatggctcgaaggtctgagcctatgtggtcatgctcggcagggttctatgattagtgtcatttggctacattatgccatcaacaaagtcgctttagctctcagtaaatttgtatataagttgcaaagtcttacataaggctggtggttattgcactttcgtgtttcagtgtgatcgataaacagtatctcagtacaatcggtttgctatgccccttggcgaacttgtccttgagttttctggtgtctgaatggcactataatataatatactccctctgtttc

SEQ ID NO: 12528 - protein, 196 aa, Zea mays subsp. mays
  peptide (1)..(196): Ceres Seq. ID no. 12342386
MALSATLRISLSVAFFGVLAFVLGVIAENKKPASGTPILGKDVVICTFPSDPTLAMGSLSIVALVVAAIVGHVAIFFPYSGKSVPRGALFQSTSLTVFFVVAELVSALALAMSLWATVTEGLHRSKNIHHDMDYQCPTAKTGLFGGAAFLALDAALFWLVCQMLALNARADYLDEDDGKGEYGQIYAAQVDDGSKV

SEQ ID NO: 12529 - protein, 141 aa, Zea mays subsp. mays
  peptide (1)..(141): Ceres Seq. ID no. 12342387
MGSLSIVALVVAAIVGHVAIFFPYSGKSVPRGALFQSTSLTVFFVVAELVSALALAMSLWATVTEGLHRSKNIHHDMDYQCPTAKTGLFGGAAFLALDAALFWLVCQMLALNARADYLDEDDGKGEYGQIYAAQVDDGSKV

SEQ ID NO: 12530 - DNA, 1376 bp, Zea mays subsp. mays
  misc_feature (1)..(1376): Ceres Seq. ID no. 12404602
  misc_feature (1)..(1376): Ortholog of  Ceres SEQ ID NO 14309755 as cited in SEQ ID NO 20741
  misc_feature (1)..(1376): Ortholog of  Ceres SEQ ID NO 13594727 as cited in SEQ ID NO 52169
  misc_feature (1)..(1376): Ortholog of  Ceres SEQ ID NO 14314050 as cited in SEQ ID NO 59952
  misc_feature (1)..(1376): Ortholog of  Ceres SEQ ID NO 13596474 as cited in SEQ ID NO 62169
  misc_feature (1)..(1376): Ortholog of  Ceres SEQ ID NO 13598714 as cited in SEQ ID NO 62656
  misc_feature (1)..(1376): Ortholog of  Ceres SEQ ID NO 13596969 as cited in SEQ ID NO 63375
  misc_feature (1)..(1376): Ortholog of  Ceres SEQ ID NO 15225685 as cited in SEQ ID NO 63616
  misc_feature (1)..(1376): Ortholog of  Ceres SEQ ID NO 13597519 as cited in SEQ ID NO 64759
aaaatcaactcgagcaaagcagctagctagctagcgctagtaccatcgtgcgagtgtgagcaagctactgagagatctcggaacgtttgcttgacagcttgagtaggtaaataatctatggcgcgccgacagtggagcagcggcggcctcgcggtcgcggtgctcgccgtgctgtcgtccgtgctcatctgctcatggggccacccggtgccgggcgggcacggcggcgggctccccctgcagccgcacttctacggccacgcgtgcccgcagatggaggccatcgtggggtccctcgtggcgaaggcgcacgcggaggacccgcgcatggcggcgtccctgctgcggatgcacttccacgactgcttcgtgcaggggctgcgacgcctccgtgctgctggacgccgacggcagcggcaggttcgtcaccgagaagcggtccaaccccaacaaggactcgctccgggggttcgaggtcatcgacgagatcaaggccgcgctggagcacgcctgcccgcacaccgtctcctgcgccgacatcgtcgccgtcgccgccagggactccgtcgtcctgaccggcggacctggctgggaggtgccactggggaggagggactcgctgacggccagcctgagcggctccaacaacctcatccctgctcccaacgactccctccccaccatcatcggcaagttcgccaaccaaggcctcgacatcgtcgacctcgtcgcactctcaggggggcacaccatcggcgactcgcggtgcgtgagcttccggcagcggctgtacggccagaacaacaacgggcaggtggaccggacgctgaacccggcgtacgcggcggagctgcggggccggtgcccgccggtcgggcggcgaccagaacctgttcgcgctggacctggtgacccagttccggttcgacaaccagtactaccacaacatcctggccatgaacgggctgctcagctccgacgagatcctgctcacgcagagccgcgagaccatggacctcgtccaccgctacgccgccgaccagggcctcttcttcgaccacttcgccaagtccatggtcaagatgggcaacatctcgccgctcaccgggagcgccggcgagatcaggcacaactgcaggagggtcaaccacttctagcttccatggagtggccatccgtgcagtggtgttcttgctttggtttcatttctggatgcatgcgtcatctttcatacttggatttaagtgtgcagtagtcgtaaatgattggaatttctgttttagtttggtgcccattcgatctcgagtcgattttcactcatgtaatttgcaaatcttgtacgaagaaatgatccaataaaattcagcatttgtgtc

SEQ ID NO: 12531 - protein, 264 aa, Zea mays subsp. mays
  peptide (1)..(264): Ceres Seq. ID no. 12404603
MARRQWSSGGLAVAVLAVLSSVLICSWGHPVPGGHGGGLPLQPHFYGHACPQMEAIVGSLVAKAHAEDPRMAASLLRMHFHDCFVQGLRRLRAAGRRRQRQVRHREAVQPQQGLAPGVRGHRRDQGRAGARLPAHRLLRRHRRRRRQGLRRPDRRTWLGGATGEEGLADGQPERLQQPHPCSQRLPPHHHRQVRQPRPRHRRPRRTLRGAHHRRLAVRELPAAAVRPEQQRAGGPDAEPGVRGGAAGPVPAGRAATRTCSRWTW

SEQ ID NO: 12532 - protein, 212 aa, Zea mays subsp. mays
  peptide (1)..(212): Ceres Seq. ID no. 12404604
MEAIVGSLVAKAHAEDPRMAASLLRMHFHDCFVQGLRRLRAAGRRRQRQVRHREAVQPQQGLAPGVRGHRRDQGRAGARLPAHRLLRRHRRRRRQGLRRPDRRTWLGGATGEEGLADGQPERLQQPHPCSQRLPPHHHRQVRQPRPRHRRPRRTLRGAHHRRLAVRELPAAAVRPEQQRAGGPDAEPGVRGGAAGPVPAGRAATRTCSRWTW

SEQ ID NO: 12533 - protein, 194 aa, Zea mays subsp. mays
  peptide (1)..(194): Ceres Seq. ID no. 12404605
MAASLLRMHFHDCFVQGLRRLRAAGRRRQRQVRHREAVQPQQGLAPGVRGHRRDQGRAGARLPAHRLLRRHRRRRRQGLRRPDRRTWLGGATGEEGLADGQPERLQQPHPCSQRLPPHHHRQVRQPRPRHRRPRRTLRGAHHRRLAVRELPAAAVRPEQQRAGGPDAEPGVRGGAAGPVPAGRAATRTCSRWTW

SEQ ID NO: 12534 - DNA, 978 bp, Zea mays subsp. mays
  misc_feature (1)..(978): Ceres Seq. ID no. 12579117
  misc_feature (1)..(978): Ortholog of  Ceres SEQ ID NO 15171239 as cited in SEQ ID NO 52298
aattgacagatcccgcaatactcacagggccctcttctctcatctctcactccctcgctccgtctaccagtaccaccacgtccctcctcgtcgacgatctcgtagcggcggcgcacatggcgagcgacggcgcggcggctacgccagcgaaggttaccccaaagaaggccaatctcctcgacccgcactccatcaagcaccttctcgacgagaccatctccgaggtcgtgaagagtaagggctacaccgaggacacgcggctgggcaactggaagctggggatcggagccgccgtgattgctgtcgccctcctcgctcagttttaccccaagaagttcccgcagaaccgcgatttcctccttggctgcatcgccctgtatgtggtgctgaatgtggtgctgctgatccttagctacaccaaggagaaggatgccatcctattcacgcaccctcctatgggttctttcagcagcactggcctcactatttcttctaaattaccaagattctcggacatgtacactctcacaatagcaagtgcggatccacagtctatctctgcaaacaagccagttcatttcactaagagcgtaacaaagtggtttacaaaggaaggagttcttgtggagggcctgttctggaaggatgtcgagaagctgattgatgactacaacagtgagcgcaagagtaaatgaattggtagctcgtgtctctggccatctggggagacatcgctgtctagagaaatccgtcaaagtttagcttaatctgaacaggcatttttgctatactgtaccggttgaccagtgaatgaatgatgttctagacattaactttggttccaagctttctgtcgtgtccatggataactatccgtccgaatcctagaaacgtggtccgtgcttgtaacctgtttgttctggtgcttccatacgccggagcagattttgaagagaaatgaaacaaatcgttaaatcg

SEQ ID NO: 12535 - protein, 230 aa, Zea mays subsp. mays
  peptide (1)..(230): Ceres Seq. ID no. 12579118
LTDPAILTGPSSLISHSLAPSTSTTTSLLVDDLVAAAHMASDGAAATPAKVTPKKANLLDPHSIKHLLDETISEVVKSKGYTEDTRLGNWKLGIGAAVIAVALLAQFYPKKFPQNRDFLLGCIALYVVLNVVLLILSYTKEKDAILFTHPPMGSFSSTGLTISSKLPRFSDMYTLTIASADPQSISANKPVHFTKSVTKWFTKEGVLVEGLFWKDVEKLIDDYNSERKSK

SEQ ID NO: 12536 - protein, 192 aa, Zea mays subsp. mays
  peptide (1)..(192): Ceres Seq. ID no. 12579119
MASDGAAATPAKVTPKKANLLDPHSIKHLLDETISEVVKSKGYTEDTRLGNWKLGIGAAVIAVALLAQFYPKKFPQNRDFLLGCIALYVVLNVVLLILSYTKEKDAILFTHPPMGSFSSTGLTISSKLPRFSDMYTLTIASADPQSISANKPVHFTKSVTKWFTKEGVLVEGLFWKDVEKLIDDYNSERKSK

SEQ ID NO: 12537 - DNA, 766 bp, Zea mays subsp. mays
  misc_feature (1)..(766): Ceres Seq. ID no. 12345783
  misc_feature (1)..(766): Ortholog of  Ceres SEQ ID NO 13587131 as cited in SEQ ID NO 331
  misc_feature (1)..(766): Ortholog of  Ceres SEQ ID NO 13661176 as cited in SEQ ID NO 61114
acagtcgcctccttcctgcgccgccgccgccgccgccgctaccaccgcctcgcggccgcctgcggctccgcgtttccgcacggatttggtgaaggtttcttgaggctgagaacatggtgctgaagacggaactttgccgcttcagcggccagaagatttatcctgggaaaggcattagatttatccgtgctgattctcaggtcttcctttttgccaactcgaaatgcaagcgctacttccacaaccgcctgaagcctgcaaagcttacctggacagcaatgtacaggaagcagcacaagaaggatatccatgctgaagcggtaaagaagaggcgccgcgccaccaagaagccatactccaggtcaattgtgggtgcttccttggaagtaatccagaagaagagagctgagaagccagaggtccgcgatgctgctagagaagctgctcttcgtgagatcaaggagcgcatcaagaagaccaaggatgagaagaaagcgaagaaggcggaggtgagcaagtcccagaagacgcagacaaagggtgcggtccagaagggttccaagggccccaagttgggcggcggtggtgggaagcgctgaaagaacttagtgtcgtttctcgacattgcagtcgttccttagccaaagccactttcgtagaacctgtgttgaatttgcaagacttattcaagcgttgcttgtgcgtgctaaataccatggcaagagaacggatttatatttatgcctgaaaaaaaatgaccgttcat

SEQ ID NO: 12538 - protein, 161 aa, Zea mays subsp. mays; identical to SEQ ID NO: 1700
  peptide (1)..(161): Ceres Seq. ID no. 12345784

SEQ ID NO: 12539 - protein, 106 aa, Zea mays subsp. mays; identical to SEQ ID NO: 1701
  peptide (1)..(106): Ceres Seq. ID no. 12345785

SEQ ID NO: 12540 - DNA, 733 bp, Zea mays subsp. mays
  misc_feature (1)..(733): Ceres Seq. ID no. 12404215
  misc_feature (1)..(733): Ortholog of  Ceres SEQ ID NO 14301855 as cited in SEQ ID NO 61528
  misc_feature (1)..(733): Ortholog of  Ceres SEQ ID NO 13584026 as cited in SEQ ID NO 63527
agatcccgccgcgcgtctccttccgcgacacgctctcagtctcacgccacagctcgtcgcgttcgtcaacggtcgacccatcgcctatggaaggaaggcgcgaaccggaggcggacggcggaaaggccgggggcctcccgccgtcggagccgccgcacctgcagggccagccgccgcaggagtacgggtacggcacgttccagggccctcgacatcctcccgtcgggttcccgcagcctgccccgcctcccgggctcggcggcggcggctatcacaaccagcagcagccgtacgcgcctgcggagacgtactacgcccaggggtaccaggccgtaccaggctatggtcctgttgctgaaggaagacctgtgagaatgagggcgtctcccatgttgtggcctcggcttaggctggtgtctgttcataaccgggtttttcttggctgccattccatggttcattggagctttcgttcttatatgtgtgcgggtacatgaccaacgagagaaaccaggatacgttgcttgcacaattgctgccgttgttgctgccgttgccatcctcctgggggtaactaaaggaacgcacgtgtggtgaattgcctccagagaaggcaatcaatgtgtatttgcgttgtatatctgtgtgtgctaaaaagtgtggagcaacatccatgtgaatgtgatcttatgtccatatatattctactttgcaatgaaatttgaaatgtagt

SEQ ID NO: 12541 - protein, 164 aa, Zea mays subsp. mays
  peptide (1)..(164): Ceres Seq. ID no. 12404216
IPPRVSFRDTLSVSRHSSSRSSTVDPSPMEGRREPEADGGKAGGLPPSEPPHLQGQPPQEYGYGTFQGPRHPPVGFPQPAPPPGLGGGGYHNQQQPYAPAETYYAQGYQAVPGYGPVAEGRPVRMRASPMLWPRLRLVSVHNRVFLGCHSMVHWSFRSYMCAGT

SEQ ID NO: 12542 - protein, 136 aa, Zea mays subsp. mays
  peptide (1)..(136): Ceres Seq. ID no. 12404217
MEGRREPEADGGKAGGLPPSEPPHLQGQPPQEYGYGTFQGPRHPPVGFPQPAPPPGLGGGGYHNQQQPYAPAETYYAQGYQAVPGYGPVAEGRPVRMRASPMLWPRLRLVSVHNRVFLGCHSMVHWSFRSYMCAGT

SEQ ID NO: 12543 - protein, 123 aa, Zea mays subsp. mays
  peptide (1)..(123): Ceres Seq. ID no. 12404218
RSRRASPSATRSQSHATARRVRQRSTHRLWKEGANRRRTAERPGASRRRSRRTCRASRRRSTGTARSRALDILPSGSRSLPRLPGSAAAAITTSSSRTRLRRRTTPRGTRPYQAMVLLLKEDL

SEQ ID NO: 12544 - DNA, 792 bp, Zea mays subsp. mays
  misc_feature (1)..(792): Ceres Seq. ID no. 12372540
  misc_feature (1)..(792): Ortholog of  Ceres SEQ ID NO 12625648 as cited in SEQ ID NO 63959
atatccgttgtggcagcagccttcgtgcaggcatggcgagctcatcttgtgcactgctgggtctggcctgcttcgtgctcctggcggcggcagccggcgccacgcagtacaaggtcggcggcgacaatggctgggccgtgccggacgccaccgccgagtcgttcaacacctgggcggagaagaccagcttccagatcgggcgacagcctcttgttcgtgtaccccaaggacaaggactcggtgctgctggtggagccggccgactacaacgcctgcaacacctcctcctacgacaagcagttcgacgacggcagcacgtccgtggcgctggaccgcgccggcgccttcttcttcatcagcggcgtcgaggccaactgccgcgccaacgagaagctcatcgtcatggtcgccggcgcgggcgcgccggcgccggccccggaccggcagggctccggctcttcctcctccccgtcgacgtccgcgccggtaccctccaagggtggcggcgccccggtgccgccgtcctcgcctaaggcccccgccgccaagaactccacggccaagggcgcgcctcccgccgccggcaccgacaggaacggcgctggtgctggactcgccgtggcaggcctcgtcgcctcggttgcaggatgcgtcgcccacgccatgcttgctctctgaaaccgaaaactgctggatgcagtgcagtcgccgtgtagtgtaacaaaccgtgtgggattgtgaacagagtgtatctttcgtgttcgttgcgattcagcgggaaaaaacaaattt

SEQ ID NO: 12545 - protein, 239 aa, Zea mays subsp. mays
  peptide (1)..(239): Ceres Seq. ID no. 12372541
YPLWQQPSCRHGELILCTAGSGLLRAPGGGSRRHAVQGRRRQWLGRAGRHRRVVQHLGGEDQLPDRATASCSCTPRTRTRCCWWSRPTTTPATPPPTTSSSTTAARPWRWTAPAPSSSSAASRPTAAPTRSSSSWSPARARRRRPRTGRAPALPPPRRRPRRYPPRVAAPRCRRPRLRPPPPRTPRPRARLPPPAPTGTALVLDSPWQASSPRLQDASPTPCLLSETENCWMQCSRRVV

SEQ ID NO: 12546 - protein, 225 aa, Zea mays subsp. mays
  peptide (1)..(225): Ceres Seq. ID no. 12372542
ISVVAAAFVQAWRAHLVHCWVWPASCSWRRQPAPRSTRSAATMAGPCRTPPPSRSTPGRRRPASRSGDSLLFVYPKDKDSVLLVEPADYNACNTSSYDKQFDDGSTSVALDRAGAFFFISGVEANCRANEKLIVMVAGAGAPAPAPDRQGSGSSSSPSTSAPVPSKGGGAPVPPSSPKAPAAKNSTAKGAPPAAGTDRNGAGAGLAVAGLVASVAGCVAHAMLAL

SEQ ID NO: 12547 - protein, 183 aa, Zea mays subsp. mays
  peptide (1)..(183): Ceres Seq. ID no. 12372543
MAGPCRTPPPSRSTPGRRRPASRSGDSLLFVYPKDKDSVLLVEPADYNACNTSSYDKQFDDGSTSVALDRAGAFFFISGVEANCRANEKLIVMVAGAGAPAPAPDRQGSGSSSSPSTSAPVPSKGGGAPVPPSSPKAPAAKNSTAKGAPPAAGTDRNGAGAGLAVAGLVASVAGCVAHAMLAL

SEQ ID NO: 12548 - DNA, 646 bp, Zea mays subsp. mays
  misc_feature (1)..(646): Ceres Seq. ID no. 12483995
  misc_feature (1)..(646): Ortholog of  Ceres SEQ ID NO 14314198 as cited in SEQ ID NO 57472
  misc_feature (1)..(646): Ortholog of  Ceres SEQ ID NO 12783998 as cited in SEQ ID NO 61535
  misc_feature (1)..(646): Ortholog of  Ceres SEQ ID NO 15174264 as cited in SEQ ID NO 61877
ctacgcaacctcccactgcattctcgaattccgattcccaatccagcaaaccctaccagccttttgcaaactcagagagggacccgatggcacccaaggcggagaagaagccggcggcgaagaagcccgcagaggaggagcccgcggccccggcggagaaggctcccgctgggaagaagccgaaggcggagaagcggctcccggcgggaaaatccgccggcaaggaaggcggtgttgacaagaaggggcggaagaaggccaagaagagcgtggagacgtacaagatctacatcttcaaggtgctgaagcaggtgcacccggacatcggcatctcctccaaggccatgtccatcatgaactccttcatcaacgacatcttcgagaagctcgccggcgaggcggccaagctcgcccgttacaacaagaagcccaccatcacctcccgggagatccagacctccgtccgcctcgttctacccggcgagctcgccaagcacgccgtctcggagggcaccaaggccgtcaccaagttcacctcgtcctaagctcctttcgagtaggtccttaagcgccgtggcgccttttgactgtatggaatgtttgtcatctgaaagttgatctgagcagtgcaatatataattctggc

SEQ ID NO: 12549 - protein, 180 aa, Zea mays subsp. mays
  peptide (1)..(180): Ceres Seq. ID no. 12483996
TQPPTAFSNSDSQSSKPYQPFANSERDPMAPKAEKKPAAKKPAEEEPAAPAEKAPAGKKPKAEKRLPAGKSAGKEGGVDKKGRKKAKKSVETYKIYIFKVLKQVHPDIGISSKAMSIMNSFINDIFEKLAGEAAKLARYNKKPTITSREIQTSVRLVLPGELAKHAVSEGTKAVTKFTSS

SEQ ID NO: 12550 - protein, 152 aa, Zea mays subsp. mays
  peptide (1)..(152): Ceres Seq. ID no. 12483997
MAPKAEKKPAAKKPAEEEPAAPAEKAPAGKKPKAEKRLPAGKSAGKEGGVDKKGRKKAKKSVETYKIYIFKVLKQVHPDIGISSKAMSIMNSFINDIFEKLAGEAAKLARYNKKPTITSREIQTSVRLVLPGELAKHAVSEGTKAVTKFTSS

SEQ ID NO: 12551 - protein, 101 aa, Zea mays subsp. mays
  peptide (1)..(101): Ceres Seq. ID no. 12483998
LRNLPLHSRIPIPNPANPTSLLQTQRGTRWHPRRRRSRRRRSPQRRSPRPRRRRLPLGRSRRRRSGSRRENPPARKAVLTRRGGRRPRRAWRRTRSTSSRC

SEQ ID NO: 12552 - DNA, 1486 bp, Zea mays subsp. mays
  misc_feature (1)..(1486): Ceres Seq. ID no. 12411515
  misc_feature (1)..(1486): Ortholog of  Ceres SEQ ID NO 15176895 as cited in SEQ ID NO 54714
atccgctttcggcgccgtcgccactcgccaccatctccaccgcctcctctcgacaagcatcccctcccatacccatggcaactgaccgtctcctccaccttctccgagcgccgacaggctctccggctgccgccgccaccacccgcgcggcttgttggggtcgtccacggacgcagcgcgtcgacgtctggcagggtgctgcggggattcgccgcgcgtccgtgtcctgctcgagcactagctctggcgggcaggggggactaacatataaggatgcaggcgtggacatagacgccggcgccgagctcgtgcgccgcatcgccaggatggcacccgggattggcggcttcggcggtctctttccctacaatgacgattatcttgttgctagcaccgatggggtggggacaaagctgaagcttgctttcgaaactggtattcatgatacaatcggcattgacctggtggcaatgagcgtcaatgacattgtaactctaggtgcaaaaccattgttcttcctagattactatgcaacgagcaagcttgatgttgatcttgcagagaaggttatcaaggggattagggatgggtgcgaacaatcagattgtgctctcctaggaggggagacagcagaaatgcctggtttctatgcagagggtgaatatgatctaagtggttttgctgtgggtgttgtgaagaagaataaagtcattgatggaaaaagcattgttaagggagatgtacttataggtcttccttccagtggtgttcattctaacgggttctctcttgttagaagagtactggagaaaagtggactttctttggatgatcagctcccaagaaatgatggcataacaactacggttggtgaagctctaatggcaccaaccttcatctatgttaagcaggtgcttgagattattagcaaaggtggtgtgaaaggactagcccacatcactggtggtggctttactgacaatatcccaagagtattcccctctggatgcggggcaaaaatttttactgggtcatgggaaatacctccaatcttcagttggcttcaacaggctggaaacattgatgatgcagagatgcggcgaacattcaatatgggcattggaatggttcttgtggtaagtcgagagtcagcagacagaattattgaagacacccatggatccagtcctgcttatcgcattggagaggtgattgagggtgatggggttcagtatgtctgacctcgtatgccttttatagtggcttgagacttgttggtctgctctgcaaagcagcagagtttatgtaacaacataatcttgtggtgttaagttctgcaccactactcccgctagaaagtgaagggtaaccaaataattatttgattggatccacgggaacttctctaaaggcttaccagaggaggccattagggggaaatacagttgttgagaatttttcatggagagcggtattgttttcgttg

SEQ ID NO: 12553 - protein, 412 aa, Zea mays subsp. mays
  peptide (1)..(412): Ceres Seq. ID no. 12411516
PLSAPSPLATISTASSRQASPPIPMATDRLLHLLRAPTGSPAAAATTRAACWGRPRTQRVDVWQGAAGIRRASVSCSSTSSGGQGGLTYKDAGVDIDAGAELVRRIARMAPGIGGFGGLFPYNDDYLVASTDGVGTKLKLAFETGIHDTIGIDLVAMSVNDIVTLGAKPLFFLDYYATSKLDVDLAEKVIKGIRDGCEQSDCALLGGETAEMPGFYAEGEYDLSGFAVGVVKKNKVIDGKSIVKGDVLIGLPSSGVHSNGFSLVRRVLEKSGLSLDDQLPRNDGITTTVGEALMAPTFIYVKQVLEIISKGGVKGLAHITGGGFTDNIPRVFPSGCGAKIFTGSWEIPPIFSWLQQAGNIDDAEMRRTFNMGIGMVLVVSRESADRIIEDTHGSSPAYRIGEVIEGDGVQYV

SEQ ID NO: 12554 - protein, 388 aa, Zea mays subsp. mays
  peptide (1)..(388): Ceres Seq. ID no. 12411517
MATDRLLHLLRAPTGSPAAAATTRAACWGRPRTQRVDVWQGAAGIRRASVSCSSTSSGGQGGLTYKDAGVDIDAGAELVRRIARMAPGIGGFGGLFPYNDDYLVASTDGVGTKLKLAFETGIHDTIGIDLVAMSVNDIVTLGAKPLFFLDYYATSKLDVDLAEKVIKGIRDGCEQSDCALLGGETAEMPGFYAEGEYDLSGFAVGVVKKNKVIDGKSIVKGDVLIGLPSSGVHSNGFSLVRRVLEKSGLSLDDQLPRNDGITTTVGEALMAPTFIYVKQVLEIISKGGVKGLAHITGGGFTDNIPRVFPSGCGAKIFTGSWEIPPIFSWLQQAGNIDDAEMRRTFNMGIGMVLVVSRESADRIIEDTHGSSPAYRIGEVIEGDGVQYV

SEQ ID NO: 12555 - protein, 304 aa, Zea mays subsp. mays
  peptide (1)..(304): Ceres Seq. ID no. 12411518
MAPGIGGFGGLFPYNDDYLVASTDGVGTKLKLAFETGIHDTIGIDLVAMSVNDIVTLGAKPLFFLDYYATSKLDVDLAEKVIKGIRDGCEQSDCALLGGETAEMPGFYAEGEYDLSGFAVGVVKKNKVIDGKSIVKGDVLIGLPSSGVHSNGFSLVRRVLEKSGLSLDDQLPRNDGITTTVGEALMAPTFIYVKQVLEIISKGGVKGLAHITGGGFTDNIPRVFPSGCGAKIFTGSWEIPPIFSWLQQAGNIDDAEMRRTFNMGIGMVLVVSRESADRIIEDTHGSSPAYRIGEVIEGDGVQYV

SEQ ID NO: 12556 - DNA, 1971 bp, Zea mays subsp. mays
  misc_feature (1)..(1971): Ceres Seq. ID no. 13492793
  misc_feature (1)..(1971): Ortholog of  Ceres SEQ ID NO 14313228 as cited in SEQ ID NO 67057
attccacactaccccgcgctggactggagtcgagttgagctcacgctctcgcacactcgcactcccattcccactggccagattgatcttgcttcgctaatcatcctagatctccattcccgcccatgggatgcttccagtcgaaggtggcggggcccctgccgcccaacgacgccgccgctctccccgccgacaagcctgcagatcctgaggcggcgaatggcggcgccgacggggaaggcgacggtgacgacaaggaggctgtgaagcgcgcggtgccggtgttcagggagtttgctctggccgagctgcgcgccgccaccaagggattcagcgccgacctcatcgtctccgagagcggcgagaaggcgcccaacgccgtctaccgcggccgcctcgacggcgggcggctcatcgccgtcaagcgcttctcgcgcctctcctggcctgacccgcagcagttcctcgcggaggcggcgggcgttgggaaggtgcggcacaagcgcctcgtcaacctcattggctgctgcgccgagggtgacgagaggctgcttgtcgccgagtacatgcccaacgacaccctgtccaagcatctcttccactgggataagcagccgttaccatgggaaatgaggctgagggttgcatatttcattgcgcaagctctcgaccattgcaatgctgagaacaggaaaatctatcatgatttgaatgcttatagggtactttttgatgaggaaggtgatccccgcttgtcaagttttggattaatgaagaacagccgtgatgggaaaagttatagcactaacctggcttacactccaccagagtttctacgaactggcagagtaattccggagagtgtgatctatagctatggaactgtcctgttggatcttttgagcggaaaacacattcctcctagtcatgccctagatttaataaggggaaagaatatactgttgctgatggattcctccttagaagggcagtatgctaatgaagatgcttcgaaattggttgatcttgcatcaaagtgtctgcaatttgaatctagggatagaccgaacataaagtatcttctgtcttctgttggtcctcttcagaatcaaaaggaggttgcatcacatgtgttcatgggtattacaaaagccacatcagtactgccaaccatttgttctccactcagaaaggcctgcactggtatggatctttcagcggtgcatgatattttgctcaaaacaggttataaagatgatgagggtgcagaaaacgagctatcctttcaagaatggacccagcaagtgcaagagatgctgaacacaaagaagtttggtgacattgcatttagagacaaggattttaagactgcaattgactactactccaagctagttgcgatgatgtcgacgccttcagctacggtttttgtcaggcgcagtttttcctacttgatgaatgggcaagcagagctcgctctacgggacgcaatgcaagcccaggtctgcatgcccgagtggcctacggccttctacctccaggccctggctctttcaaagctcggcatggaaaccgatgcccaggacatgctcaacgatggcgccacgtttgaggccaagaagcagaacggctggcgcagttaggagccgacgacgaacaaagtctctcttccaacgactccgtgccgttgccctttgagagaagaaggtacaatggcgagtctcctccaaatcagttcactgggacacgcctgttgcactactagtagtgggattgaaacgcactgttttatcgtgcaatctcctctcgaatgtcggtaacgagtgatgatcatgatcaggggtggaaaaataggtcagggcctttgaacgcatagcgtactcttccgtgggttgcgctttgtgttgctggcgatggtggcaggatctgcctgattgttgcaactgcagttgtaattaaagggatgctctc

SEQ ID NO: 12557 - protein, 505 aa, Zea mays subsp. mays
  peptide (1)..(505): Ceres Seq. ID no. 13492794
MGCFQSKVAGPLPPNDAAALPADKPADPEAANGGADGEGDGDDKEAVKRAVPVFREFALAELRAATKGFSADLIVSESGEKAPNAVYRGRLDGGRLIAVKRFSRLSWPDPQQFLAEAAGVGKVRHKRLVNLIGCCAEGDERLLVAEYMPNDTLSKHLFHWDKQPLPWEMRLRVAYFIAQALDHCNAENRKIYHDLNAYRVLFDEEGDPRLSSFGLMKNSRDGKSYSTNLAYTPPEFLRTGRVIPESVIYSYGTVLLDLLSGKHIPPSHALDLIRGKNILLLMDSSLEGQYANEDASKLVDLASKCLQFESRDRPNIKYLLSSVGPLQNQKEVASHVFMGITKATSVLPTICSPLRKACTGMDLSAVHDILLKTGYKDDEGAENELSFQEWTQQVQEMLNTKKFGDIAFRDKDFKTAIDYYSKLVAMMSTPSATVFVRRSFSYLMNGQAELALRDAMQAQVCMPEWPTAFYLQALALSKLGMETDAQDMLNDGATFEAKKQNGWRS

SEQ ID NO: 12558 - protein, 358 aa, Zea mays subsp. mays
  peptide (1)..(358): Ceres Seq. ID no. 13492795
MPNDTLSKHLFHWDKQPLPWEMRLRVAYFIAQALDHCNAENRKIYHDLNAYRVLFDEEGDPRLSSFGLMKNSRDGKSYSTNLAYTPPEFLRTGRVIPESVIYSYGTVLLDLLSGKHIPPSHALDLIRGKNILLLMDSSLEGQYANEDASKLVDLASKCLQFESRDRPNIKYLLSSVGPLQNQKEVASHVFMGITKATSVLPTICSPLRKACTGMDLSAVHDILLKTGYKDDEGAENELSFQEWTQQVQEMLNTKKFGDIAFRDKDFKTAIDYYSKLVAMMSTPSATVFVRRSFSYLMNGQAELALRDAMQAQVCMPEWPTAFYLQALALSKLGMETDAQDMLNDGATFEAKKQNGWRS

SEQ ID NO: 12559 - protein, 337 aa, Zea mays subsp. mays
  peptide (1)..(337): Ceres Seq. ID no. 13492796
MRLRVAYFIAQALDHCNAENRKIYHDLNAYRVLFDEEGDPRLSSFGLMKNSRDGKSYSTNLAYTPPEFLRTGRVIPESVIYSYGTVLLDLLSGKHIPPSHALDLIRGKNILLLMDSSLEGQYANEDASKLVDLASKCLQFESRDRPNIKYLLSSVGPLQNQKEVASHVFMGITKATSVLPTICSPLRKACTGMDLSAVHDILLKTGYKDDEGAENELSFQEWTQQVQEMLNTKKFGDIAFRDKDFKTAIDYYSKLVAMMSTPSATVFVRRSFSYLMNGQAELALRDAMQAQVCMPEWPTAFYLQALALSKLGMETDAQDMLNDGATFEAKKQNGWRS

SEQ ID NO: 12560 - DNA, 1277 bp, Zea mays subsp. mays
  misc_feature (1)..(1277): Ceres Seq. ID no. 12411507
  misc_feature (1)..(1277): Ortholog of  Ceres SEQ ID NO 14309484 as cited in SEQ ID NO 52876
aatcgaaagggattgatatgttgtgtgaggcttgaaaagataagcatgggatgtcatcttggacttgggatagagataacagagtctgttagagggagaatcacggcgagagcgtgctcgtgggcacccctctccgtcaactggggtgcgcgatcgatcgatcgaaatatcgaactgcagttgccaaaaccccaatccggtcttctatttccgatcgagccgcaaaggaggcaggaagaaggccggcgcaggcgcaggcgcggatggcgatgggagcgacggttcgcgcggcggccgcggacgccgtggtgacgttcctgtgggtgctgtgcgcctccgcgctcggtgcctccacagcagccgtcacgtcgtacctgggggtgcaggagggcgccggccactacgcgctcctcgtcaccacgtccctcctctcggtgctcctcttcaccttcgatctcctctgcggtgcgctcggcggcgccagcttcaaccccaccgacttcgccgcctcctatgccgccggactcgacagcccctccctcttctcggttgcgctccgcttcccggcgcaggccgccggcgctgtgggcggcgccctggccatctcggagctgatgccggcgcagtataagcacacgctcgcgggcccctcactcaaggtggatccccacaccggtgccctagccgaaggggtgctcaccttcgtcatcaccctgaccgtgctctgggtcatcgtcaagggcccccgcaacgtcatcctcaagaccttgctgctctcaacctccatcgtctccgtcatcctcgcaggcgcagagtacacggggccgtctatgaacccagctaatgcatttggctgggcatatgttaacaattggcacaacacatgggagcagctgtatgtgtactggatatgcccctttattggggccatgcttgctggatggatatttagggtggtgttcctaccaccggcacctaagcccaagaccaagaaagcatgattactcgtttatggatgctggtttagaagaaataagaaatagaggaaggtcacataagctcatgtgttgtacttgatttcctcaacttcccacaaactgggtgttgtgctctgttacttatttctcatcaataatttatgtttacttgtaattttgggctagtcaggatgtgtttttgtccttttatttagtttttgtatgttttctttatgagtacagtaaaatcattgatctcaattgagatggaaatgagctgaggtcggctcggcttgctcc

SEQ ID NO: 12561 - protein, 245 aa, Zea mays subsp. mays
  peptide (1)..(245): Ceres Seq. ID no. 12411508
MAMGATVRAAAADAVVTFLWVLCASALGASTAAVTSYLGVQEGAGHYALLVTTSLLSVLLFTFDLLCGALGGASFNPTDFAASYAAGLDSPSLFSVALRFPAQAAGAVGGALAISELMPAQYKHTLAGPSLKVDPHTGALAEGVLTFVITLTVLWVIVKGPRNVILKTLLLSTSIVSVILAGAEYTGPSMNPANAFGWAYVNNWHNTWEQLYVYWICPFIGAMLAGWIFRVVFLPPAPKPKTKKA

SEQ ID NO: 12562 - protein, 243 aa, Zea mays subsp. mays
  peptide (1)..(243): Ceres Seq. ID no. 12411509
MGATVRAAAADAVVTFLWVLCASALGASTAAVTSYLGVQEGAGHYALLVTTSLLSVLLFTFDLLCGALGGASFNPTDFAASYAAGLDSPSLFSVALRFPAQAAGAVGGALAISELMPAQYKHTLAGPSLKVDPHTGALAEGVLTFVITLTVLWVIVKGPRNVILKTLLLSTSIVSVILAGAEYTGPSMNPANAFGWAYVNNWHNTWEQLYVYWICPFIGAMLAGWIFRVVFLPPAPKPKTKKA

SEQ ID NO: 12563 - protein, 128 aa, Zea mays subsp. mays
  peptide (1)..(128): Ceres Seq. ID no. 12411510
MPAQYKHTLAGPSLKVDPHTGALAEGVLTFVITLTVLWVIVKGPRNVILKTLLLSTSIVSVILAGAEYTGPSMNPANAFGWAYVNNWHNTWEQLYVYWICPFIGAMLAGWIFRVVFLPPAPKPKTKKA

SEQ ID NO: 12564 - DNA, 1217 bp, Zea mays subsp. mays
  misc_feature (1)..(1217): Ceres Seq. ID no. 12374035
  misc_feature (1)..(1217): Ortholog of  Ceres SEQ ID NO 12557497 as cited in SEQ ID NO 43
  misc_feature (1)..(1217): Ortholog of  Ceres SEQ ID NO 13600601 as cited in SEQ ID NO 497
  misc_feature (1)..(1217): Ortholog of  Ceres SEQ ID NO 13664283 as cited in SEQ ID NO 61283
  misc_feature (1)..(1217): Ortholog of  Ceres SEQ ID NO 12635513 as cited in SEQ ID NO 0
  misc_feature (1)..(1217): Ortholog of  Ceres SEQ ID NO 15179044 as cited in SEQ ID NO 0
  misc_feature (1)..(1217): Ortholog of  Ceres SEQ ID NO 15179333 as cited in SEQ ID NO 0
accgccaccacacagctcccacgctcaccgacgccacagcttgtgcgcgcgcaatggcactcgtgtccgcctcctcgtcctccaccaccgccgtcgcggcgctccccaggaatgggcagcagcgggcgtcgtcgtcgttgttctcctcctcctcctcttcctccttcctcgtcggcaagacgctgctgaggcaggccgaggcagcccggccgtcgttcgccgtgcgcgccgcggcggattccgacaggccgatctggttccccggcagcacccctccgccgtggctcgacggcagccttcccggcgacttcggctttgatccctggggcctcggatctgacccggagagcctgcggtggaacgtgcaggcggagctggtgcactgccggtgggcgatgctcggcgcggcgggtatcttcatcccggagttcctgaccaagatcggcgtcctcaacacgcccttctgggtacaccgccggcgagcagcagtacttcaccgacaccaccaccctcttcatcatcgagctcatcctcatcggctgggccgagggccgccgttgggctgacatcatcaagcccggaagcgtcaacaccgatcccatcttccccagcaacaagctcaccggcaccgacgtcgggtaccctggtggcctgtggtttgacccgctcggctggggctccggctcgccggagaagatcaaggagctgcgcaccaaggagatcaagaacggacgcctcgccatgctcgccgtcatgggcgcttggttccaggccgagtacaccggcaccggccccatcgacaacctcttcgcccacctcgccgaccctggccacgccaccatcttccaggccttcacccccaaatgaggagctctgatgaacttggcagttcgaggagtgctaccacacatgcatgcattgttaggtttgatggccgatatggaactttttctttttgttgggggcggactactgggtagactgtcaacgatgatgatgatgatgatgaaatgttcgtggtgcgatgcatggtgtacttgtactatgttgtaactaatgtaaaaatgcgatggtcgttagatgctatgtcctcttaattaaggcggacctacatgcaagtaaggatgcaaataagggtattcagtatttaattgaatactcattattttttgcaaaaaaatatgtatacatgtatatgttactagccagttgttcgg

SEQ ID NO: 12565 - protein, 187 aa, Zea mays subsp. mays
  peptide (1)..(187): Ceres Seq. ID no. 12374036
RHHTAPTLTDATACARAMALVSASSSSTTAVAALPRNGQQRASSSLFSSSSSSSFLVGKTLLRQAEAARPSFAVRAAADSDRPIWFPGSTPPPWLDGSLPGDFGFDPWGLGSDPESLRWNVQAELVHCRWAMLGAAGIFIPEFLTKIGVLNTPFWVHRRRAAVLHRHHHPLHHRAHPHRLGRGPPLG

SEQ ID NO: 12566 - protein, 170 aa, Zea mays subsp. mays
  peptide (1)..(170): Ceres Seq. ID no. 12374037
MALVSASSSSTTAVAALPRNGQQRASSSLFSSSSSSSFLVGKTLLRQAEAARPSFAVRAAADSDRPIWFPGSTPPPWLDGSLPGDFGFDPWGLGSDPESLRWNVQAELVHCRWAMLGAAGIFIPEFLTKIGVLNTPFWVHRRRAAVLHRHHHPLHHRAHPHRLGRGPPLG

SEQ ID NO: 12567 - protein, 105 aa, Zea mays subsp. mays
  peptide (1)..(105): Ceres Seq. ID no. 12374038
PPPHSSHAHRRHSLCARNGTRVRLLVLHHRRRGAPQEWAAAGVVVVVLLLLLFLLPRRQDAAEAGRGSPAVVRRARRGGFRQADLVPRQHPSAVARRQPSRRLRL

SEQ ID NO: 12568 - DNA, 1289 bp, Zea mays subsp. mays
  misc_feature (1)..(1289): Ceres Seq. ID no. 12411503
  misc_feature (1)..(1289): Ortholog of  Ceres SEQ ID NO 13502952 as cited in SEQ ID NO 62271
  misc_feature (1)..(1289): Ortholog of  Ceres SEQ ID NO 13502973 as cited in SEQ ID NO 68052
  misc_feature (1)..(1289): Ortholog of  Ceres SEQ ID NO 13596000 as cited in SEQ ID NO 68188
  misc_feature (1)..(1289): Ortholog of  Ceres SEQ ID NO 15179420 as cited in SEQ ID NO 0
gcgcctccgtgcatgcaccgttgccgatcgtcgtcctcctccccactccccagaggccaagccaaaggtccagcaatggcgaggtctccccggcttctcgcgctgctgctggctgtcgtctggatatgcggcgcggccctagtagcgcgtgccgacccgatgctcgagaggttcgagcagtggatgggcaggcacggccggctgtacgctgacgccggagagaagcagaggcggctcgaggtgtaccggaggaacgtcgagctggtcgagaccttcaactccatgggcaacgggtacaggctggccgacaacaagttcgccgacctgacgaacgaggagttcagggccaagatgctgggcttcggacggcctcgcagcggaggcggagccgggcactccacagcgccgagcaccgtggcttgtattggaagtggactgatgggtcgtcagggttattctgatctaccgaaaagcgtggactggcgagagaagggagctgtcgcgccggtgaagagccagggggactgtggctcttgctgggcgttctccgccgttgcggccatcgagggcatcaaccagatcaagaacgggaagctggtgtccctgtcggagcaggagctggtggactgcgacaccaaggccatcggctgcgccggcgggtacatgagctgggccttcgagttcgtcatgaagaaccgcggcctcaccaccgaacggaactacccgtatcaagggctgaacggcgcctgccagacgccgaagctgaaggagagcgcggtgagcatctccgggtacatgaacgtgacgcccagcagcgagccggacctcctgcgggccgccgcggcgcagccggtgtccgtggccgtggacgccggcagcttcgtgtggcagctctacggcggcggcgtcttcacgggaccctgcaccgccgagctgaaccacggcgtcacggtggtcgggtacggcgagacccagggggacacggacggcgacggtagcggcgtgcccgggaagaagtactggatcgtcaagaactcgtgggggcccgagtggggcgacgccggctacatcctcatgcaacgcgaagccagcgtcgcgtctggcctctgcggcatcgctatgctcccgagctacccggtcatgtgatccggcggctgccgccgtcgagacctacagctgcagctctaagaacaatcagtcattatgttggccatcttttgaacaaagggcgttcctctttcccgataagatgatgtcttatcttggcgatcgataaggttacagatagt

SEQ ID NO: 12569 - protein, 381 aa, Zea mays subsp. mays
  peptide (1)..(381): Ceres Seq. ID no. 12411504
APPCMHRCRSSSSSPLPRGQAKGPAMARSPRLLALLLAVVWICGAALVARADPMLERFEQWMGRHGRLYADAGEKQRRLEVYRRNVELVETFNSMGNGYRLADNKFADLTNEEFRAKMLGFGRPRSGGGAGHSTAPSTVACIGSGLMGRQGYSDLPKSVDWREKGAVAPVKSQGDCGSCWAFSAVAAIEGINQIKNGKLVSLSEQELVDCDTKAIGCAGGYMSWAFEFVMKNRGLTTERNYPYQGLNGACQTPKLKESAVSISGYMNVTPSSEPDLLRAAAAQPVSVAVDAGSFVWQLYGGGVFTGPCTAELNHGVTVVGYGETQGDTDGDGSGVPGKKYWIVKNSWGPEWGDAGYILMQREASVASGLCGIAMLPSYPVM

SEQ ID NO: 12570 - protein, 377 aa, Zea mays subsp. mays
  peptide (1)..(377): Ceres Seq. ID no. 12411505
MHRCRSSSSSPLPRGQAKGPAMARSPRLLALLLAVVWICGAALVARADPMLERFEQWMGRHGRLYADAGEKQRRLEVYRRNVELVETFNSMGNGYRLADNKFADLTNEEFRAKMLGFGRPRSGGGAGHSTAPSTVACIGSGLMGRQGYSDLPKSVDWREKGAVAPVKSQGDCGSCWAFSAVAAIEGINQIKNGKLVSLSEQELVDCDTKAIGCAGGYMSWAFEFVMKNRGLTTERNYPYQGLNGACQTPKLKESAVSISGYMNVTPSSEPDLLRAAAAQPVSVAVDAGSFVWQLYGGGVFTGPCTAELNHGVTVVGYGETQGDTDGDGSGVPGKKYWIVKNSWGPEWGDAGYILMQREASVASGLCGIAMLPSYPVM

SEQ ID NO: 12571 - protein, 356 aa, Zea mays subsp. mays
  peptide (1)..(356): Ceres Seq. ID no. 12411506
MARSPRLLALLLAVVWICGAALVARADPMLERFEQWMGRHGRLYADAGEKQRRLEVYRRNVELVETFNSMGNGYRLADNKFADLTNEEFRAKMLGFGRPRSGGGAGHSTAPSTVACIGSGLMGRQGYSDLPKSVDWREKGAVAPVKSQGDCGSCWAFSAVAAIEGINQIKNGKLVSLSEQELVDCDTKAIGCAGGYMSWAFEFVMKNRGLTTERNYPYQGLNGACQTPKLKESAVSISGYMNVTPSSEPDLLRAAAAQPVSVAVDAGSFVWQLYGGGVFTGPCTAELNHGVTVVGYGETQGDTDGDGSGVPGKKYWIVKNSWGPEWGDAGYILMQREASVASGLCGIAMLPSYPVM

SEQ ID NO: 12572 - DNA, 1825 bp, Zea mays subsp. mays
  misc_feature (1)..(1825): Ceres Seq. ID no. 12411499
  misc_feature (1)..(1825): Ortholog of  Ceres SEQ ID NO 12779893 as cited in SEQ ID NO 66238
gggtatatatatacggcgccggcgccgaggagagaggaccccggccgatcccgcacccctgactgtcagccgcgatccgctcttttttgcgtgcagcggcggagcaggagatatggcgtcggaggccaaggacgtgggcatcctcgccatggacatctacttcccgcccaactgcgtgctccaggaagagttggaaacacatgatggcgtgagcaaagggaagtataccattgggcttgggcaggaaagtatggcattttgcactgaagttgaggatgttatttcgatgagcttgacagcggtgaagtccctcctgaaaaattataacattgacccaaagtgcattggacgtttggaagttggcagtgaaaccgtaatagacaagagcaagtctataaagacatggctgatgcagatatttgaggaatctggcaatactgatattgaaggagttgactcctcgaatgcatgttatggtggaacagctgcattgtttaattgtgttaactgggttgaaagcaagtcatgggatggtcgctatggacttgttgtttgcacagacagtgcggtttacgctgaaggtccggctcgccctactggtggtgcggctgctattgcaatgctgattggaccaaatgctcctatttgttttgaaagtaaatatagaggatctcatatggcccatgtatacgacttttacaagcccgatcttgcgagtgaatatccggtggttgatgggaagctatcacaaacatgctacctcatggcattggactcctgctacaatctattttgcaaaaagtatgaaaaacatgaggggaagcagttttcaatttctgatgcagattatgttgtgttccattctccatacaacaagcttgtacagaaaagcttcgctcgtttgtactacaatgatttcttgagaaactgcagcacggttgatggagagtcaagggaaaaattggcaccctatgcaggcttgtcatctgaagaaagctaccagagtcgcgaccttgaaaaggcatctcagcaagtcgcaaagaatctgtacgagtccaaggttcagccaacaacattgatcccaaaacaagttgggaatatgtatacagcatcactctacgcagctcttgcatcggttgtccacagtagacatgaaactctggcaggccagaggattgttatgttttcgtatggcagtgggttgacatcaacgatgttctctttcatgattaatgaaggccatcaccctttcagtctgctaaacatcgcaaacatactggatatttccaagaaactgaaggcaaggcacgtggttcccccagagaaatttgtggaggcactaaaactgatggagcaccgctatggggcaagagatttcgtgacgagtcaagatacaagtctgctacccgcaggcacatactatctcacgcacgttgactccaagtacagaaggttctacgacgtgaaaggtgacggtgtcgccactgcaatgtccaacggccactgatctttcttctgcccgaagctgcaacaagtcaaataacagaggcaagtgtcctaagcatccttagatgattatatctattaggaggggaagctggagttatagattaatctctgcccagctgtaaggttgtaaagttagttagagctgcgcatgcatgcttgtttagtaaaagctctgctgctcttcagttatttagcgaatcaagcacactgctgggctataagaattgtaaacaataatctgcagaatcactggctacatccaggctatgctgatgaatgcacgatttcatgtttagcacgatcaatgcatctggct

SEQ ID NO: 12573 - protein, 501 aa, Zea mays subsp. mays
  peptide (1)..(501): Ceres Seq. ID no. 12411500
GIYIRRRRRGERTPADPAPLTVSRDPLFFACSGGAGDMASEAKDVGILAMDIYFPPNCVLQEELETHDGVSKGKYTIGLGQESMAFCTEVEDVISMSLTAVKSLLKNYNIDPKCIGRLEVGSETVIDKSKSIKTWLMQIFEESGNTDIEGVDSSNACYGGTAALFNCVNWVESKSWDGRYGLVVCTDSAVYAEGPARPTGGAAAIAMLIGPNAPICFESKYRGSHMAHVYDFYKPDLASEYPVVDGKLSQTCYLMALDSCYNLFCKKYEKHEGKQFSISDADYVVFHSPYNKLVQKSFARLYYNDFLRNCSTVDGESREKLAPYAGLSSEESYQSRDLEKASQQVAKNLYESKVQPTTLIPKQVGNMYTASLYAALASVVHSRHETLAGQRIVMFSYGSGLTSTMFSFMINEGHHPFSLLNIANILDISKKLKARHVVPPEKFVEALKLMEHRYGARDFVTSQDTSLLPAGTYYLTHVDSKYRRFYDVKGDGVATAMSNGH

SEQ ID NO: 12574 - protein, 464 aa, Zea mays subsp. mays
  peptide (1)..(464): Ceres Seq. ID no. 12411501
MASEAKDVGILAMDIYFPPNCVLQEELETHDGVSKGKYTIGLGQESMAFCTEVEDVISMSLTAVKSLLKNYNIDPKCIGRLEVGSETVIDKSKSIKTWLMQIFEESGNTDIEGVDSSNACYGGTAALFNCVNWVESKSWDGRYGLVVCTDSAVYAEGPARPTGGAAAIAMLIGPNAPICFESKYRGSHMAHVYDFYKPDLASEYPVVDGKLSQTCYLMALDSCYNLFCKKYEKHEGKQFSISDADYVVFHSPYNKLVQKSFARLYYNDFLRNCSTVDGESREKLAPYAGLSSEESYQSRDLEKASQQVAKNLYESKVQPTTLIPKQVGNMYTASLYAALASVVHSRHETLAGQRIVMFSYGSGLTSTMFSFMINEGHHPFSLLNIANILDISKKLKARHVVPPEKFVEALKLMEHRYGARDFVTSQDTSLLPAGTYYLTHVDSKYRRFYDVKGDGVATAMSNGH

SEQ ID NO: 12575 - protein, 452 aa, Zea mays subsp. mays
  peptide (1)..(452): Ceres Seq. ID no. 12411502
MDIYFPPNCVLQEELETHDGVSKGKYTIGLGQESMAFCTEVEDVISMSLTAVKSLLKNYNIDPKCIGRLEVGSETVIDKSKSIKTWLMQIFEESGNTDIEGVDSSNACYGGTAALFNCVNWVESKSWDGRYGLVVCTDSAVYAEGPARPTGGAAAIAMLIGPNAPICFESKYRGSHMAHVYDFYKPDLASEYPVVDGKLSQTCYLMALDSCYNLFCKKYEKHEGKQFSISDADYVVFHSPYNKLVQKSFARLYYNDFLRNCSTVDGESREKLAPYAGLSSEESYQSRDLEKASQQVAKNLYESKVQPTTLIPKQVGNMYTASLYAALASVVHSRHETLAGQRIVMFSYGSGLTSTMFSFMINEGHHPFSLLNIANILDISKKLKARHVVPPEKFVEALKLMEHRYGARDFVTSQDTSLLPAGTYYLTHVDSKYRRFYDVKGDGVATAMSNGH

SEQ ID NO: 12576 - DNA, 1318 bp, Zea mays subsp. mays
  misc_feature (1)..(1318): Ceres Seq. ID no. 12342388
  misc_feature (1)..(1318): Ortholog of  Ceres SEQ ID NO 12611212 as cited in SEQ ID NO 56066
  misc_feature (1)..(1318): Ortholog of  Ceres SEQ ID NO 15178576 as cited in SEQ ID NO 64133
agatagggctgttttgcagcggtggcccaaaacatgcagaaaggctgcaagggccgaatttttttccaaatcgttccttctacacactgtcgaggagggcagcgggaagggacgagtcgacgccggtgtgcggtggcggcggtcgcgcggtaacgtttcccttcagcttcgatcatgttggtggcggcgccggccacaaaaggctcacccaccaaggatttgacggctgtcgagcccggggacgagggcatgcccttagtcgtgagaggtgacaggaaacttgttcatagtcgttttcgctaccgtaggtggcgcagtcggtgttcgacgcagggggagctatgggttcggtctcggtttgtcaggcgaatggcaaccaccagccgccgccgccgcaggcagaagcggagcaggtcgtcgaggatggcgttgccgtcgacaggatcaatggcaactaccagccgctggagctggtggctgaggcggggcaggtcgtcgaggagggcgatgccggcgtgaccatggaaggcgtcgcttccatcgccttgctgcctaccggtgccatctccggccatttcattcgcctccctgactccatctgctacgggctacacggcaccccaatatcttgcgagagggaatgtagccgaggagaggactaccgccttataaagctcaccatcattgattttaagagcaagagagagaaggtgcttgtggtggaatgcaggggccatgatgctgctcgattacaaaacattgaccatttgcatgggtgggaagatgacattgttggtttggttgagaaggagcacggaaatcagaaagtcttgctctcctttgaatgcgagacgctgaaggctgataaagacgcggaagatcatattgccaaatatatgccaaatctgtgtggactggacgcagttgtaaatatagggaaaatgagcatctcaggcatcaatctcgacgaggacgccgaaccaagaggggacaactgagcgtgtgaacagtggtcattgttcatcagcactggtaaactctgcacgaatcacatcaaacgcttacactgcactacatatggcagtttgatacgtgtctcattaccagtgcctgtacttaaaattctgtggctgtgaatcggattcaaaaccctttatacgtttcaactttcaagttaccacgtcgcttcttgcacgaatcccaagggtcggttgctcctgctgggtgcatttcttgtctgtggcggtactgtttgtcacgctttgtacgtatgactagcattgcttgtctgtttatgagagtggtgctgtgtttcgcc

SEQ ID NO: 12577 - protein, 218 aa, Zea mays subsp. mays
  peptide (1)..(218): Ceres Seq. ID no. 12342389
MGSVSVCQANGNHQPPPPQAEAEQVVEDGVAVDRINGNYQPLELVAEAGQVVEEGDAGVTMEGVASIALLPTGAISGHFIRLPDSICYGLHGTPISCERECSRGEDYRLIKLTIIDFKSKREKVLVVECRGHDAARLQNIDHLHGWEDDIVGLVEKEHGNQKVLLSFECETLKADKDAEDHIAKYMPNLCGLDAVVNIGKMSISGINLDEDAEPRGDN

SEQ ID NO: 12578 - protein, 158 aa, Zea mays subsp. mays
  peptide (1)..(158): Ceres Seq. ID no. 12342390
MEGVASIALLPTGAISGHFIRLPDSICYGLHGTPISCERECSRGEDYRLIKLTIIDFKSKREKVLVVECRGHDAARLQNIDHLHGWEDDIVGLVEKEHGNQKVLLSFECETLKADKDAEDHIAKYMPNLCGLDAVVNIGKMSISGINLDEDAEPRGDN

SEQ ID NO: 12579 - protein, 114 aa, Zea mays subsp. mays
  peptide (1)..(114): Ceres Seq. ID no. 12342391
MLVAAPATKGSPTKDLTAVEPGDEGMPLVVRGDRKLVHSRFRYRRWRSRCSTQGELWVRSRFVRRMATTSRRRRRQKRSRSSRMALPSTGSMATTSRWSWWLRRGRSSRRAMPA

SEQ ID NO: 12580 - DNA, 1407 bp, Zea mays subsp. mays
  misc_feature (1)..(1407): Ceres Seq. ID no. 12411495
  misc_feature (1)..(1407): Ortholog of  Ceres SEQ ID NO 15177854 as cited in SEQ ID NO 51851
  misc_feature (1)..(1407): Ortholog of  Ceres SEQ ID NO 15177087 as cited in SEQ ID NO 51932
  misc_feature (1)..(1407): Ortholog of  Ceres SEQ ID NO 13662937 as cited in SEQ ID NO 64415
  misc_feature (1)..(1407): Ortholog of  Ceres SEQ ID NO 13595984 as cited in SEQ ID NO 68340
  misc_feature (1)..(1407): Ortholog of  Ceres SEQ ID NO 12635014 as cited in SEQ ID NO 0
gttctcttctctccctcctcctatagttggcttctcgcaaccctctgctttcgatcagctttctccgctccccatttccctctccaactccaatccatggcctccacggatcgctccacgccggcggaggacgagcaacagcagaagcgcccgtctctcttctcgccgtaccagatgccccgcttccgcctcgcccaccgggtggtgctggcgccgatgaccaggtgcagggcgcccgacgcggtcccaggccccgcgctcgcggagtactacgcgcagcggtccacggacggcggcttgctcatctccgagggcaccatcatctcgccgtccggccctgggttccctcgtgtccctgggatatacaatcaagaacagactgatgcatggagaaaggtggttgatgctgttcatgccaagggagctatctttttctgccaactatggcatgtaggccgagcttctcaccaagtatatcagccgggtgctgctgctccgatatcctcaactgataagccaatatcatcaagatggaggatactgatgcccgatggatcctatggcaagtatccaactccgaggcgcctagccacatccgagataccagaaattgttgagcaataccgtcaagcagccgtaaacgccatcaaagcaggtttcgatggcatcgagatccatggcgcccatggctacctcatcgatcagttcctcaagggcggtatcaacgaccggactgacgagtacggtggctcactctccaaccgttgccggttcctcctggaggtgacccgagccgtggtctctgcgataggggcagaccgcgtcgcggtccgagtgtccccggccatcgaccatctcgacgcctacgactccaaccccctgcagctcggcctggccgtggtggagcgtctcaacgctctccagcaggaggccgggcggctggcctacctccacgtgacgcagccacggtacacggcgtacgggcagacagagtctggccagcacgggagtgccgaggaggagagccggctgatgcgtgccgtgcgaggtgcctaccgtggcacgttcatgtgcagcggtgggtacacgcgggagctcggggtcgaggccatcgagtccggggacgctgacctggtgtcctacgggcggctgttcatcgctaatcccgacctggtggagcggtttcggcgcgacgccccgctgaacaaatacgtgcgcaagacgttctacacgccggaccccgtcgtcggttacacggactacacattcctcggccagcctaaggcacgcatgtgatttgattattagtgcgttgccgtaattataagaggcggagtattgtttgtatgttgtgacttgagaaaacaagcaaacatctgggtaatgccgcgattgttacgtattcct

SEQ ID NO: 12581 - protein, 431 aa, Zea mays subsp. mays
  peptide (1)..(431): Ceres Seq. ID no. 12411496
VLFSPSSYSWLLATLCFRSAFSAPHFPLQLQSMASTDRSTPAEDEQQQKRPSLFSPYQMPRFRLAHRVVLAPMTRCRAPDAVPGPALAEYYAQRSTDGGLLISEGTIISPSGPGFPRVPGIYNQEQTDAWRKVVDAVHAKGAIFFCQLWHVGRASHQVYQPGAAAPISSTDKPISSRWRILMPDGSYGKYPTPRRLATSEIPEIVEQYRQAAVNAIKAGFDGIEIHGAHGYLIDQFLKGGINDRTDEYGGSLSNRCRFLLEVTRAVVSAIGADRVAVRVSPAIDHLDAYDSNPLQLGLAVVERLNALQQEAGRLAYLHVTQPRYTAYGQTESGQHGSAEEESRLMRAVRGAYRGTFMCSGGYTRELGVEAIESGDADLVSYGRLFIANPDLVERFRRDAPLNKYVRKTFYTPDPVVGYTDYTFLGQPKARM

SEQ ID NO: 12582 - protein, 399 aa, Zea mays subsp. mays
  peptide (1)..(399): Ceres Seq. ID no. 12411497
MASTDRSTPAEDEQQQKRPSLFSPYQMPRFRLAHRVVLAPMTRCRAPDAVPGPALAEYYAQRSTDGGLLISEGTIISPSGPGFPRVPGIYNQEQTDAWRKVVDAVHAKGAIFFCQLWHVGRASHQVYQPGAAAPISSTDKPISSRWRILMPDGSYGKYPTPRRLATSEIPEIVEQYRQAAVNAIKAGFDGIEIHGAHGYLIDQFLKGGINDRTDEYGGSLSNRCRFLLEVTRAVVSAIGADRVAVRVSPAIDHLDAYDSNPLQLGLAVVERLNALQQEAGRLAYLHVTQPRYTAYGQTESGQHGSAEEESRLMRAVRGAYRGTFMCSGGYTRELGVEAIESGDADLVSYGRLFIANPDLVERFRRDAPLNKYVRKTFYTPDPVVGYTDYTFLGQPKARM

SEQ ID NO: 12583 - protein, 373 aa, Zea mays subsp. mays
  peptide (1)..(373): Ceres Seq. ID no. 12411498
MPRFRLAHRVVLAPMTRCRAPDAVPGPALAEYYAQRSTDGGLLISEGTIISPSGPGFPRVPGIYNQEQTDAWRKVVDAVHAKGAIFFCQLWHVGRASHQVYQPGAAAPISSTDKPISSRWRILMPDGSYGKYPTPRRLATSEIPEIVEQYRQAAVNAIKAGFDGIEIHGAHGYLIDQFLKGGINDRTDEYGGSLSNRCRFLLEVTRAVVSAIGADRVAVRVSPAIDHLDAYDSNPLQLGLAVVERLNALQQEAGRLAYLHVTQPRYTAYGQTESGQHGSAEEESRLMRAVRGAYRGTFMCSGGYTRELGVEAIESGDADLVSYGRLFIANPDLVERFRRDAPLNKYVRKTFYTPDPVVGYTDYTFLGQPKARM

SEQ ID NO: 12584 - DNA, 1161 bp, Zea mays subsp. mays
  misc_feature (1)..(1161): Ceres Seq. ID no. 12348889
  misc_feature (1)..(1161): Ortholog of  Ceres SEQ ID NO 12609902 as cited in SEQ ID NO 51816
actgctccctctggcttcccgcctcctcttcggctccttcgcgtcccgacgccccctcatggccaccgccgccgccaccgtagcagcagcagtctcctccccggctgccccacgcgccggggccgccgccgcctcccgccgggggttcgtcacgtttggtggaggcgccgcccgcttctctcccacgctgcggtccggccgtgggttctctggtgtgcaaacccatgttgccgctgttgaacaagcaattgtaaaagatgctaccaagctggaagctccagttgttgttgttacaggtgcatctagagggattggtaaggcaactgctctagcccttggaaaagcaggatgcaaggttctggtaaactatgccctgtcctcgaaagaggctgaagaggtctccaaagagattgaagcatctggtggtgaggctatcaccttcggaggagatgtttcaaaagaagctgatgtagagtctatgatgaaagcagctctagataaatggggaacaatagatgtgctggtaaataatgcagggattacacgagacgcattgttgatgaggatgaagaaatctcagtggcaagacgtaattgatctgaatcttactggtgtcttcctttgtacacaggctgcaacaaaagtaatgatgaaaaagagaaagggaaaaattatcaacattgcatctgtagttggtcttactggcaatgttggccaagctaattatagcgcagccaaggctggagtgattggtttcacaaaaacagttgccagggagtatgcaagcagaaatatcaatgtgaatgctattgcaccagggttcattgcatctgatatgactgccgaacttggagaagagcttgagaagaaaatcttgtcaaccattccgttagggagatatggccaaccagaggaagttgcagggttggtcgagttcctggcccttaaccccgcagctagctatatgactggacaggtgcttacaattgacggagggatggtaatgtaagatttgagttagcttgatgcacttctacttttgctgagcatttaatgttgaacacccttgttgtgcacgggcgattttggacaacaaattagtgttgtctctttctttgtaatactctctggtaataaatctagcatgtggaatggaagttg

SEQ ID NO: 12585 - protein, 335 aa, Zea mays subsp. mays
  peptide (1)..(335): Ceres Seq. ID no. 12348890
LLPLASRLLFGSFASRRPLMATAAATVAAAVSSPAAPRAGAAAASRRGFVTFGGGAARFSPTLRSGRGFSGVQTHVAAVEQAIVKDATKLEAPVVVVTGASRGIGKATALALGKAGCKVLVNYALSSKEAEEVSKEIEASGGEAITFGGDVSKEADVESMMKAALDKWGTIDVLVNNAGITRDALLMRMKKSQWQDVIDLNLTGVFLCTQAATKVMMKKRKGKIINIASVVGLTGNVGQANYSAAKAGVIGFTKTVAREYASRNINVNAIAPGFIASDMTAELGEELEKKILSTIPLGRYGQPEEVAGLVEFLALNPAASYMTGQVLTIDGGMVM

SEQ ID NO: 12586 - protein, 316 aa, Zea mays subsp. mays
  peptide (1)..(316): Ceres Seq. ID no. 12348891
MATAAATVAAAVSSPAAPRAGAAAASRRGFVTFGGGAARFSPTLRSGRGFSGVQTHVAAVEQAIVKDATKLEAPVVVVTGASRGIGKATALALGKAGCKVLVNYALSSKEAEEVSKEIEASGGEAITFGGDVSKEADVESMMKAALDKWGTIDVLVNNAGITRDALLMRMKKSQWQDVIDLNLTGVFLCTQAATKVMMKKRKGKIINIASVVGLTGNVGQANYSAAKAGVIGFTKTVAREYASRNINVNAIAPGFIASDMTAELGEELEKKILSTIPLGRYGQPEEVAGLVEFLALNPAASYMTGQVLTIDGGMVM

SEQ ID NO: 12587 - protein, 176 aa, Zea mays subsp. mays
  peptide (1)..(176): Ceres Seq. ID no. 12348892
MMKAALDKWGTIDVLVNNAGITRDALLMRMKKSQWQDVIDLNLTGVFLCTQAATKVMMKKRKGKIINIASVVGLTGNVGQANYSAAKAGVIGFTKTVAREYASRNINVNAIAPGFIASDMTAELGEELEKKILSTIPLGRYGQPEEVAGLVEFLALNPAASYMTGQVLTIDGGMVM

SEQ ID NO: 12588 - DNA, 1239 bp, Zea mays subsp. mays
  misc_feature (1)..(1239): Ceres Seq. ID no. 12364583
  misc_feature (1)..(1239): Ortholog of  Ceres SEQ ID NO 13639236 as cited in SEQ ID NO 56720
  misc_feature (1)..(1239): Ortholog of  Ceres SEQ ID NO 12619999 as cited in SEQ ID NO 66123
  misc_feature (1)..(1239): Ortholog of  Ceres SEQ ID NO 13656436 as cited in SEQ ID NO 69154
gcacgagaccattacctagaacatcctaatcgaaaagtcctcctcgttgttttgttccgtttccccccttgcctcgctcgtcgcgtacagctggacgcctcctttctcgctgcgggctgttgccttgcctccgtcccctcccctcgtcgcctccgactccacctcccctccccggtctctgagagagggagcccggacccggagaccgccagcaagcgcgaggcagaggaggagcatggcggccccgccgtcgaggtcgcggggcgactgaccacctgattaagctcctgctcatcggcgacagcggagttggaaagagttgcttgctgctgcggttctctgatgacacattcacgacaagttttatcaccaccatcggcattgatttcaaggttaggacggtcgagctcgatggaaagcgtgtaaaattacaaatttgggacactgctggtcaagaacgtttccgaacaattaccactgcttactacagaggagctatgggcattctgcttgtatacgatgtcacagacgaatcgtccttcgataacattaggaactggattcgcaacatagagcagcacgcatctgataatgtcaacaagatcttggtgggcaacaaggtcgatatggatgcgaagcgggtggtctccacagctcaaggtcagaagctcgcagatgaatacgggatcaagtttttcgagacgagtgcgaaaacgaaccgaaatgtggagcaggtattcttcgccatggcaagggacgtgaagcaaaggctcaccgagaccgttgccgctgcggctgagcccccgaccattcagattagcaggccagaccccgaccaggctgacgcagcctcctcgcggcggtggtcgtcgtcctgctgtaacacctgatctggcgactgccgtggcgaaatcaagcagcgtgaatcttgatgcgcgtgactggactgctaggttactgattgtcgcctgtgttcactttcattccggtgccgtgccaagccaagccgggatgtataaatttcgctgtctagtattcacctcaatcaatgtgttaactcccgctgcttcgcacgtcacgtcgtttgtttgttgagagcaaaacgtgtgtggggcagataaaaaaaaaagccctggtgggtttgctcctgtcacgtactaaacagaacgtgtctgatgattgtgtcgacggtggaacttggaagcgtgcttgtctcactattgttccgtgttttcgtcc

SEQ ID NO: 12589 - protein, 130 aa, Zea mays subsp. mays
  peptide (1)..(130): Ceres Seq. ID no. 12364584
MGILLVYDVTDESSFDNIRNWIRNIEQHASDNVNKILVGNKVDMDAKRVVSTAQGQKLADEYGIKFFETSAKTNRNVEQVFFAMARDVKQRLTETVAAAAEPPTIQISRPDPDQADAASSRRWSSSCCNT

SEQ ID NO: 12590 - protein, 92 aa, Zea mays subsp. mays
  peptide (1)..(92): Ceres Seq. ID no. 12364585
ARDHYLEHPNRKVLLVVLFRFPPCLARRVQLDASFLAAGCCLASVPSPRRLRLHLPSPVSERGSPDPETASKREAEEEHGGPAVEVAGRLTT

SEQ ID NO: 12591 - protein, 87 aa, Zea mays subsp. mays
  peptide (1)..(87): Ceres Seq. ID no. 12364586
MDAKRVVSTAQGQKLADEYGIKFFETSAKTNRNVEQVFFAMARDVKQRLTETVAAAAEPPTIQISRPDPDQADAASSRRWSSSCCNT

SEQ ID NO: 12592 - DNA, 1854 bp, Zea mays subsp. mays
  misc_feature (1)..(1854): Ceres Seq. ID no. 12368044
  misc_feature (1)..(1854): Ortholog of  Ceres SEQ ID NO 14315241 as cited in SEQ ID NO 52516
  misc_feature (1)..(1854): Ortholog of  Ceres SEQ ID NO 15176457 as cited in SEQ ID NO 55547
  misc_feature (1)..(1854): Ortholog of  Ceres SEQ ID NO 13594349 as cited in SEQ ID NO 58161
  misc_feature (1)..(1854): Ortholog of  Ceres SEQ ID NO 13663419 as cited in SEQ ID NO 66561
  misc_feature (1)..(1854): Ortholog of  Ceres SEQ ID NO 15177892 as cited in SEQ ID NO 0
ccattacctagaacatcctaatcgaaaacatcctaatcgaaaactaacctcgcgccggagtcgtcgcccacgatggcctaccgatccgcagtgctcttgcccgccctcctactggccgtcgccgtcgtcgtggcctccgccgccgccggggacgggaggtggcgggaggagcaggcgcgggaccgggtgccgcgggtgccggggcaggccttcaacaccagcttcgcgcagtacgccgggtacgtgaccgtcagcgagcagcgcggcgctgcgctcttctactggttctttgaggccgagaaggacccggggtccaagcccctcgtgctctggctcaacggagggcctggatgctcgtccattgcttttggacttggagaagaagtaggacctttccatgttaacgcagatgggaagggggtccatgtcaatccttattcttggaacaaagttgcaaatttactgttccttgattcacctgttggtgttggttactcatattcaaacacctctgatgatgctttaaaaaatggggatgcaagaactgccacggattcattggcattcttactgaagtggcttgaacgctttcctcaatacaaggaacgcgaattttatttgacaggggagagttatgctggtcactatgttcctcaactggctcaagccataaaaaggcaccatgaggctactggtgacaaatcaattaatctaaagggctatatggtagggaatgctctcactgatgatttccatgaccactatggaatatttcaattcatgtggactactggcctgatctctgatcaaacatacaagctgctgaatgttttctgtgactacgagtccttcgtgcattcgtctccacagtgtgataagattatggatattgctagcactgaagctggaaacattgattcatatagcatctttcacacctacatgtcatgcatcttttgcctcttcaaagaacaaagtgatgaaaaggctacattctgctggaaaaatgggagaacagtatgatccatgcactgagaagcattcaactgtatacttcaatctagctgaggttcagaaggcacttcatgttaatacagtcattggaaaatcaaaatgggagacttgcagtgaagctgttaatactcattggggggattgcgaaagatctgtgctgcatatctatcatgaacttatacagtatggcctccgtatatgggtgttcagtggagatacagatgcagtgattccagtgacttcaactagatacagcatcgatgctctcaagcttccaacaataactccatggcatgcttggtacgacgatgacggtgaggtcggtggatggacccaagggtacaggggactcaattttgtgaccgtgaggggagcaggtcacgaagtccctcttcatcgacccaaacaggccctcacgctaatcaaatcgttcttgactgggagcccaatgcctgtgcaatccagcacacacagcaacatgtaatccgtgttgttgcaactgattcacgagatgaatgaacatcccgaagcacccaagtcagccagttgtccaacccggcttgttctgcaacttgctgtagttgtttatgtatcagagctaccggtgccggttaccgcagcagccgtgcttttgtcggccctgttggtgcttgttgcagtaccagttatcccctaaggcaggggacagaaactgcggaatagtttttgtttgcattgacgtgacagcactgtaatcttaaacatcgtaccatagtcctttctatgacaaaggtgtggtttctgatgtctgcaataaatgatctggacttggggggtaaaaatgaaatactnctgtgttgc

SEQ ID NO: 12593 - protein, 316 aa, Zea mays subsp. mays
  peptide (1)..(316): Ceres Seq. ID no. 12368045
MAYRSAVLLPALLLAVAVVVASAAAGDGRWREEQARDRVPRVPGQAFNTSFAQYAGYVTVSEQRGAALFYWFFEAEKDPGSKPLVLWLNGGPGCSSIAFGLGEEVGPFHVNADGKGVHVNPYSWNKVANLLFLDSPVGVGYSYSNTSDDALKNGDARTATDSLAFLLKWLERFPQYKEREFYLTGESYAGHYVPQLAQAIKRHHEATGDKSINLKGYMVGNALTDDFHDHYGIFQFMWTTGLISDQTYKLLNVFCDYESFVHSSPQCDKIMDIASTEAGNIDSYSIFHTYMSCIFCLFKEQSDEKATFCWKNGRTV

SEQ ID NO: 12594 - protein, 223 aa, Zea mays subsp. mays
  peptide (1)..(223): Ceres Seq. ID no. 12368046
MFSVTTSPSCIRLHSVIRLWILLALKLETLIHIASFTPTCHASFASSKNKVMKRLHSAGKMGEQYDPCTEKHSTVYFNLAEVQKALHVNTVIGKSKWETCSEAVNTHWGDCERSVLHIYHELIQYGLRIWVFSGDTDAVIPVTSTRYSIDALKLPTITPWHAWYDDDGEVGGWTQGYRGLNFVTVRGAGHEVPLHRPKQALTLIKSFLTGSPMPVQSSTHSNM

SEQ ID NO: 12595 - protein, 172 aa, Zea mays subsp. mays
  peptide (1)..(172): Ceres Seq. ID no. 12368047
MKRLHSAGKMGEQYDPCTEKHSTVYFNLAEVQKALHVNTVIGKSKWETCSEAVNTHWGDCERSVLHIYHELIQYGLRIWVFSGDTDAVIPVTSTRYSIDALKLPTITPWHAWYDDDGEVGGWTQGYRGLNFVTVRGAGHEVPLHRPKQALTLIKSFLTGSPMPVQSSTHSNM

SEQ ID NO: 12596 - DNA, 1486 bp, Zea mays subsp. mays
  misc_feature (1)..(1486): Ceres Seq. ID no. 13573960
  misc_feature (1)..(1486): Ortholog of  Ceres SEQ ID NO 14310524 as cited in SEQ ID NO 58840
  misc_feature (1)..(1486): Ortholog of  Ceres SEQ ID NO 15169541 as cited in SEQ ID NO 67500
agccgtggcgaaagcacacacggatcaatcacactcactcgcggccattgtcctgcccgtgcgtgctctgccttttcaggcgatcgaccaaccaacttctcgtcactgccatggctctgctctccgacctcatcaacctcgacctctcgggccgcaccgggaagatcatcgccgagtacatctgggttggcggttccgggatggacgtcaggagcaaagccaggacgctgtccggacctgttgatgaccccagcaagcttccgaagtggaacttcgacggctccagcaccggccaagctccgggcgacgacagcgaagtcatcctttgccctcgggccatcttcagggacccgttcaggaaggggcagaacatactggtcatgtgcgactgctacgagccgaacggggagccgatcccgagcaacaagcggcatggggccgcgaagatctttagccaccctgacgtcaaggctgaggaaccatggttcgggattgagcaggagtacacccttctccagaaggacaccaagtggcctctcggttggccgctggcgtaccctggccctcagggaccttactactgcgccgccggagcggacaagtcctacgggcgggacatcgtggactgcgcatacaaggcctgcctctacgccggcatcgacatcagtggcatcaacggggaggtcatgccggggcagtgggagttccaggtggcccctgccgtcggcgtctcggccggcgaccagctctgggtggctcgctacattcttgagaggatcaccgagatcgccggcgtggttgtctccttcgaccccaagccaattccgggggactggaatggcgctggtgcacacaccaactacagcaccaagtcgatgaggagcgacggcgggtacgaggtgatcaagaaggcgatcggcaagctgggcctccggcaccgggagcacatcgccgcgtacggggacggcaacgagcgcccgctcaccggccgccacgagaccgccgacatcaacaccttcgtctggggcgtgccgaaccgcggggcgtcggtgcgggtgggccgagacaccgagaaggaaggcaaaggctacttcgaggaccggaggccggcgtccaacatggacccgtacgtggtgacctgcctgatcgcggagacaaccatgctgtgggagcccagccactccaacggcgacggcaagggcgccgcggctccttgatttgattctgcggagactgagctctgtgtgtgagccggcctgcgtagatggcaaatgggactgaccctgtcagaaacttgagatgaccataataatagctgcagtgtgctcgttctggggttggataagacccaagaactttttttagctttcttcgaacaagtaatcatggtgctgaaccaacacagatgtgctactaaacacatctaacgagtcaaacgccgaagcatatcccaacgcacaaccccggttaatcttgttacccatgg

SEQ ID NO: 12597 - protein, 404 aa, Zea mays subsp. mays
  peptide (1)..(404): Ceres Seq. ID no. 13573961
PWRKHTRINHTHSRPLSCPCVLCLFRRSTNQLLVTAMALLSDLINLDLSGRTGKIIAEYIWVGGSGMDVRSKARTLSGPVDDPSKLPKWNFDGSSTGQAPGDDSEVILCPRAIFRDPFRKGQNILVMCDCYEPNGEPIPSNKRHGAAKIFSHPDVKAEEPWFGIEQEYTLLQKDTKWPLGWPLAYPGPQGPYYCAAGADKSYGRDIVDCAYKACLYAGIDISGINGEVMPGQWEFQVAPAVGVSAGDQLWVARYILERITEIAGVVVSFDPKPIPGDWNGAGAHTNYSTKSMRSDGGYEVIKKAIGKLGLRHREHIAAYGDGNERPLTGRHETADINTFVWGVPNRGASVRVGRDTEKEGKGYFEDRRPASNMDPYVVTCLIAETTMLWEPSHSNGDGKGAAAP

SEQ ID NO: 12598 - protein, 368 aa, Zea mays subsp. mays
  peptide (1)..(368): Ceres Seq. ID no. 13573962
MALLSDLINLDLSGRTGKIIAEYIWVGGSGMDVRSKARTLSGPVDDPSKLPKWNFDGSSTGQAPGDDSEVILCPRAIFRDPFRKGQNILVMCDCYEPNGEPIPSNKRHGAAKIFSHPDVKAEEPWFGIEQEYTLLQKDTKWPLGWPLAYPGPQGPYYCAAGADKSYGRDIVDCAYKACLYAGIDISGINGEVMPGQWEFQVAPAVGVSAGDQLWVARYILERITEIAGVVVSFDPKPIPGDWNGAGAHTNYSTKSMRSDGGYEVIKKAIGKLGLRHREHIAAYGDGNERPLTGRHETADINTFVWGVPNRGASVRVGRDTEKEGKGYFEDRRPASNMDPYVVTCLIAETTMLWEPSHSNGDGKGAAAP

SEQ ID NO: 12599 - protein, 338 aa, Zea mays subsp. mays
  peptide (1)..(338): Ceres Seq. ID no. 13573963
MDVRSKARTLSGPVDDPSKLPKWNFDGSSTGQAPGDDSEVILCPRAIFRDPFRKGQNILVMCDCYEPNGEPIPSNKRHGAAKIFSHPDVKAEEPWFGIEQEYTLLQKDTKWPLGWPLAYPGPQGPYYCAAGADKSYGRDIVDCAYKACLYAGIDISGINGEVMPGQWEFQVAPAVGVSAGDQLWVARYILERITEIAGVVVSFDPKPIPGDWNGAGAHTNYSTKSMRSDGGYEVIKKAIGKLGLRHREHIAAYGDGNERPLTGRHETADINTFVWGVPNRGASVRVGRDTEKEGKGYFEDRRPASNMDPYVVTCLIAETTMLWEPSHSNGDGKGAAAP

SEQ ID NO: 12600 - DNA, 809 bp, Zea mays subsp. mays
  misc_feature (1)..(809): Ceres Seq. ID no. 12345167
  misc_feature (1)..(809): Ortholog of  Ceres SEQ ID NO 12610267 as cited in SEQ ID NO 51993
  misc_feature (1)..(809): Ortholog of  Ceres SEQ ID NO 13495070 as cited in SEQ ID NO 53216
  misc_feature (1)..(809): Ortholog of  Ceres SEQ ID NO 12598241 as cited in SEQ ID NO 61025
  misc_feature (1)..(809): Ortholog of  Ceres SEQ ID NO 13661333 as cited in SEQ ID NO 61620
  misc_feature (1)..(809): Ortholog of  Ceres SEQ ID NO 15173749 as cited in SEQ ID NO 61775
  misc_feature (1)..(809): Ortholog of  Ceres SEQ ID NO 13596812 as cited in SEQ ID NO 62283
  misc_feature (1)..(809): Ortholog of  Ceres SEQ ID NO 13623021 as cited in SEQ ID NO 0
  misc_feature (1)..(809): Ortholog of  Ceres SEQ ID NO 14302179 as cited in SEQ ID NO 0
ctctttcagggccttgaaatctcgccctcgttgcggtcgtccacatccttttctctcctcctcgccggcccaacctgattgttcttcaaccaagaggaagaaaggaaggaagggaccggaagcatcagccatgtcgaactcggcgtcgggaatggccgtctgtgatgaatgcaagctcaagttccaggagctcaaggcaaagaggagcttccgcttcatcgtgttcaagatcaacgagaacgtgcagcaggtggtggtggacaggctaggggagccaggcgagagctacgacgccttcacggcctgcttccccgccaacgagtgccgctacgccgtgttcgattttgacttcgtcactgacgagaactgccagaagagcaagatcttctttatctcttgggccccggatacatcgagggtgagaagcaagatgctgtacgcgagctccaaggaccggttcaagagggagctggatggcattcaggtggagctacaagcaaccgacccgagcgaaatgagcatggacatcgtcaagtcgcgagccctctgaaacagccccggccgctgcacctgcacgctgcaggggcgcatcggctcctgcatgcccgtgggtcgtcgaatccttgcttgtgtgttgggaacggtcttgtgttttcgtgtccttgttttcctggaagcaaaagccctgcattctgtatgagactgtatgccattttccatctttttctctccccatatctctgccctagtcccgctaccgctgtagactagaacttatttggtgtttgatctcgtggcattgtcgagcc

SEQ ID NO: 12601 - protein, 182 aa, Zea mays subsp. mays
  peptide (1)..(182): Ceres Seq. ID no. 12345168
SFRALKSRPRCGRPHPFLSSSPAQPDCSSTKRKKGRKGPEASAMSNSASGMAVCDECKLKFQELKAKRSFRFIVFKINENVQQVVVDRLGEPGESYDAFTACFPANECRYAVFDFDFVTDENCQKSKIFFISWAPDTSRVRSKMLYASSKDRFKRELDGIQVELQATDPSEMSMDIVKSRAL

SEQ ID NO: 12602 - protein, 139 aa, Zea mays subsp. mays
  peptide (1)..(139): Ceres Seq. ID no. 12345169
MSNSASGMAVCDECKLKFQELKAKRSFRFIVFKINENVQQVVVDRLGEPGESYDAFTACFPANECRYAVFDFDFVTDENCQKSKIFFISWAPDTSRVRSKMLYASSKDRFKRELDGIQVELQATDPSEMSMDIVKSRAL

SEQ ID NO: 12603 - protein, 132 aa, Zea mays subsp. mays
  peptide (1)..(132): Ceres Seq. ID no. 12345170
MAVCDECKLKFQELKAKRSFRFIVFKINENVQQVVVDRLGEPGESYDAFTACFPANECRYAVFDFDFVTDENCQKSKIFFISWAPDTSRVRSKMLYASSKDRFKRELDGIQVELQATDPSEMSMDIVKSRAL

SEQ ID NO: 12604 - DNA, 1057 bp, Zea mays subsp. mays
  misc_feature (1)..(1057): Ceres Seq. ID no. 12350456
  misc_feature (1)..(1057): Ortholog of  Ceres SEQ ID NO 13591776 as cited in SEQ ID NO 20695
  misc_feature (1)..(1057): Ortholog of  Ceres SEQ ID NO 13595072 as cited in SEQ ID NO 55971
accaccactttctcactgaccactgtgccgcggcatgctcaccggacggacacaaggtcgacgaccactaagcatagagaacgacgatggccgcgtcggcgctgcagcagaccatcagcttcctcgggcaggccctggtctcccgccccgccggcgtcgatgccggcggccgcatcaccatgcgccgcaccgtcaagagcgctccccagagcatctggtacggccctgaccgccccaagtaccttgggccgttctccgagcagatgccgtcatacctgacgggcgagttccccggcgactacgggtgggacaccgcggggctctccgcggaccccaagacgttcgcgcgcaaccgggagctggaggtgatccactcccggtgggcgatgctgggcgcgctggggtgcgtgttcccagaggtcctggcgaagaacggcgtcaagttcggcgaggccgtgtggttcaaggccggcgcagatcttctcggagggcgggctggactacctggggaacccgaacctggtgcacgcgcagagcatcctggcccatctgggcgtgctaggtggtgctcatgggcttcgtcgagggctttggcggcggcccgctcgaggaagggctcgacaaggtgtaccccgacggcgccttcgacccgctgggcctcgtcgacgactcggacaccgccgccgagctcaaggtaaaggagctcaagaacggccacctcgccttgttctccatgttcgggttctttgtgcaggccatcgtcaccggcaagggccccatcgagaacctcttcgaccacgtcgccgaccccgtcgccaacaacgcatgggcctacgccactaacttcgtccccggcaactaactgatgatcgatccgtccgtccgttcgtcgagcgagccgtgtggtggtgttccttgtactctacttgttgaagtcgtaggcgtgtagtagttgcacgtgtcggtgtacgatgatgatcgatctgtgccgaattttttgtattttagccatttcttgggaaaaaatcacatttagaccctagaaaattttaatgtc

SEQ ID NO: 12605 - protein, 203 aa, Zea mays subsp. mays
  peptide (1)..(203): Ceres Seq. ID no. 12350457
MAASALQQTISFLGQALVSRPAGVDAGGRITMRRTVKSAPQSIWYGPDRPKYLGPFSEQMPSYLTGEFPGDYGWDTAGLSADPKTFARNRELEVIHSRWAMLGALGCVFPEVLAKNGVKFGEAVWFKAGADLLGGRAGLPGEPEPGARAEHPGPSGRARWCSWASSRALAAARSRKGSTRCTPTAPSTRWASSTTRTPPPSSR

SEQ ID NO: 12606 - protein, 172 aa, Zea mays subsp. mays
  peptide (1)..(172): Ceres Seq. ID no. 12350458
MRRTVKSAPQSIWYGPDRPKYLGPFSEQMPSYLTGEFPGDYGWDTAGLSADPKTFARNRELEVIHSRWAMLGALGCVFPEVLAKNGVKFGEAVWFKAGADLLGGRAGLPGEPEPGARAEHPGPSGRARWCSWASSRALAAARSRKGSTRCTPTAPSTRWASSTTRTPPPSSR

SEQ ID NO: 12607 - protein, 144 aa, Zea mays subsp. mays
  peptide (1)..(144): Ceres Seq. ID no. 12350459
MPSYLTGEFPGDYGWDTAGLSADPKTFARNRELEVIHSRWAMLGALGCVFPEVLAKNGVKFGEAVWFKAGADLLGGRAGLPGEPEPGARAEHPGPSGRARWCSWASSRALAAARSRKGSTRCTPTAPSTRWASSTTRTPPPSSR

SEQ ID NO: 12608 - DNA, 1317 bp, Zea mays subsp. mays
  misc_feature (1)..(1317): Ceres Seq. ID no. 12350464
  misc_feature (1)..(1317): Ortholog of  Ceres SEQ ID NO 14308120 as cited in SEQ ID NO 58423
  misc_feature (1)..(1317): Ortholog of  Ceres SEQ ID NO 15169380 as cited in SEQ ID NO 58483
  misc_feature (1)..(1317): Ortholog of  Ceres SEQ ID NO 15177787 as cited in SEQ ID NO 59431
  misc_feature (1)..(1317): Ortholog of  Ceres SEQ ID NO 15177031 as cited in SEQ ID NO 60171
  misc_feature (1)..(1317): Ortholog of  Ceres SEQ ID NO 12617197 as cited in SEQ ID NO 63406
  misc_feature (1)..(1317): Ortholog of  Ceres SEQ ID NO 13597804 as cited in SEQ ID NO 64182
  misc_feature (1)..(1317): Ortholog of  Ceres SEQ ID NO 15179788 as cited in SEQ ID NO 64818
  misc_feature (1)..(1317): Ortholog of  Ceres SEQ ID NO 14301622 as cited in SEQ ID NO 65156
  misc_feature (1)..(1317): Ortholog of  Ceres SEQ ID NO 13598565 as cited in SEQ ID NO 65250
  misc_feature (1)..(1317): Ortholog of  Ceres SEQ ID NO 13598597 as cited in SEQ ID NO 65496
  misc_feature (1)..(1317): Ortholog of  Ceres SEQ ID NO 13596284 as cited in SEQ ID NO 68273
atctgcttactgtgatcaccaaagttgtgctgatacgatgtgcgattattgctctttcttctctagaatgttcctgccgatgctttataagagaaggttggtcagcatcgatctctgccagtgtctagctgagaacatggtgacctcaagcaagggcaaggtatgcgtaaccggggcctcaggctttgttgcctcttggcttatcaaacggctcctcgagtctggatatcatgtggtagggactgtcagggacccaggaaatcaccaaaagacagcccacctttggaaattacctggcgctaaagagaggctgcaaatcgtgcgagctgatctgttggaagaagggagcttcgacagcgccgtgatggcctgtgagggtgtattccacactgcatcccccgtcctcgctaaacccgactctactagcaaggaggacacgctcgtccctgcggtgaacggtactctgaacgtgctgagatcgtgcaagaagaacccgttcctgaaaagggtcgtccttacgtcttcgtcgtctgcggtgaggatcagggacgacggtggccagtccagtaacatctcgctggacgaaacgacatggagctccgtgccactctgcgagaagatgcatctatggtatgccctagccaaggtatttgcagagaaagcggcgtgggagttcgccaaggagaacggcatcgaccttgtgactgtcctcccgtcgttcgtgatcgggcccagtttgtcccacgaactatgcgttaccgcttcagacgtcctaggcctattccaaggcgacacggcaaggttcagctcgtacggaagaatggggtacgtccacatcgacgacgttgcgagcagccacatcctggtgtacgaggccccccaggccgccgggaggtacctgtgcagctcagtggtgctggacaacgacgagctggtctcctcgctcgcgaaacgctacccgatattccccataccccggaggctgaacagcccctacggcaagcagtcgtaccagctgaacacgtcgaagctgcaggggctgggcttcaagttcagaggggtgcaggagatgttcgacgactgcgtacagtcgctcaaagaccagggacacctgctggagtgccccctgtgaactgcgatggggtgcctccgcctgtgaacgcgccggttgggttgcgtcccgaacccgctgttaattcgtttttttttcttcaataattccacgtcatgtcacggtgtcctcgcgcagactgctactgtcagggcgtcatagctcacgggctctccggctacatgaataaaaatgtcacgctcgcc

SEQ ID NO: 12609 - protein, 376 aa, Zea mays subsp. mays
  peptide (1)..(376): Ceres Seq. ID no. 12350465
SAYCDHQSCADTMCDYCSFFSRMFLPMLYKRRLVSIDLCQCLAENMVTSSKGKVCVTGASGFVASWLIKRLLESGYHVVGTVRDPGNHQKTAHLWKLPGAKERLQIVRADLLEEGSFDSAVMACEGVFHTASPVLAKPDSTSKEDTLVPAVNGTLNVLRSCKKNPFLKRVVLTSSSSAVRIRDDGGQSSNISLDETTWSSVPLCEKMHLWYALAKVFAEKAAWEFAKENGIDLVTVLPSFVIGPSLSHELCVTASDVLGLFQGDTARFSSYGRMGYVHIDDVASSHILVYEAPQAAGRYLCSSVVLDNDELVSSLAKRYPIFPIPRRLNSPYGKQSYQLNTSKLQGLGFKFRGVQEMFDDCVQSLKDQGHLLECPL

SEQ ID NO: 12610 - protein, 364 aa, Zea mays subsp. mays
  peptide (1)..(364): Ceres Seq. ID no. 12350466
MCDYCSFFSRMFLPMLYKRRLVSIDLCQCLAENMVTSSKGKVCVTGASGFVASWLIKRLLESGYHVVGTVRDPGNHQKTAHLWKLPGAKERLQIVRADLLEEGSFDSAVMACEGVFHTASPVLAKPDSTSKEDTLVPAVNGTLNVLRSCKKNPFLKRVVLTSSSSAVRIRDDGGQSSNISLDETTWSSVPLCEKMHLWYALAKVFAEKAAWEFAKENGIDLVTVLPSFVIGPSLSHELCVTASDVLGLFQGDTARFSSYGRMGYVHIDDVASSHILVYEAPQAAGRYLCSSVVLDNDELVSSLAKRYPIFPIPRRLNSPYGKQSYQLNTSKLQGLGFKFRGVQEMFDDCVQSLKDQGHLLECPL

SEQ ID NO: 12611 - protein, 354 aa, Zea mays subsp. mays
  peptide (1)..(354): Ceres Seq. ID no. 12350467
MFLPMLYKRRLVSIDLCQCLAENMVTSSKGKVCVTGASGFVASWLIKRLLESGYHVVGTVRDPGNHQKTAHLWKLPGAKERLQIVRADLLEEGSFDSAVMACEGVFHTASPVLAKPDSTSKEDTLVPAVNGTLNVLRSCKKNPFLKRVVLTSSSSAVRIRDDGGQSSNISLDETTWSSVPLCEKMHLWYALAKVFAEKAAWEFAKENGIDLVTVLPSFVIGPSLSHELCVTASDVLGLFQGDTARFSSYGRMGYVHIDDVASSHILVYEAPQAAGRYLCSSVVLDNDELVSSLAKRYPIFPIPRRLNSPYGKQSYQLNTSKLQGLGFKFRGVQEMFDDCVQSLKDQGHLLECPL

SEQ ID NO: 12612 - DNA, 931 bp, Zea mays subsp. mays
  misc_feature (1)..(931): Ceres Seq. ID no. 12462439
  misc_feature (1)..(931): Ortholog of  Ceres SEQ ID NO 15179187 as cited in SEQ ID NO 0
aattgacatcaccgagacctatcgccgcagaaccaccgaatccacggcatcggagagtgtagaggttagtactaggcggaggtcaagatggtgtgcatccggcaggcgactatcgacgacctgctggcgatgcaggcgtgcaacttgatgtgcctgccggagaactaccagatgaagtactacctctaccacatgctgtcttggccgcagctcctcttcgtcgccgaggactacggcggccgcatcgtcggctacgtgctcgccaagatggaggaggacccctccgagccctgccacggccacatcacctccctcgcggtgctccgctcccaccgcaagctcgggctcgccaccaagctcatgtccgccgcgcaggcagccatggaccaggtcttcggcgccgagtacgtctccctccacgtccgccgatccaaccgcgccgccttcaacctctacacctccactctcgggtaccagatccacgacatcgaggccaagtactacgccgatggagaggacgcgttcgacatgcgcaagcctctccggcagccgcaacctaagaagcaccaccatcaccaccaccacggccccggtgggtgctgctcccacgacgcacctacggcgacgactggttcttctcctcagtcttttagttcgccggataagaaggctaacacttgacggatgaagcatatctacagagaggagtcaccaagcccattggacttccgatacgcagctttttctaatagaatgggaaacgaattgtactgtaattgtttgtgtactttactttggctcaatcgtccgaccgtatctttgtaatcagttagaatggcaagcaaatgtccttgacatcttttgttattgtaaaaacatgtgttataacgctgattctcagattacatttgattattcgagctgacaattt

SEQ ID NO: 12613 - protein, 197 aa, Zea mays subsp. mays
  peptide (1)..(197): Ceres Seq. ID no. 12462440
MVCIRQATIDDLLAMQACNLMCLPENYQMKYYLYHMLSWPQLLFVAEDYGGRIVGYVLAKMEEDPSEPCHGHITSLAVLRSHRKLGLATKLMSAAQAAMDQVFGAEYVSLHVRRSNRAAFNLYTSTLGYQIHDIEAKYYADGEDAFDMRKPLRQPQPKKHHHHHHHGPGGCCSHDAPTATTGSSPQSFSSPDKKANT

SEQ ID NO: 12614 - protein, 183 aa, Zea mays subsp. mays
  peptide (1)..(183): Ceres Seq. ID no. 12462441
MQACNLMCLPENYQMKYYLYHMLSWPQLLFVAEDYGGRIVGYVLAKMEEDPSEPCHGHITSLAVLRSHRKLGLATKLMSAAQAAMDQVFGAEYVSLHVRRSNRAAFNLYTSTLGYQIHDIEAKYYADGEDAFDMRKPLRQPQPKKHHHHHHHGPGGCCSHDAPTATTGSSPQSFSSPDKKANT

SEQ ID NO: 12615 - protein, 177 aa, Zea mays subsp. mays
  peptide (1)..(177): Ceres Seq. ID no. 12462442
MCLPENYQMKYYLYHMLSWPQLLFVAEDYGGRIVGYVLAKMEEDPSEPCHGHITSLAVLRSHRKLGLATKLMSAAQAAMDQVFGAEYVSLHVRRSNRAAFNLYTSTLGYQIHDIEAKYYADGEDAFDMRKPLRQPQPKKHHHHHHHGPGGCCSHDAPTATTGSSPQSFSSPDKKANT

SEQ ID NO: 12616 - DNA, 866 bp, Zea mays subsp. mays
  misc_feature (1)..(866): Ceres Seq. ID no. 12408126
  misc_feature (1)..(866): Ortholog of  Ceres SEQ ID NO 12609037 as cited in SEQ ID NO 51306
  misc_feature (1)..(866): Ortholog of  Ceres SEQ ID NO 12610391 as cited in SEQ ID NO 55942
  misc_feature (1)..(866): Ortholog of  Ceres SEQ ID NO 14309068 as cited in SEQ ID NO 0
acgattccacccacaccgaatcttgacggaacgattccaccaagaaccgcgggcaacaattcacaccgcgcttctcttgtccagcgatgcagacgacggcggcggcggctgtggcatgggcgcctggcccatcggcgtccacctcgtcatcgtcctcgccgtccaccttcagggtgggggttgcgtcgacggccgtgcgggcttcttccgcgcccagccttgttgcgtcctccgcgcccctgggccgtcgacggctgcggcaagtggttcaagctgttgccaatccagaccctgcgatcgagcttccattgactgctgaaaatgtcgagatggtgttggatgaagtaaggccgtatcttatggcagacggaggcaatgttgcgttgcatgagattgatgggaacgtggtaaggttaaagctgcaaggagcatgtggttcatgcccggcttcagtaacaacgatgaagatgggtattgaacggcgcttgatggagaaaataccagagatcgttgcagttgagcccattgctgatgaggaaactggccttgagttgaaccaagagaacattgaaaaggtacttgacgagattaggccataccttgctggcacaggaggtggcgagctcgagtttgtcacaatcgaggagcctattgtcaaggttaggcttacaggcccagctgctggtgtgatgactgtccgagtagcattgactcagaagctccgtgaaaaaatccctaaaattgcagctgtccagcttttgccataagattagaatcttttagaagccaggcaccagtcacagttgataatgtaaatgaactaccgcaataaatttaaggagttgtaatgtgtagcctgctgagcg

SEQ ID NO: 12617 - protein, 226 aa, Zea mays subsp. mays
  peptide (1)..(226): Ceres Seq. ID no. 12408127
MQTTAAAAVAWAPGPSASTSSSSSPSTFRVGVASTAVRASSAPSLVASSAPLGRRRLRQVVQAVANPDPAIELPLTAENVEMVLDEVRPYLMADGGNVALHEIDGNVVRLKLQGACGSCPASVTTMKMGIERRLMEKIPEIVAVEPIADEETGLELNQENIEKVLDEIRPYLAGTGGGELEFVTIEEPIVKVRLTGPAAGVMTVRVALTQKLREKIPKIAAVQLLP

SEQ ID NO: 12618 - protein, 145 aa, Zea mays subsp. mays
  peptide (1)..(145): Ceres Seq. ID no. 12408128
MVLDEVRPYLMADGGNVALHEIDGNVVRLKLQGACGSCPASVTTMKMGIERRLMEKIPEIVAVEPIADEETGLELNQENIEKVLDEIRPYLAGTGGGELEFVTIEEPIVKVRLTGPAAGVMTVRVALTQKLREKIPKIAAVQLLP

SEQ ID NO: 12619 - protein, 135 aa, Zea mays subsp. mays
  peptide (1)..(135): Ceres Seq. ID no. 12408129
MADGGNVALHEIDGNVVRLKLQGACGSCPASVTTMKMGIERRLMEKIPEIVAVEPIADEETGLELNQENIEKVLDEIRPYLAGTGGGELEFVTIEEPIVKVRLTGPAAGVMTVRVALTQKLREKIPKIAAVQLLP

SEQ ID NO: 12620 - DNA, 1719 bp, Zea mays subsp. mays; identical to SEQ ID NO: 12109
  misc_feature (1)..(1719): Ceres Seq. ID no. 12406579
  misc_feature (1)..(1719): Ortholog of  Ceres SEQ ID NO 15175507 as cited in SEQ ID NO 20619
  misc_feature (1)..(1719): Ortholog of  Ceres SEQ ID NO 13639663 as cited in SEQ ID NO 57850
  misc_feature (1)..(1719): Ortholog of  Ceres SEQ ID NO 15224330 as cited in SEQ ID NO 58808
  misc_feature (1)..(1719): Ortholog of  Ceres SEQ ID NO 14302150 as cited in SEQ ID NO 0

SEQ ID NO: 12621 - protein, 474 aa, Zea mays subsp. mays; identical to SEQ ID NO: 12110
  peptide (1)..(474): Ceres Seq. ID no. 12406580

SEQ ID NO: 12622 - protein, 419 aa, Zea mays subsp. mays; identical to SEQ ID NO: 12111
  peptide (1)..(419): Ceres Seq. ID no. 12406581

SEQ ID NO: 12623 - protein, 338 aa, Zea mays subsp. mays; identical to SEQ ID NO: 12112
  peptide (1)..(338): Ceres Seq. ID no. 12406582

SEQ ID NO: 12624 - DNA, 1167 bp, Zea mays subsp. mays
  misc_feature (1)..(1167): Ceres Seq. ID no. 12372251
  misc_feature (1)..(1167): Ortholog of  Ceres SEQ ID NO 13581800 as cited in SEQ ID NO 51508
gcacgagaccattacctagaacatcctaatcgaaaaatctgcagcacgtctcctcttttcctcgtccacccggccatctccgcatccactcccgcaggccgcagcccagcaccggccgctctacgcctccacgccggcacgtcctcgtttctgtccgaggtcatcgcctccgcaacttcgtggccggtgaggtcgcaccaccatggcgtcgctcctagcccggcaggcagcgcaggcgctccgcgcgaggcaaacggcgcagctngggccggccgcgtcggcgatgcaagggcacctccgtacctacatgaacgcggggattcccaagcggttcaaagaggatgaggagaaagaacagcttgcaaaagatgtcgcaaaagattggaatgctgtgtttgaaaggagcatcaatacattgtttttgactgaaatggtccgtggcttgatgctaactctcaagtacttctttgatagaaatgtcacaattaactatccgtttgagaagggtcctctgagcccccgcttccgtggtgagcatgctctcagacgttatgaatctggggaagagcgctgcattgcttgtaaactatgcgaagctatatgcccagcgcaggcaattacaattgaggctgaagaacgtgaagatggcagtcgccgaaccacaagatatgatattgacatgaccaaatgcatttactgtgggttctgtcaagaggcttgcccagtcgatgctattgttgaggggcctaactttgagtttgccactgagacacacgaggaactactgtacgacaaggagaaattgcttgaaaatggtgatcgctgggagactgagattgctgagaacttgagatctgagagcctctatcgctgaatctgtcttccattatggttgataaactgggttcttccattttccatattttgctcaactagctgatgaataagcaaacgatgtatcataacttaggtacgatgtttttgtaccttggcaccatctgtgtgttttgttcattgccttgctaaaggtggcaccagatgttctttgatgggaaaattccttctgtagcactgagctgttttcagtcacaccttattttgtatacaatgaaacagaacgctgtgctcatggcacagtgatttggtgaatgttcacatgtttgtttc

SEQ ID NO: 12625 - protein, 223 aa, Zea mays subsp. mays
  peptide (1)..(223): Ceres Seq. ID no. 12372252
  misc_feature (21)..(21): Xaa is any aa, unknown or other
MASLLARQAAQALRARQTAQXGPAASAMQGHLRTYMNAGIPKRFKEDEEKEQLAKDVAKDWNAVFERSINTLFLTEMVRGLMLTLKYFFDRNVTINYPFEKGPLSPRFRGEHALRRYESGEERCIACKLCEAICPAQAITIEAEEREDGSRRTTRYDIDMTKCIYCGFCQEACPVDAIVEGPNFEFATETHEELLYDKEKLLENGDRWETEIAENLRSESLYR

SEQ ID NO: 12626 - protein, 196 aa, Zea mays subsp. mays
  peptide (1)..(196): Ceres Seq. ID no. 12372253
MQGHLRTYMNAGIPKRFKEDEEKEQLAKDVAKDWNAVFERSINTLFLTEMVRGLMLTLKYFFDRNVTINYPFEKGPLSPRFRGEHALRRYESGEERCIACKLCEAICPAQAITIEAEEREDGSRRTTRYDIDMTKCIYCGFCQEACPVDAIVEGPNFEFATETHEELLYDKEKLLENGDRWETEIAENLRSESLYR

SEQ ID NO: 12627 - protein, 188 aa, Zea mays subsp. mays
  peptide (1)..(188): Ceres Seq. ID no. 12372254
MNAGIPKRFKEDEEKEQLAKDVAKDWNAVFERSINTLFLTEMVRGLMLTLKYFFDRNVTINYPFEKGPLSPRFRGEHALRRYESGEERCIACKLCEAICPAQAITIEAEEREDGSRRTTRYDIDMTKCIYCGFCQEACPVDAIVEGPNFEFATETHEELLYDKEKLLENGDRWETEIAENLRSESLYR

SEQ ID NO: 12628 - DNA, 1075 bp, Zea mays subsp. mays
  misc_feature (1)..(1075): Ceres Seq. ID no. 12402112
  misc_feature (1)..(1075): Ortholog of  Ceres SEQ ID NO 13491587 as cited in SEQ ID NO 20500
  misc_feature (1)..(1075): Ortholog of  Ceres SEQ ID NO 15169711 as cited in SEQ ID NO 54274
ctctgaaagtgggcctatcctcgctggtcacgtctcctctccgcgcacgaaaaccctagcacgcaggcgcagccagccctgctccaattcccaaagcttctggaaaacacctactcgtctctcatcccttccccgccgtcgcgtcctcttcgaactgaatcgcgccgcgatcacccaccttatggcggacaaggagcctgtcgtggagcgatccgaggcgtctgaggaggaggacgcctccgccgcggccgccgcgggggaggaagaggacacgggtgcccaggtggcccccatcgtgcggcttgaggaggtactcgtcaccaccggtgaggaggacgaggacgtcctgctcgacatgaaggcgaagctgtaccggtttgataaagacgggaaccaatggaaggaacggggcacgggcaccgtcaagcttctcaagaacaaggagaccggcaaggtccgactggtcatgcgccagggccaagacgcttaagatatgcgcgaaccacctcgtggcccccaccacgagaatgcaggaacatgccggcagcgacaaatcgtgcgtctggcacgcttctgactttgcggatggcgaactcaaggaggagatgtttgccatcaggtttggttcggtagaaaactgcaagaagttcaaggagttggttgaggagattgctgagtcacttacagagaacgaggacaaggaaggtcaagatggctcatccacggccggattgctggagaagctcactgtgagcgagggcaaatctgaggaaagtggcaagtcggagtccactgattctggcaaagtgaccgaaaccaaagccgatgcagccccagccgagtagttggtgtggttgcacgcagatcctccccgtgctgaatcagttcctctgccctttagccatgaaatatgtttgctaatttttttggggcgagttggagcagtctcttgtgtttgggtttgttcttaaaaactttgagttaattggggttggaacgttcggtatgcaagtgtagtatttcactgcgtggatcgttatggattgcggtaaattcatataaggtgcatctattg

SEQ ID NO: 12629 - protein, 162 aa, Zea mays subsp. mays
  peptide (1)..(162): Ceres Seq. ID no. 12402113
SESGPILAGHVSSPRTKTLARRRSQPCSNSQSFWKTPTRLSSLPRRRVLFELNRAAITHLMADKEPVVERSEASEEEDASAAAAAGEEEDTGAQVAPIVRLEEVLVTTGEEDEDVLLDMKAKLYRFDKDGNQWKERGTGTVKLLKNKETGKVRLVMRQGQDA

SEQ ID NO: 12630 - protein, 105 aa, Zea mays subsp. mays
  peptide (1)..(105): Ceres Seq. ID no. 12402114
MQEHAGSDKSCVWHASDFADGELKEEMFAIRFGSVENCKKFKELVEEIAESLTENEDKEGQDGSSTAGLLEKLTVSEGKSEESGKSESTDSGKVTETKADAAPAE

SEQ ID NO: 12631 - protein, 102 aa, Zea mays subsp. mays
  peptide (1)..(102): Ceres Seq. ID no. 12402115
MADKEPVVERSEASEEEDASAAAAAGEEEDTGAQVAPIVRLEEVLVTTGEEDEDVLLDMKAKLYRFDKDGNQWKERGTGTVKLLKNKETGKVRLVMRQGQDA

SEQ ID NO: 12632 - DNA, 964 bp, Zea mays subsp. mays
  misc_feature (1)..(964): Ceres Seq. ID no. 12341310
  misc_feature (1)..(964): Ortholog of  Ceres SEQ ID NO 12623011 as cited in SEQ ID NO 67651
acgcgtccaggctcggaggctccaacagcacgacgcaaccgaccccaccttccctttacgcgaagaagcatcaccgcgagacgcgagtcgtcctcctctctgtcttcgctcggcgatctatcaaggagggtgagggggagatggcggagaatccgcagctgtttgggaacgggatgccggtgccgttctacggcgagatgttcgtcctcgtccgcgacggcgtcgagttccacgtcgacaagatcccgtcagctcctggaggtcatgtgaaaacaaaaggcacaatttacctgtccaatataaggatggtgtttgttgccagcaagcctgttggcaacttctttgcttttgatatgccactgttgtttgtgcatggtgagaagttcaatcagcccatatttcactgcaacaacatctctggattcgttgaaccagtcgttccagacaatcagaacagggccctgtactcaactcacaccttcaagatcttgttcaagtaaggcggctgtggtactttcgttcctctcttccttaacctgactgcatctgtgcggcgctacaatgagtttgaagcccagtctgctgctaacatggcaccgcgtgtggatcccctgcaagccgcgcagactcctgtcgatgatatgatgcgtcatgcgtatgttgacccaaatgatcctaccaagatttaccttcagcaacctgccccagaatcgcagctgaggaggagaaactaccacggcccagctgatgtgaattagcgcttgctggattggcaaaactcatggccaatgaactgttgtatctgtttgaacaatttatcacaactggcttcaatatccgggagcccccgtatactgcgaatctgtggccgttacatcgtacataatgttttgagttcgctcaataatgatgtacataagcagtggtgtactggtgtgttcaaataatattgtagtgttaagtc

SEQ ID NO: 12633 - protein, 165 aa, Zea mays subsp. mays
  peptide (1)..(165): Ceres Seq. ID no. 12341311
ASRLGGSNSTTQPTPPSLYAKKHHRETRVVLLSVFARRSIKEGEGEMAENPQLFGNGMPVPFYGEMFVLVRDGVEFHVDKIPSAPGGHVKTKGTIYLSNIRMVFVASKPVGNFFAFDMPLLFVHGEKFNQPIFHCNNISGFVEPVVPDNQNRALYSTHTFKILFK

SEQ ID NO: 12634 - protein, 119 aa, Zea mays subsp. mays
  peptide (1)..(119): Ceres Seq. ID no. 12341312
MAENPQLFGNGMPVPFYGEMFVLVRDGVEFHVDKIPSAPGGHVKTKGTIYLSNIRMVFVASKPVGNFFAFDMPLLFVHGEKFNQPIFHCNNISGFVEPVVPDNQNRALYSTHTFKILFK

SEQ ID NO: 12635 - protein, 108 aa, Zea mays subsp. mays
  peptide (1)..(108): Ceres Seq. ID no. 12341313
MPVPFYGEMFVLVRDGVEFHVDKIPSAPGGHVKTKGTIYLSNIRMVFVASKPVGNFFAFDMPLLFVHGEKFNQPIFHCNNISGFVEPVVPDNQNRALYSTHTFKILFK

SEQ ID NO: 12636 - DNA, 619 bp, Zea mays subsp. mays
  misc_feature (1)..(619): Ceres Seq. ID no. 12483051
  misc_feature (1)..(619): Ortholog of  Ceres SEQ ID NO 13598194 as cited in SEQ ID NO 61472
atttttcgagatgaacgaacagtccagaacccactgctcgaaaccgcagccactggccagtcgatgcccatgactgcggtgcccaggaccggccccggttgcctggggtcgccgccggctcaggctctgtcgagctcactagccggggttcaaggcgccccgaagcgactgggcgcatcgaagccgtcgtggatcgttcgcactgagtcaaacgtgaggagggagagagcaaaacgacctgatcctccttgcaccatctgcaagggcacagggagaatagactgccgcaactgctttggccgaggaagaacaaaccatgccgatgtggccatgcttccgaacggcgaatggccacaatggtgtcgaatttgtggtggtagtggactggattactgcctccggtgccatggaactggtgagtatcgtgaacccatgggcttccacttcactgtccaaagaaaatgagtgaggtgggatggccttgtatgctacgatgcagcgcagctgcggggacatcgtagcccactcagcatgtttctccactgtctctcagaactcagatgatttatgtctagcgctaacgctgtaataacgttgcttcataaaaggaaaaaatgtc

SEQ ID NO: 12637 - protein, 154 aa, Zea mays subsp. mays
  peptide (1)..(154): Ceres Seq. ID no. 12483052
IFRDERTVQNPLLETAATGQSMPMTAVPRTGPGCLGSPPAQALSSSLAGVQGAPKRLGASKPSWIVRTESNVRRERAKRPDPPCTICKGTGRIDCRNCFGRGRTNHADVAMLPNGEWPQWCRICGGSGLDYCLRCHGTGEYREPMGFHFTVQRK

SEQ ID NO: 12638 - protein, 133 aa, Zea mays subsp. mays
  peptide (1)..(133): Ceres Seq. ID no. 12483053
MPMTAVPRTGPGCLGSPPAQALSSSLAGVQGAPKRLGASKPSWIVRTESNVRRERAKRPDPPCTICKGTGRIDCRNCFGRGRTNHADVAMLPNGEWPQWCRICGGSGLDYCLRCHGTGEYREPMGFHFTVQRK

SEQ ID NO: 12639 - protein, 131 aa, Zea mays subsp. mays
  peptide (1)..(131): Ceres Seq. ID no. 12483054
MTAVPRTGPGCLGSPPAQALSSSLAGVQGAPKRLGASKPSWIVRTESNVRRERAKRPDPPCTICKGTGRIDCRNCFGRGRTNHADVAMLPNGEWPQWCRICGGSGLDYCLRCHGTGEYREPMGFHFTVQRK

SEQ ID NO: 12640 - DNA, 831 bp, Zea mays subsp. mays
  misc_feature (1)..(831): Ceres Seq. ID no. 12402108
  misc_feature (1)..(831): Ortholog of  Ceres SEQ ID NO 12614051 as cited in SEQ ID NO 67827
attttgtggacctatagcatattcccgtggtctccccccttttgctttgcttgccgagacggcgaccatggcgaagcagcagaatcctatccccatcccgatgccctgtcgctgtcgctgcccctcgtcctcgtcgcgctgctcctgccggccgcccgcggcgccgcggagacgccgcagtacacgacggtgcacgcggagtcggacttcgaggtgcggctgtacggcgacaccgtctggatgtccgcccccaccccggacatcccttccttccacgtcgccaccaagctcggcttccacagattgttccagtacctgatgggcgcaaacctcaactcttcgaggatcaggatgaccacccctgtgctcacgagtgtggttccaggtgcagggcctctgcgctcctcggcctactccgtccggctgtacctgccggcgaagttccaggcttcccctccggttcctctcccagagctgaacctgcatccagatcggtggccaggccactgcgtcgcagcgaggagcttctcgggtcgtgcacgggacaagaacgtggtcgaggaagccgagaagctcgccatgagcctgagccggtcaccatgggctaactccacagactactccagcaagagcgcttactcggttgcacagtacagcagtccattccgcatcattggccgtgtcaatgaggtgtggttcgacgtcaactgcagatctactgctgctggtgttgagtcctactgaaaaaaaaactgccagatgtgatggataataataatttggatgtaaaacacaagctgtcctgctttattccatctcttactcctagcc

SEQ ID NO: 12641 - protein, 247 aa, Zea mays subsp. mays
  peptide (1)..(247): Ceres Seq. ID no. 12402109
ILWTYSIFPWSPPFCFACRDGDHGEAAESYPHPDALSLSLPLVLVALLLPAARGAAETPQYTTVHAESDFEVRLYGDTVWMSAPTPDIPSFHVATKLGFHRLFQYLMGANLNSSRIRMTTPVLTSVVPGAGPLRSSAYSVRLYLPAKFQASPPVPLPELNLHPDRWPGHCVAARSFSGRARDKNVVEEAEKLAMSLSRSPWANSTDYSSKSAYSVAQYSSPFRIIGRVNEVWFDVNCRSTAAGVESY

SEQ ID NO: 12642 - protein, 167 aa, Zea mays subsp. mays
  peptide (1)..(167): Ceres Seq. ID no. 12402110
MSAPTPDIPSFHVATKLGFHRLFQYLMGANLNSSRIRMTTPVLTSVVPGAGPLRSSAYSVRLYLPAKFQASPPVPLPELNLHPDRWPGHCVAARSFSGRARDKNVVEEAEKLAMSLSRSPWANSTDYSSKSAYSVAQYSSPFRIIGRVNEVWFDVNCRSTAAGVESY

SEQ ID NO: 12643 - protein, 141 aa, Zea mays subsp. mays
  peptide (1)..(141): Ceres Seq. ID no. 12402111
MGANLNSSRIRMTTPVLTSVVPGAGPLRSSAYSVRLYLPAKFQASPPVPLPELNLHPDRWPGHCVAARSFSGRARDKNVVEEAEKLAMSLSRSPWANSTDYSSKSAYSVAQYSSPFRIIGRVNEVWFDVNCRSTAAGVESY

SEQ ID NO: 12644 - DNA, 1801 bp, Zea mays subsp. mays
  misc_feature (1)..(1801): Ceres Seq. ID no. 12351800
  misc_feature (1)..(1801): Ortholog of  Ceres SEQ ID NO 14302216 as cited in SEQ ID NO 66456
atcagcgtgttttgttttgtttcgtctcgtcgaccgagccgtccgtcgtcctccctggcggtctggccgcctccgccttcctccccgtgcgtctcacccttttcctctacagcttcctctgcccaatcagctcgtcctctcccctcctctccctcccgtgaactgctaaaatccctcgccaagcatttccgtcgggttaggtggtagataagccgaaaatcgagtggaaaagcatcaatcgagtgctgcgctagttgcctggttcgtcccaacaaattccaccgggaatcagggtcgtccggcagcggctgaggcgtctgggttctggaggagcggccgtcggtgaggggggatggggggcggcggcggatcctccgggccggagctgtcgacggacaacatgaaggggatagtcctggcgctgctctccagcggcttcatcggcgccagcttcatcatcaagaagaagggtctccgccgggccgctgtcgcctccggcgtccgtgcaggtgtaggcgggtactcatacctcatggagcccctgtggtgggttggcatgatcattatgattgtaggtgagattgccaatttcgtggcatatgctttcgcccccgctgttctggttactccccttggagcactcagcataattgttagtgcagtgctggctcatttcattctgaacgagaggctgcatgccctcggggtgctcggctgcgtgatgtgcattgcagggtctgtggtcattgttatccacgctccacaggagcaggagattacttcagttaaggaaatatggaacatggcgacacaacctgctttcttgttatatgttgcgtcagttattgtgattgtttttgtcctggtgttctatttctcccctctctatgggcagtccaatgtgttgatctacactgccatttgctctttgatgggctctctttcggttatgagtgttaaagctcttggtacatcactaaagcttacttttgagggaacaaaccaattaatatatccagagacttggttctttatgcttgttgtggctacttgtgtgttgactcagatgaattatctgaacaaggcacttgacacgttcaacacggcaattgtatctccaatatattatgtaatgttcacaactcttacaatacttgccagcgtcataatgttcaaggattggtctggtcaaagccctggaagcgtcatttctgaaatttgtggcttggttgtggtgttgtctggtaccattttgttgcatgtgacgaaggattatgaaaggatcccacaatcaagaagtgtttatgcaccattatctccctctttgacaactagattaaatggagaattgttgaagcatgtcgtggatgagaggacttcggacgaagaaaaggccttgagaagacaggagatgtattagcgtgcgtcagaatatcaaaggaaatataggttactctgatggattctccggcaggggcttgtacatggcgtagtgataaccttcccatagcgattgttgattcctccattacagtttgttggtttgtgtatataactgcagcaatttgtggctaccgagtgattgcaaatctgccgaggtggtggaaggctgcagagttccaccaaaaagaatctaagtcgggtgcatagattcttatcgaattcccttcttcctttcgtaacttcctcagttttgtccacggcatttgttccatgtgagttttagagtgaatcacggaccctatgcaactgatgtacattattattgtcatagtgaagttcgtgcaactgtgaatgatgt

SEQ ID NO: 12645 - protein, 355 aa, Zea mays subsp. mays
  peptide (1)..(355): Ceres Seq. ID no. 12351801
MGGGGGSSGPELSTDNMKGIVLALLSSGFIGASFIIKKKGLRRAAVASGVRAGVGGYSYLMEPLWWVGMIIMIVGEIANFVAYAFAPAVLVTPLGALSIIVSAVLAHFILNERLHALGVLGCVMCIAGSVVIVIHAPQEQEITSVKEIWNMATQPAFLLYVASVIVIVFVLVFYFSPLYGQSNVLIYTAICSLMGSLSVMSVKALGTSLKLTFEGTNQLIYPETWFFMLVVATCVLTQMNYLNKALDTFNTAIVSPIYYVMFTTLTILASVIMFKDWSGQSPGSVISEICGLVVVLSGTILLHVTKDYERIPQSRSVYAPLSPSLTTRLNGELLKHVVDERTSDEEKALRRQEMY

SEQ ID NO: 12646 - protein, 339 aa, Zea mays subsp. mays
  peptide (1)..(339): Ceres Seq. ID no. 12351802
MKGIVLALLSSGFIGASFIIKKKGLRRAAVASGVRAGVGGYSYLMEPLWWVGMIIMIVGEIANFVAYAFAPAVLVTPLGALSIIVSAVLAHFILNERLHALGVLGCVMCIAGSVVIVIHAPQEQEITSVKEIWNMATQPAFLLYVASVIVIVFVLVFYFSPLYGQSNVLIYTAICSLMGSLSVMSVKALGTSLKLTFEGTNQLIYPETWFFMLVVATCVLTQMNYLNKALDTFNTAIVSPIYYVMFTTLTILASVIMFKDWSGQSPGSVISEICGLVVVLSGTILLHVTKDYERIPQSRSVYAPLSPSLTTRLNGELLKHVVDERTSDEEKALRRQEMY

SEQ ID NO: 12647 - protein, 295 aa, Zea mays subsp. mays
  peptide (1)..(295): Ceres Seq. ID no. 12351803
MEPLWWVGMIIMIVGEIANFVAYAFAPAVLVTPLGALSIIVSAVLAHFILNERLHALGVLGCVMCIAGSVVIVIHAPQEQEITSVKEIWNMATQPAFLLYVASVIVIVFVLVFYFSPLYGQSNVLIYTAICSLMGSLSVMSVKALGTSLKLTFEGTNQLIYPETWFFMLVVATCVLTQMNYLNKALDTFNTAIVSPIYYVMFTTLTILASVIMFKDWSGQSPGSVISEICGLVVVLSGTILLHVTKDYERIPQSRSVYAPLSPSLTTRLNGELLKHVVDERTSDEEKALRRQEMY

SEQ ID NO: 12648 - DNA, 1334 bp, Zea mays subsp. mays
  misc_feature (1)..(1334): Ceres Seq. ID no. 12369102
  misc_feature (1)..(1334): Ortholog of  Ceres SEQ ID NO 13654531 as cited in SEQ ID NO 68083
atcttccgagatttgtctgcgcccctgcggcgcgcatggcgccacgactgaccgtggccttgggcggcgctcgggcatgagtacatggcgctcggtggcctcgcgtcgcgttactcacccaccggcaccgcgccacggccgcgttcgtctcaacaggagccgatggccactctcgcgccacggccacatatcctcctcggcttgacaaggccgcagcccatagcgcttcgtgcctgcgccgccttctcccgctcccgccacgcgccagtcccaccgcgggccgcgcagccgcggcgcgtcttcctcggccttggcctgccttcatcgaccaggccacccgcatggcctccggcggcacctcgtcccgctctttcgttgccggagcgcggccgaggcaaggcgtttccccagtcgagcagattctcaagaatgtcgagtggccagatgagttccctttcaagcctgaggacttcagccgcttcgacgaatcatcagatactctgttctactcggttccacgttttgtcactcacattgatgaccaagcaatccaagctctcacagagtactattctgaagttcttcctccaagtaatactcctggggtggccattctggacatgtgcagcagctgggtcagccattatcctcccggttacagacaagagaagatcgtggggatgggtatgaatgaagatgaactgaaaaagaactcggtactgactcagtatgtcgtgcaagacctcaatgtgaacccaaagcttcctttcgaagataacacttttgatgttatcaccaatgtggttagtgtagattaccttacaaagccaatagatgtttttaaggagatgcgacgaatactcaagccaagcggccttgccataatgagcttttcaaaccggtgcttttggacaaaagctatatctatatggacctcaactggtgatgctgatcatgcatggatagttggtgcttacttccattatgttggaggttttgaacctccccaggcacttgatatatctcctaatccaggacgaactgacccaatgtatgttgtatgctcgagaaagaaaatagggtaactaaacaatatatttggcaagtgctatcaagaaacaaatagaaggaaaaatacaagaagcaagttgtttggccctgatcgcaggacctattggtgagctgatgtttccgtgagtaatgtaacgacagaaaaaagaagcaactactacataaactatttatagaagcggcagattcacttcataggttgtagcaactgtctttactaaaagtgtgtttggtttgaggaatgaagtgatccatcttcttcc

SEQ ID NO: 12649 - protein, 247 aa, Zea mays subsp. mays
  peptide (1)..(247): Ceres Seq. ID no. 12369103
MASGGTSSRSFVAGARPRQGVSPVEQILKNVEWPDEFPFKPEDFSRFDESSDTLFYSVPRFVTHIDDQAIQALTEYYSEVLPPSNTPGVAILDMCSSWVSHYPPGYRQEKIVGMGMNEDELKKNSVLTQYVVQDLNVNPKLPFEDNTFDVITNVVSVDYLTKPIDVFKEMRRILKPSGLAIMSFSNRCFWTKAISIWTSTGDADHAWIVGAYFHYVGGFEPPQALDISPNPGRTDPMYVVCSRKKIG

SEQ ID NO: 12650 - protein, 201 aa, Zea mays subsp. mays
  peptide (1)..(201): Ceres Seq. ID no. 12369104
MALGGLASRYSPTGTAPRPRSSQQEPMATLAPRPHILLGLTRPQPIALRACAAFSRSRHAPVPPRAAQPRRVFLGLGLPSSTRPPAWPPAAPRPALSLPERGRGKAFPQSSRFSRMSSGQMSSLSSLRTSAASTNHQILCSTRFHVLSLTLMTKQSKLSQSTILKFFLQVILLGWPFWTCAAAGSAIILPVTDKRRSWGWV

SEQ ID NO: 12651 - protein, 175 aa, Zea mays subsp. mays
  peptide (1)..(175): Ceres Seq. ID no. 12369105
MATLAPRPHILLGLTRPQPIALRACAAFSRSRHAPVPPRAAQPRRVFLGLGLPSSTRPPAWPPAAPRPALSLPERGRGKAFPQSSRFSRMSSGQMSSLSSLRTSAASTNHQILCSTRFHVLSLTLMTKQSKLSQSTILKFFLQVILLGWPFWTCAAAGSAIILPVTDKRRSWGWV

SEQ ID NO: 12652 - DNA, 1620 bp, Zea mays subsp. mays
  misc_feature (1)..(1620): Ceres Seq. ID no. 12367514
  misc_feature (1)..(1620): Ortholog of  Ceres SEQ ID NO 14314643 as cited in SEQ ID NO 56903
aatggccgcctcctccccttccacctcctcccctaatggcagatgctaggcggcggcgcccctcttgagaagtgaaagggaaagatttgttttgccgcccgcgccctgctcaggcgctccgcctcggtcgggccacacaaggtagcgccttccgcctcgttgcctgacccattcctgtttcgttcgaagcactgaagcagccccagaccgacgccaggcgcccaggccagtggtcgacgcctgtggtgagctgataggcgatgtcgtcaccgtctccggtgctggcaagggctgcgcgtctcacgtgtaggttgtgatctttctgcccagagatgtgcgatttgtcttcgcttgatctgagtgacagtaaaacggagaccggctagtgttgttcctgaaacctgttgatttatggggagccagacaatcgcatcacaggctgggggaggtggaagaggcatgggtagtagtggtggtgccggtgcagcgcaacgcgggcagatgcagagtctggcaagacaagggtctctgtataaccttacccttgatgaggtgcagagccatttgggagaacccctacacagcatgaaccttgaggagctgctgaagagtgtctttcctgatgacctggaccctgatggtggcactaccagccaatatgagcagagttcgggcctcttgcgacagggaagtatcacaatgccgcctgagctcagcaggagaactgtggacgaggtgtggaaggacatccaggatgcaccaaacagaaatgttggggagagtggtcggcggaagcgggagcggcagccaacgcttggagagatgacgcttgaggatttcttggtgaaagctggggttgtcgccgaaggatatctgaaggacttgaatggcataggcagtgtggaacaggttggtagcactggggctgcgggtttgacagcaggggcacaatggttagaccactatcagcagcggattacagctatcgagccccatcagcacaggcaacatagtttgccaggtgcttacataccgggtcagttaagccttcagtccctgaatgttggaccaagtgctattttggagtcatactctgatggccacatttcttcaccgatgatgggtgcactttctgattctccgatgcctggtagaaagcgtggttccccaggagatgtggctgataagttggtggagagaaggcagaagaggatgatcaagaatagggagtcagctgctcgttcaagggctaggaagcaggcatacactaatgaactggaaaacaaggtttctcgattagaagaggagaataagaagctaaccacgttaaaggagttggaaaatatacttttctctgagcctcttccggaacccaagtaccaactgaggagaaccggctcagcgactttctgattgtatgcagaatatcttgttttgctgtaggttgtaagtcctgtagcttactagcaggagccgagcatgtgctgtccgaggccttgctaccagtatagtatgtaaaatcttcaggacacatgtaggtggtcggagcttgtttacatggtgtgacttaacagatggatacatataactatgagaagtatgggagccctttctttggtg

SEQ ID NO: 12653 - protein, 333 aa, Zea mays subsp. mays
  peptide (1)..(333): Ceres Seq. ID no. 12367515
MGSQTIASQAGGGGRGMGSSGGAGAAQRGQMQSLARQGSLYNLTLDEVQSHLGEPLHSMNLEELLKSVFPDDLDPDGGTTSQYEQSSGLLRQGSITMPPELSRRTVDEVWKDIQDAPNRNVGESGRRKRERQPTLGEMTLEDFLVKAGVVAEGYLKDLNGIGSVEQVGSTGAAGLTAGAQWLDHYQQRITAIEPHQHRQHSLPGAYIPGQLSLQSLNVGPSAILESYSDGHISSPMMGALSDSPMPGRKRGSPGDVADKLVERRQKRMIKNRESAARSRARKQAYTNELENKVSRLEEENKKLTTLKELENILFSEPLPEPKYQLRRTGSATF

SEQ ID NO: 12654 - protein, 317 aa, Zea mays subsp. mays
  peptide (1)..(317): Ceres Seq. ID no. 12367516
MGSSGGAGAAQRGQMQSLARQGSLYNLTLDEVQSHLGEPLHSMNLEELLKSVFPDDLDPDGGTTSQYEQSSGLLRQGSITMPPELSRRTVDEVWKDIQDAPNRNVGESGRRKRERQPTLGEMTLEDFLVKAGVVAEGYLKDLNGIGSVEQVGSTGAAGLTAGAQWLDHYQQRITAIEPHQHRQHSLPGAYIPGQLSLQSLNVGPSAILESYSDGHISSPMMGALSDSPMPGRKRGSPGDVADKLVERRQKRMIKNRESAARSRARKQAYTNELENKVSRLEEENKKLTTLKELENILFSEPLPEPKYQLRRTGSATF

SEQ ID NO: 12655 - protein, 303 aa, Zea mays subsp. mays
  peptide (1)..(303): Ceres Seq. ID no. 12367517
MQSLARQGSLYNLTLDEVQSHLGEPLHSMNLEELLKSVFPDDLDPDGGTTSQYEQSSGLLRQGSITMPPELSRRTVDEVWKDIQDAPNRNVGESGRRKRERQPTLGEMTLEDFLVKAGVVAEGYLKDLNGIGSVEQVGSTGAAGLTAGAQWLDHYQQRITAIEPHQHRQHSLPGAYIPGQLSLQSLNVGPSAILESYSDGHISSPMMGALSDSPMPGRKRGSPGDVADKLVERRQKRMIKNRESAARSRARKQAYTNELENKVSRLEEENKKLTTLKELENILFSEPLPEPKYQLRRTGSATF

SEQ ID NO: 12656 - DNA, 1245 bp, Zea mays subsp. mays
  misc_feature (1)..(1245): Ceres Seq. ID no. 12343927
  misc_feature (1)..(1245): Ortholog of  Ceres SEQ ID NO 13597234 as cited in SEQ ID NO 64118
aaaacgttatgtttattcgatttcgtgtcctgtccgtttgacgaccgagccctgccccccttttccagtttccttctcccttcctgccgctgcggcggtggcggcaacgactcgcgcgggccggtcctaggttctcccggagcggttcggcgggatgggcacgccggagttccccaacctgggaaagcactgcagcgtcggagactgcaaccagatcgacttcctccccttcacctgcgaccgctgcgaccatgtcttttgccttgatcaccgaagttatacatcacaccaatgcccaaatgcaaacatgaaagacgtcactgtcctcatctgcccactctgtgctaaaggtgttcgcctcaatccaagtgaagacccaaatatcacctgggatactcatgttaacactgattgtgatccatcaaattaccaaaaagtgatgaagaaaaagaaatgccctgttcctgggtgcagagagacactgacattttccaacaccatcagatgcaaagattgcaccagagaacactgcctaaagcacagatttgggcctgatcataagtgcccaggaccaagaaaagtggattctggctttccctttgtaagcatgctaaggagaagtcagaaagcggagacacgctcaaatagcagtaacaacaatggttcttcgtggtggagctccagtcttgtgaatgcagcaacgaatttcaaatcatcagccgaagctggaatgcagaagctgagcaccgtgactagccaagccttccagaaggctaaggatgggatcgccccaaatagcagcagcagcagtggtgaccttgtggagcaatgtgttcactgcccagcaagattttccaccgtgggggccttaattgaacatgttgagaaatcccaccagatcaactcacaaccaagtcatggccgagtgacgattgatgtttgcccaaaatgcagcaaggcgttccgggatcctgtgttgcttgtggagcatgttgagaaggagcatggaggaacgtcaagagtgtagtgtaaagcttcgtgtgtgctcttaacctttgtaatgtgtaacttttcgttaccttttctcatttcatcaatttgattatactctacacttttgggctcaacatttgcccacaggacaagtatattacgctggattgaaggcaaagcagccattgtccatcattatagaaactgaagtaagatttgttaagaaaatgttaatatctgtcgcaactggtg

SEQ ID NO: 12657 - protein, 290 aa, Zea mays subsp. mays
  peptide (1)..(290): Ceres Seq. ID no. 12343928
MGTPEFPNLGKHCSVGDCNQIDFLPFTCDRCDHVFCLDHRSYTSHQCPNANMKDVTVLICPLCAKGVRLNPSEDPNITWDTHVNTDCDPSNYQKVMKKKKCPVPGCRETLTFSNTIRCKDCTREHCLKHRFGPDHKCPGPRKVDSGFPFVSMLRRSQKAETRSNSSNNNGSSWWSSSLVNAATNFKSSAEAGMQKLSTVTSQAFQKAKDGIAPNSSSSSGDLVEQCVHCPARFSTVGALIEHVEKSHQINSQPSHGRVTIDVCPKCSKAFRDPVLLVEHVEKEHGGTSRV

SEQ ID NO: 12658 - protein, 239 aa, Zea mays subsp. mays
  peptide (1)..(239): Ceres Seq. ID no. 12343929
MKDVTVLICPLCAKGVRLNPSEDPNITWDTHVNTDCDPSNYQKVMKKKKCPVPGCRETLTFSNTIRCKDCTREHCLKHRFGPDHKCPGPRKVDSGFPFVSMLRRSQKAETRSNSSNNNGSSWWSSSLVNAATNFKSSAEAGMQKLSTVTSQAFQKAKDGIAPNSSSSSGDLVEQCVHCPARFSTVGALIEHVEKSHQINSQPSHGRVTIDVCPKCSKAFRDPVLLVEHVEKEHGGTSRV

SEQ ID NO: 12659 - protein, 195 aa, Zea mays subsp. mays
  peptide (1)..(195): Ceres Seq. ID no. 12343930
MKKKKCPVPGCRETLTFSNTIRCKDCTREHCLKHRFGPDHKCPGPRKVDSGFPFVSMLRRSQKAETRSNSSNNNGSSWWSSSLVNAATNFKSSAEAGMQKLSTVTSQAFQKAKDGIAPNSSSSSGDLVEQCVHCPARFSTVGALIEHVEKSHQINSQPSHGRVTIDVCPKCSKAFRDPVLLVEHVEKEHGGTSRV

SEQ ID NO: 12660 - DNA, 1231 bp, Zea mays subsp. mays
  misc_feature (1)..(1231): Ceres Seq. ID no. 12344599
  misc_feature (1)..(1231): Ortholog of  Ceres SEQ ID NO 13600652 as cited in SEQ ID NO 388
agagttatgttcactccacaagacaatcacactagagtactggacggagtcgaggagcaggcgacaccttcaccgcttcggtaacggatcgacaggcgacagctcacagctggcggtggtttggctcggggacggggtgcggcggcctccgcgagcagttcggcagcgacacggcgcggggggtggggcgccttgctggctggtgtagcgtagtgcggggccacaacgaggaagcggtggcatccagcaggcaccatcagaaaaccacatggctcggcaaccttggagcaataatggccatagaaattccccttcaaattcattagatggaggagttcctggacccatgcctctggtccctttccaggaggaacttgcagttggttgtgaagagattcgtagaattgctgctgataatactcttgtgctagaggatattctgggccttaggcaagaattagctgtcattgaagacgagatccatatacttgccaaacaaaccattcccagacttcgtgttgataatgaaatggaatacagggatattatccagggaggcatgaagttagaggaacagatgcatgctcttaaacttatcaaggaagaagtgttggtcctaagttctgaaaagatggagttggaagctttgtgcaaagagctatctgtgaaggttcagtcattgtacagggagctggagcagatccaatccgagaacaagcagatacctgctataagagaagggttgcatgatatacaagaggagatttcgagggccaggatggcatacgagcatgagaaacgtgcaaaagttgagcttcttgaggagagtcaggccatagagagtgattttatcaacataaaaatggaagcacagagattgcggacagagctggagaagaggaggtctggtgtgttcaagcatcatgcatttggctcatactataaaagatagagcatggcattgcatcctccaactgataggtgggcgtcacaaagcgtagctaagggtttggtgtctattagagaaattaatcgaactcaggagtcaagaccaaatgcgtttgtctttcggatgagcagctgacatttatttgcgaacacgttgctattattatatctcattattaagtaggagtacaaattggacgattgaaagaagaatattatcaatttggtctttattgtactcctacttattttttctctcgaaaagtactcctacttatttttg

SEQ ID NO: 12661 - protein, 227 aa, Zea mays subsp. mays
  peptide (1)..(227): Ceres Seq. ID no. 12344600
MARQPWSNNGHRNSPSNSLDGGVPGPMPLVPFQEELAVGCEEIRRIAADNTLVLEDILGLRQELAVIEDEIHILAKQTIPRLRVDNEMEYRDIIQGGMKLEEQMHALKLIKEEVLVLSSEKMELEALCKELSVKVQSLYRELEQIQSENKQIPAIREGLHDIQEEISRARMAYEHEKRAKVELLEESQAIESDFINIKMEAQRLRTELEKRRSGVFKHHAFGSYYKR

SEQ ID NO: 12662 - protein, 201 aa, Zea mays subsp. mays
  peptide (1)..(201): Ceres Seq. ID no. 12344601
MPLVPFQEELAVGCEEIRRIAADNTLVLEDILGLRQELAVIEDEIHILAKQTIPRLRVDNEMEYRDIIQGGMKLEEQMHALKLIKEEVLVLSSEKMELEALCKELSVKVQSLYRELEQIQSENKQIPAIREGLHDIQEEISRARMAYEHEKRAKVELLEESQAIESDFINIKMEAQRLRTELEKRRSGVFKHHAFGSYYKR

SEQ ID NO: 12663 - protein, 140 aa, Zea mays subsp. mays
  peptide (1)..(140): Ceres Seq. ID no. 12344602
MEYRDIIQGGMKLEEQMHALKLIKEEVLVLSSEKMELEALCKELSVKVQSLYRELEQIQSENKQIPAIREGLHDIQEEISRARMAYEHEKRAKVELLEESQAIESDFINIKMEAQRLRTELEKRRSGVFKHHAFGSYYKR

SEQ ID NO: 12664 - DNA, 809 bp, Zea mays subsp. mays
  misc_feature (1)..(809): Ceres Seq. ID no. 12462322
  misc_feature (1)..(809): Ortholog of  Ceres SEQ ID NO 13598935 as cited in SEQ ID NO 1239
  misc_feature (1)..(809): Ortholog of  Ceres SEQ ID NO 13598171 as cited in SEQ ID NO 61357
acatatctccatctcacccgcgcgcccacgcgcctccaccacgccatccatcgcaatggccgccgccgccgcgctcctcctcctcctgtgcgccgcgtctctcgcgtccgcagccgccgacgacgggttgacgaccttcaaggtgtacttccacgacgtcgtggcggggacgaacccgacggcggtgcgcatcgcgcaggcggcgtcctccaacacgtcgtccaccaacttcggcgcggtggtggccatcgacgacccgctgacgacgggtcccacgcgcgccgcgggcacggaggtgggccgcgcccagggcacctacacgttcgcggaccagcagacgttcggcctcctcatggtcatgaacttcgtgttcacggccggcgagcacaacggcagcacgctctccatccttggccgcaacgaggtgctcagcgacgtccgcgagatgagcatngtcggcggcagcggcaagttccgcatggcgcgcgggtacgtgcaggcgcacaccatcgactccggcgccacctccgggaccaccgtcgtccagtacaccgtcaacgtcaaggcctagctacctgttacgtacccttgcttgcgactccgggccgtggcttntcgtacgtccatccatatctccggctgctttgtacacaccttgtctgtcgtctttgagcgggattcggatttgcagagccgaatttactactaaagtttcaaaatttcacagagttgtagggtcgagaattaaatgtgtcgaaaacacgttagcgaccattnttanatagtttttgttggaattttgttggccc

SEQ ID NO: 12665 - protein, 223 aa, Zea mays subsp. mays
  peptide (1)..(223): Ceres Seq. ID no. 12462323
  misc_feature (152)..(152): Xaa is any aa, unknown or other
  misc_feature (205)..(205): Xaa is any aa, unknown or other
TYLHLTRAPTRLHHAIHRNGRRRRAPPPPVRRVSRVRSRRRRVDDLQGVLPRRRGGDEPDGGAHRAGGVLQHVVHQLRRGGGHRRPADDGSHARRGHGGGPRPGHLHVRGPADVRPPHGHELRVHGRRAQRQHALHPWPQRGAQRRPRDEHXRRQRQVPHGARVRAGAHHRLRRHLRDHRRPVHRQRQGLATCYVPLLATPGRGXSYVHPYLRLLCTHLVCRL

SEQ ID NO: 12666 - protein, 189 aa, Zea mays subsp. mays
  peptide (1)..(189): Ceres Seq. ID no. 12462324
  misc_feature (151)..(151): Xaa is any aa, unknown or other
HISISPARPRASTTPSIAMAAAAALLLLLCAASLASAAADDGLTTFKVYFHDVVAGTNPTAVRIAQAASSNTSSTNFGAVVAIDDPLTTGPTRAAGTEVGRAQGTYTFADQQTFGLLMVMNFVFTAGEHNGSTLSILGRNEVLSDVREMSXVGGSGKFRMARGYVQAHTIDSGATSGTTVVQYTVNVKA

SEQ ID NO: 12667 - protein, 171 aa, Zea mays subsp. mays
  peptide (1)..(171): Ceres Seq. ID no. 12462325
  misc_feature (133)..(133): Xaa is any aa, unknown or other
MAAAAALLLLLCAASLASAAADDGLTTFKVYFHDVVAGTNPTAVRIAQAASSNTSSTNFGAVVAIDDPLTTGPTRAAGTEVGRAQGTYTFADQQTFGLLMVMNFVFTAGEHNGSTLSILGRNEVLSDVREMSXVGGSGKFRMARGYVQAHTIDSGATSGTTVVQYTVNVKA

SEQ ID NO: 12668 - DNA, 1436 bp, Zea mays subsp. mays
  misc_feature (1)..(1436): Ceres Seq. ID no. 12414721
  misc_feature (1)..(1436): Ortholog of  Ceres SEQ ID NO 13655338 as cited in SEQ ID NO 68882
aaaccgttggataaagacgctgcaaactgaatagggagcaagacggttccggagtccggactcaagtcccccaaaaatcccaatcgaacccgtccgcctatcgccccaaaccctcgcccagctcgaggtcctcgccgccggccgccggccgccgtctccgtccgaccgccgccatggctcgcaacgaggagaaggcgcagtcaatgctgaaccgcttcatcacgatgaagcaggaggagaagcgcaagccccgagagcgccggccctacctcgcctccgagtgccgggacctcgccgacgccgagcgctggcgctctgagatcctccgcgagatcggcgccaaggtcgccgagatccagaacgagggtctcggcgagcaccgcctccgcgacctcaacgacgagatcaacaaactcctccgcgagcgcggccactgggagcgccgcatcgtcgagctcggcggccgcgactactcccgcagctccaacgcgccgctcatgaccgacctcgacggcaacatagtcgccgtccccaacccctcgggtcgcggaccggggtaccgctactttggcgcggccaggaagctccctggcgtgcgggagctcttcgacaagccgcctgagatgcggaagcgacgcacccgctacgagatccacaagcgcatcaacgccgggtactacggatactatgacgatgaggacggcgtgctagagcgccttgagggccctgccgagaagcgcatgcgggaggagattgtttcagagtggcaccgtgtggaacgggtgcggcgggaggccatgaagggggtgatgagcggtgaggtggctgcggctggagggcgcagcggggaggctgctagagaggttctgtttgagggggtggaggaggaggtcgaagaggagaggaagcgcgaggaagagaagagagagagggagaaaggcgaggaagttgggagggaattcgttgcacatgtgccgctacctgatgaaaaggagattgagcgcatggtattagagaggaagaagaaggagctgcttagcaagtatgccagcgattccctgctggttgagcaggaggaggccaaggagatgctcaatgtccgacgctagaagacgactggccaattgaagctttcattgtgagctcaagacgagcactgaggtacaagaaggaacatcttttgaagtgctggcaccggggggaccaaagacattgttatgtaaaagaaaacaggtttgcctgaaatcacattttatgtgtttaatcagacttgagcgagtgatactggtgcctgtgtgccctgaacgaaggctagacttgtggtattgatgtgcctgtgtgcactgtaacttaactcgtatcatgtacagccattggctgcaatgcactgatcattgatcccttaaaatttcagtgatatagcaaaatctgatcgt

SEQ ID NO: 12669 - protein, 311 aa, Zea mays subsp. mays
  peptide (1)..(311): Ceres Seq. ID no. 12414722
MARNEEKAQSMLNRFITMKQEEKRKPRERRPYLASECRDLADAERWRSEILREIGAKVAEIQNEGLGEHRLRDLNDEINKLLRERGHWERRIVELGGRDYSRSSNAPLMTDLDGNIVAVPNPSGRGPGYRYFGAARKLPGVRELFDKPPEMRKRRTRYEIHKRINAGYYGYYDDEDGVLERLEGPAEKRMREEIVSEWHRVERVRREAMKGVMSGEVAAAGGRSGEAAREVLFEGVEEEVEEERKREEEKREREKGEEVGREFVAHVPLPDEKEIERMVLERKKKELLSKYASDSLLVEQEEAKEMLNVRR

SEQ ID NO: 12670 - protein, 301 aa, Zea mays subsp. mays
  peptide (1)..(301): Ceres Seq. ID no. 12414723
MLNRFITMKQEEKRKPRERRPYLASECRDLADAERWRSEILREIGAKVAEIQNEGLGEHRLRDLNDEINKLLRERGHWERRIVELGGRDYSRSSNAPLMTDLDGNIVAVPNPSGRGPGYRYFGAARKLPGVRELFDKPPEMRKRRTRYEIHKRINAGYYGYYDDEDGVLERLEGPAEKRMREEIVSEWHRVERVRREAMKGVMSGEVAAAGGRSGEAAREVLFEGVEEEVEEERKREEEKREREKGEEVGREFVAHVPLPDEKEIERMVLERKKKELLSKYASDSLLVEQEEAKEMLNVRR

SEQ ID NO: 12671 - protein, 294 aa, Zea mays subsp. mays
  peptide (1)..(294): Ceres Seq. ID no. 12414724
MKQEEKRKPRERRPYLASECRDLADAERWRSEILREIGAKVAEIQNEGLGEHRLRDLNDEINKLLRERGHWERRIVELGGRDYSRSSNAPLMTDLDGNIVAVPNPSGRGPGYRYFGAARKLPGVRELFDKPPEMRKRRTRYEIHKRINAGYYGYYDDEDGVLERLEGPAEKRMREEIVSEWHRVERVRREAMKGVMSGEVAAAGGRSGEAAREVLFEGVEEEVEEERKREEEKREREKGEEVGREFVAHVPLPDEKEIERMVLERKKKELLSKYASDSLLVEQEEAKEMLNVRR

SEQ ID NO: 12672 - DNA, 1913 bp, Zea mays subsp. mays
  misc_feature (1)..(1913): Ceres Seq. ID no. 12414708
  misc_feature (1)..(1913): Ortholog of  Ceres SEQ ID NO 15176532 as cited in SEQ ID NO 58184
  misc_feature (1)..(1913): Ortholog of  Ceres SEQ ID NO 14303627 as cited in SEQ ID NO 62070
  misc_feature (1)..(1913): Ortholog of  Ceres SEQ ID NO 13597546 as cited in SEQ ID NO 65017
  misc_feature (1)..(1913): Ortholog of  Ceres SEQ ID NO 14308015 as cited in SEQ ID NO 65798
  misc_feature (1)..(1913): Ortholog of  Ceres SEQ ID NO 14307912 as cited in SEQ ID NO 66380
  misc_feature (1)..(1913): Ortholog of  Ceres SEQ ID NO 15176077 as cited in SEQ ID NO 66728
  misc_feature (1)..(1913): Ortholog of  Ceres SEQ ID NO 14307908 as cited in SEQ ID NO 67189
  misc_feature (1)..(1913): Ortholog of  Ceres SEQ ID NO 14308045 as cited in SEQ ID NO 67444
  misc_feature (1)..(1913): Ortholog of  Ceres SEQ ID NO 13654353 as cited in SEQ ID NO 68318
aaagagagaagggagaggcgagggagctcaccaggagagaggggcctgtgcgtgagcattgagcaaagcaaaggaagcagtacatacatacatatttctctcgctcgctcgcagagaggcccggccggccggctccatgcaacaagggaggacgacgagcggtggcggtgggcgatgatgatgatgatgatggcgggggagcacgtgctggccgctctgggcaccctactgctggcctcgctcctgaccctggtgctgaaccacttcctgcccttgcttctgaaccccaaggcccccaggggaagcttcgggtggccgctcctcggcgagacgctcaggttcctcacgccgcacgcctccaacacgctgggcggcttcctcgaggatcactgctccaggtatgggcgggtgttcaagtcccacctgttctgcaccccgacggtggtgtcctgcgaccaggacctcaaccacttcatcctgcagaacgaggagcggctgttccagtgcagctacccgaggccgatccatggcatcctgggcaagtcctccatgctcgtcgtcctgggcgaggaccacaagcgcctcaggaacctggccctcgccctcgtcacctccaccaagctcaagcccagctacctaggcgacatcgagaagatcgcgctgcacgtcgtcggcgcatggcgacggcacggcagcagcggcggcgtcagggtcgtcgcattctgcgaggaggcaagaaagttcgcattcagtgtgatagtgaagcaggtgctggggctgtcgccagaggagccggtcactgcaaggatactggaggacttcctggccttcatgaagggactcatctccttccccctctacatcccagggaccccatatgccaaggctgtccgggcgagagagaggatatccagcactgtgaagggcatcatcaaggagcggaggagcgctgggtcatggaacaagcagggcgacttccttgacgtgctgctgtcaagcaacgagctatctgacgaggagaaagtgagctttgtgctggactccctgctgggagggtatgagaccacctcgctcctcatctccatggtcgtttatttccttggccagtctgctcaagatctggacctggttaagagggagcacgacagcataagatccaacaaaggcaaggaggagtgcttgacttcagaagactacaagaagatggaatatacccaacaagtcatcaacgaggcgctgagatgcggcaacatcgtcaagttcgtccaccggaaggcgctgaaagacgtcaaatacaaagagtatctgattccatctggctggaaggtcctaccggtcttcactgccgttcatctgaacccctcacttcatggagacgcgcagcagtttcagccctgtaggtgggagggcacaagccaagggacaagcaagaggtttacaccgttcggtggtggcccccggctctgcccaggatcagagctcgctaaagtggagactgctttcttcctccatcaccttgtcctcaattatagatggagaattgatggcgatgacattccaatggcatacccgtatgtggagtttcagagaggtctgccaatagaaatcgagccaacgtcccctgaatcttgactgtcctggagctacagccatcagttatcacaccagagagaaaaggggaaggtgcatggagtatacatgaatggtcagtgacagatctcacaagtgaaggaacactgagggcgcgtgctagtagctagcatatgaggcagctgagactgtaatttaatgtacatggtgtagatatattttgtccatggcaattgcttgaagtggctgattcacttcaccctgtaaaacattctccagtggtttcaactgctatcctataaaaaagaagggcccctgtgttt

SEQ ID NO: 12673 - protein, 543 aa, Zea mays subsp. mays
  peptide (1)..(543): Ceres Seq. ID no. 12414709
KERRERRGSSPGERGLCVSIEQSKGSSTYIHISLARSQRGPAGRLHATREDDERWRWAMMMMMMAGEHVLAALGTLLLASLLTLVLNHFLPLLLNPKAPRGSFGWPLLGETLRFLTPHASNTLGGFLEDHCSRYGRVFKSHLFCTPTVVSCDQDLNHFILQNEERLFQCSYPRPIHGILGKSSMLVVLGEDHKRLRNLALALVTSTKLKPSYLGDIEKIALHVVGAWRRHGSSGGVRVVAFCEEARKFAFSVIVKQVLGLSPEEPVTARILEDFLAFMKGLISFPLYIPGTPYAKAVRARERISSTVKGIIKERRSAGSWNKQGDFLDVLLSSNELSDEEKVSFVLDSLLGGYETTSLLISMVVYFLGQSAQDLDLVKREHDSIRSNKGKEECLTSEDYKKMEYTQQVINEALRCGNIVKFVHRKALKDVKYKEYLIPSGWKVLPVFTAVHLNPSLHGDAQQFQPCRWEGTSQGTSKRFTPFGGGPRLCPGSELAKVETAFFLHHLVLNYRWRIDGDDIPMAYPYVEFQRGLPIEIEPTSPES

SEQ ID NO: 12674 - protein, 485 aa, Zea mays subsp. mays
  peptide (1)..(485): Ceres Seq. ID no. 12414710
MMMMMMAGEHVLAALGTLLLASLLTLVLNHFLPLLLNPKAPRGSFGWPLLGETLRFLTPHASNTLGGFLEDHCSRYGRVFKSHLFCTPTVVSCDQDLNHFILQNEERLFQCSYPRPIHGILGKSSMLVVLGEDHKRLRNLALALVTSTKLKPSYLGDIEKIALHVVGAWRRHGSSGGVRVVAFCEEARKFAFSVIVKQVLGLSPEEPVTARILEDFLAFMKGLISFPLYIPGTPYAKAVRARERISSTVKGIIKERRSAGSWNKQGDFLDVLLSSNELSDEEKVSFVLDSLLGGYETTSLLISMVVYFLGQSAQDLDLVKREHDSIRSNKGKEECLTSEDYKKMEYTQQVINEALRCGNIVKFVHRKALKDVKYKEYLIPSGWKVLPVFTAVHLNPSLHGDAQQFQPCRWEGTSQGTSKRFTPFGGGPRLCPGSELAKVETAFFLHHLVLNYRWRIDGDDIPMAYPYVEFQRGLPIEIEPTSPES

SEQ ID NO: 12675 - protein, 484 aa, Zea mays subsp. mays
  peptide (1)..(484): Ceres Seq. ID no. 12414711
MMMMMAGEHVLAALGTLLLASLLTLVLNHFLPLLLNPKAPRGSFGWPLLGETLRFLTPHASNTLGGFLEDHCSRYGRVFKSHLFCTPTVVSCDQDLNHFILQNEERLFQCSYPRPIHGILGKSSMLVVLGEDHKRLRNLALALVTSTKLKPSYLGDIEKIALHVVGAWRRHGSSGGVRVVAFCEEARKFAFSVIVKQVLGLSPEEPVTARILEDFLAFMKGLISFPLYIPGTPYAKAVRARERISSTVKGIIKERRSAGSWNKQGDFLDVLLSSNELSDEEKVSFVLDSLLGGYETTSLLISMVVYFLGQSAQDLDLVKREHDSIRSNKGKEECLTSEDYKKMEYTQQVINEALRCGNIVKFVHRKALKDVKYKEYLIPSGWKVLPVFTAVHLNPSLHGDAQQFQPCRWEGTSQGTSKRFTPFGGGPRLCPGSELAKVETAFFLHHLVLNYRWRIDGDDIPMAYPYVEFQRGLPIEIEPTSPES

SEQ ID NO: 12676 - DNA, 855 bp, Zea mays subsp. mays
  misc_feature (1)..(855): Ceres Seq. ID no. 12365042
  misc_feature (1)..(855): Ortholog of  Ceres SEQ ID NO 12584421 as cited in SEQ ID NO 68035
attcatgatggcaatggcacagagagaggtgagtccagcgttcatcctctttacgtctcccgcgtttcgttccctggctggtacggtacccgtcgtcgtgcgaacccaagacacccgcagagtgctcgaccaaatgcgacactaggttaggtgcttctactccacggcgatcacccagctgctacccaactgtcgcaggccgacgcgccgagcgagggcgccgccgccgccgtctccggcgtcatggcggtgaagctcaaggacctggtcccggccgcgaccaacacggtgaacacgacgttcatcgtgctcgacaaggcggcgccgtcgacccgccgacagggcggcgccagggaggagacgtgcctggcgctggtggcggacgagaccgcggcggcgcacttcctgctgtggggcgccgagtgcggcgcgttcgagccgggcgacatcgtgcggctcacggacggcatcttctcgtaccacagggggaacgtcctggtgctgcgggcgggccgccgcgggcgcgccgagaaggtgggcgagttcgccatgctcttcgtggagacccccaacatgagcgagctccagtgggggcccgaccccagcgacggccggaggatggtgcaggaggccgtcgtctcgccttactcccagatcttcaagccgctgcggtgatcttcttactactgagaaacatgatactaggggtacgaacttacgatgaagaagaacgaaaaagaagggcttaaagctctgtctgtcttccaaagtgacaaggttacagcttacaacatgttcaaccatacaattatatcttccactgtgcaattatatgtttcattcacagtttgctgc

SEQ ID NO: 12677 - protein, 143 aa, Zea mays subsp. mays
  peptide (1)..(143): Ceres Seq. ID no. 12365043
MAVKLKDLVPAATNTVNTTFIVLDKAAPSTRRQGGAREETCLALVADETAAAHFLLWGAECGAFEPGDIVRLTDGIFSYHRGNVLVLRAGRRGRAEKVGEFAMLFVETPNMSELQWGPDPSDGRRMVQEAVVSPYSQIFKPLR

SEQ ID NO: 12678 - DNA, 967 bp, Zea mays subsp. mays
  misc_feature (1)..(967): Ceres Seq. ID no. 12343734
  misc_feature (1)..(967): Ortholog of  Ceres SEQ ID NO 13594992 as cited in SEQ ID NO 55798
  misc_feature (1)..(967): Ortholog of  Ceres SEQ ID NO 14308171 as cited in SEQ ID NO 58912
cccaatcctcccgccgcggcgacgccttcccctccctccttcctccgtcccatgctccgccgctgacacgttggcccgacttaaccttacgatggccgccgcctccgccatcaccgccgtctccggcgttgtgcttccccaaaccttcctatccccccggtcgccgccgccgcaggtcctagccgtggcctcctcattccgccggctctccttgtgcgcttcccctcgccggatcactcacataatcccccgcgctgatgcaagtgccgaagctggagaaccggagcctgtcactgcttcagatgaatccgaagaggaggtggccgaggggtctgtcgctgtggcggagggggaggaaccgacgccgccgagcaagccgaaggttaagttcggcgaaataattgggattctgaataagcagttcattgaggaggctgagaaggtgaagactgtaccggatctgaggcctggcgatatcattgagcttaggatgcaacggcccaacaaaaggagattgtcgctctttaagggcataatcatcgcaaagcacaaagctggtgttcacaccacaatccgtgtcagaaggatcattgctggtgtaggagttgagattaccttcccagtgtactcacccaggatcaaggaaatcacggttatcaggcacaagaaagtgaggagagcaaagttgtactacctgaaagacaagcttccccgcttttcaacattcaagtgaaatcagatatgctgacagaacgactttttccaccaccatctcgatttctcttaaacctttttttttcacttccctatcgatatcatcatatttcactgtaatctctgggtatcagatgtgtaatatctacagctttatatcatacttggcttagtgcaatgttttgtttgttgtcagtgtacaaaattcatactagcaccttgttattatgaatttgcaaatacaaggttatgc

SEQ ID NO: 12679 - protein, 243 aa, Zea mays subsp. mays
  peptide (1)..(243): Ceres Seq. ID no. 12343735
PILPPRRRLPLPPSSVPCSAADTLARLNLTMAAASAITAVSGVVLPQTFLSPRSPPPQVLAVASSFRRLSLCASPRRITHIIPRADASAEAGEPEPVTASDESEEEVAEGSVAVAEGEEPTPPSKPKVKFGEIIGILNKQFIEEAEKVKTVPDLRPGDIIELRMQRPNKRRLSLFKGIIIAKHKAGVHTTIRVRRIIAGVGVEITFPVYSPRIKEITVIRHKKVRRAKLYYLKDKLPRFSTFK

SEQ ID NO: 12680 - protein, 213 aa, Zea mays subsp. mays
  peptide (1)..(213): Ceres Seq. ID no. 12343736
MAAASAITAVSGVVLPQTFLSPRSPPPQVLAVASSFRRLSLCASPRRITHIIPRADASAEAGEPEPVTASDESEEEVAEGSVAVAEGEEPTPPSKPKVKFGEIIGILNKQFIEEAEKVKTVPDLRPGDIIELRMQRPNKRRLSLFKGIIIAKHKAGVHTTIRVRRIIAGVGVEITFPVYSPRIKEITVIRHKKVRRAKLYYLKDKLPRFSTFK

SEQ ID NO: 12681 - DNA, 1038 bp, Zea mays subsp. mays
  misc_feature (1)..(1038): Ceres Seq. ID no. 12344880
  misc_feature (1)..(1038): Ortholog of  Ceres SEQ ID NO 13594482 as cited in SEQ ID NO 51285
  misc_feature (1)..(1038): Ortholog of  Ceres SEQ ID NO 12617583 as cited in SEQ ID NO 64897
aaggcaggctgcgacgtcacggtttggaacaggaccaagagcaagtgcgatcccctcctcagtctcggtgccaagtacgagcctacaccggcccaagtcgcttcatcttgtgacgtgacattcgcgatgctcgctgatccacaaagcgcggctgaggttgcatgtgggtccagtggagctgctgaagggttggcccctgggaaaggctatgtcgatgtgtcgacggttgatggtgctacatccaagctgattggtgaacgcattacaagtactggagcatctttccttgaggctccagtttcaggctcgaaaaaaccagcagaagatgggctgctcatctttcttactgcaggtgatgagtccttgtacaagagagtggcgcccctccttgatgtcatggggaagtcaaggttttatcttggcgatgtaggcaatggtgctgcaatgaagctcgtggttaacatggtcatgggggagcatgatggtttccttctcagaagggttgctcctgagtgaaaaagtcggtttagacccgaatactctcgtcgaggttatttcccagggtgctatcagtgcccccatgttctctctcaagggcccatccatggttaaagctgcatatcctcctgcatttcctctgaagcatcaacagaaggacttgaggctcgcattggccctggcggaatcggtgtcccagtccattcctacagttgcagctgcgaacgagctgtacaaggctgcaaaatcgctcggccttagtgaccacgacttctcggcggttattgaagcgctgaaagccaaagtgcagagccagagctcacaatagtagttgcctgttcagcagagctcacagtagttgttgcctcttcagcagctaccattgaggcagcattttgtctcgatggatgaagttgacacttaggaaaatttctcaagatcgctacagaaaagtctcagaacaatacaatttctgtattcgtaaatattttctcaaacatcacaacgacgacatttccttaaggaagaaaaaaaactttc

SEQ ID NO: 12682 - protein, 171 aa, Zea mays subsp. mays
  peptide (1)..(171): Ceres Seq. ID no. 12344881
KAGCDVTVWNRTKSKCDPLLSLGAKYEPTPAQVASSCDVTFAMLADPQSAAEVACGSSGAAEGLAPGKGYVDVSTVDGATSKLIGERITSTGASFLEAPVSGSKKPAEDGLLIFLTAGDESLYKRVAPLLDVMGKSRFYLGDVGNGAAMKLVVNMVMGEHDGFLLRRVAPE

SEQ ID NO: 12683 - protein, 129 aa, Zea mays subsp. mays
  peptide (1)..(129): Ceres Seq. ID no. 12344882
MLADPQSAAEVACGSSGAAEGLAPGKGYVDVSTVDGATSKLIGERITSTGASFLEAPVSGSKKPAEDGLLIFLTAGDESLYKRVAPLLDVMGKSRFYLGDVGNGAAMKLVVNMVMGEHDGFLLRRVAPE

SEQ ID NO: 12684 - protein, 115 aa, Zea mays subsp. mays
  peptide (1)..(115): Ceres Seq. ID no. 12344883
MMVSFSEGLLLSEKVGLDPNTLVEVISQGAISAPMFSLKGPSMVKAAYPPAFPLKHQQKDLRLALALAESVSQSIPTVAAANELYKAAKSLGLSDHDFSAVIEALKAKVQSQSSQ

SEQ ID NO: 12685 - DNA, 1412 bp, Zea mays subsp. mays; identical to SEQ ID NO: 7183
  misc_feature (1)..(1412): Ceres Seq. ID no. 12556700
  misc_feature (1)..(1412): Ortholog of  Ceres SEQ ID NO 15177654 as cited in SEQ ID NO 59933
  misc_feature (1)..(1412): Ortholog of  Ceres SEQ ID NO 14303600 as cited in SEQ ID NO 64632
  misc_feature (1)..(1412): Ortholog of  Ceres SEQ ID NO 14302776 as cited in SEQ ID NO 66919

SEQ ID NO: 12686 - protein, 365 aa, Zea mays subsp. mays; identical to SEQ ID NO: 7184
  peptide (1)..(365): Ceres Seq. ID no. 12556701

SEQ ID NO: 12687 - protein, 273 aa, Zea mays subsp. mays; identical to SEQ ID NO: 7185
  peptide (1)..(273): Ceres Seq. ID no. 12556702

SEQ ID NO: 12688 - protein, 262 aa, Zea mays subsp. mays; identical to SEQ ID NO: 7186
  peptide (1)..(262): Ceres Seq. ID no. 12556703

SEQ ID NO: 12689 - DNA, 1980 bp, Zea mays subsp. mays
  misc_feature (1)..(1980): Ceres Seq. ID no. 12450491
  misc_feature (1)..(1980): Ortholog of  Ceres SEQ ID NO 14307904 as cited in SEQ ID NO 66440
  misc_feature (1)..(1980): Ortholog of  Ceres SEQ ID NO 13659971 as cited in SEQ ID NO 67565
aaaccttctcccctttcctcagaccccaggccccagcccggcaagcagacatgggcaaccgtgcgtcgcgccaccaccgccaagccgccgagcagcaaccggcgacgccgaccctgccgaagccccagccccagatccagccgccgcctccgcctccgccgacgcagacgcagcagtaccagcaggcgccgccgcagtcgcagcagaagccgaagccggcggcggacgtgggggcggtggggcgcgtgctggggcggcccatggaggacgtgcgcgcgacctacactttcggccgcgagctcgggcggggccagttcggggtcacctacctcgtcacgcactcggagaccgggcagcgcttcgcctgcaagtccatcgccacgcggaagctcgtccaccgcgacgacattgaggacgtgcgccgggaggtgcagatcatgcaccacctcacgggccaccgcaacatcgtcgagctccggggagcatacgaggacaggcactcggtcaaccttgttatggagctctgcgagggcggggagctcttcgaccgcatcatagccaagggccactacaccgagcgagccgccgcctcgctctgccgcgagatcgtcgccgtcgtccacagctgccactccatgggggtcttccatcgggatctcaagcccgagaacttcctgttcctcaataacaaggaggactccccgctcaaggccacggacttcggtctctccgtcttcttcaagcacggggagacgtttaaggatcttgtgggaagtgcatattatgttgctcctgaggtactgaaacggaaatatggggcagaggctgacatatggagtgctggggtcattctttacatccttctgtctggtgttcctcctttttgggcagagaatgaggatggcatatttgatgctgtcttgcgcggtcacatcgatttctcttctgacccttggccttcaatatccaatggtgcaaaggatttggttaagaagatgctgcgacaagacccaaaagaacgcctgactgctgctgaaattttgaaccacccatggattagagaggatggagaggccccagataagccacttgacattactgtcattggtagaatgaaacagttcagggcaatgaacaagctcaagaaagttgcattgaaggttgtggctgagaacttatcagatgaagagattatgggcctaaaagaaatgttcagatccctggatacagataacagtgggacaattactcttgaagagctaagatctggtttaccaaaacttggtacaaaaatttctgaatcagaaattaaacaattgatggaggcggctgatgttgatggaaatggtaccattgattatgcggagtttatatcagccacaatgcatttgaatagattggagaaggaagaccacatactcaaagcttttgaatatttcgataaggatcacagcggatacataaccgtagatgagttggaagaagctttgaagaagtatgatatgggagatgacaaaactataaaagaaatcattgctgaagtagatacagatcatgatggaagaattaattaccaggagtttgttgccatgatgaggaacaacagccctgagattgttccaaatcggaggcgcatgttctaactgtcatggacaatcacattgaatactttcaagaacaatctgcccttagacataatctttgtcccattttctttttggaacagccgttaagaagactccttaatttgagatccatgtctctgctgcccggacctgtttgtcccaaaatagggtggtgttatagtgattcgtacttgatgctttgagcttcatggactcttgcgtggcaatgtttatccccattgtacgtctggttgttctgctgcttcgatctgaggctttctttaggtgtaaacggatatctgaattattaggataaatttaatattttaaaatagatatgtataaaatttgatgc

SEQ ID NO: 12690 - protein, 546 aa, Zea mays subsp. mays
  peptide (1)..(546): Ceres Seq. ID no. 12450492
TFSPFLRPQAPARQADMGNRASRHHRQAAEQQPATPTLPKPQPQIQPPPPPPPTQTQQYQQAPPQSQQKPKPAADVGAVGRVLGRPMEDVRATYTFGRELGRGQFGVTYLVTHSETGQRFACKSIATRKLVHRDDIEDVRREVQIMHHLTGHRNIVELRGAYEDRHSVNLVMELCEGGELFDRIIAKGHYTERAAASLCREIVAVVHSCHSMGVFHRDLKPENFLFLNNKEDSPLKATDFGLSVFFKHGETFKDLVGSAYYVAPEVLKRKYGAEADIWSAGVILYILLSGVPPFWAENEDGIFDAVLRGHIDFSSDPWPSISNGAKDLVKKMLRQDPKERLTAAEILNHPWIREDGEAPDKPLDITVIGRMKQFRAMNKLKKVALKVVAENLSDEEIMGLKEMFRSLDTDNSGTITLEELRSGLPKLGTKISESEIKQLMEAADVDGNGTIDYAEFISATMHLNRLEKEDHILKAFEYFDKDHSGYITVDELEEALKKYDMGDDKTIKEIIAEVDTDHDGRINYQEFVAMMRNNSPEIVPNRRRMF

SEQ ID NO: 12691 - protein, 530 aa, Zea mays subsp. mays
  peptide (1)..(530): Ceres Seq. ID no. 12450493
MGNRASRHHRQAAEQQPATPTLPKPQPQIQPPPPPPPTQTQQYQQAPPQSQQKPKPAADVGAVGRVLGRPMEDVRATYTFGRELGRGQFGVTYLVTHSETGQRFACKSIATRKLVHRDDIEDVRREVQIMHHLTGHRNIVELRGAYEDRHSVNLVMELCEGGELFDRIIAKGHYTERAAASLCREIVAVVHSCHSMGVFHRDLKPENFLFLNNKEDSPLKATDFGLSVFFKHGETFKDLVGSAYYVAPEVLKRKYGAEADIWSAGVILYILLSGVPPFWAENEDGIFDAVLRGHIDFSSDPWPSISNGAKDLVKKMLRQDPKERLTAAEILNHPWIREDGEAPDKPLDITVIGRMKQFRAMNKLKKVALKVVAENLSDEEIMGLKEMFRSLDTDNSGTITLEELRSGLPKLGTKISESEIKQLMEAADVDGNGTIDYAEFISATMHLNRLEKEDHILKAFEYFDKDHSGYITVDELEEALKKYDMGDDKTIKEIIAEVDTDHDGRINYQEFVAMMRNNSPEIVPNRRRMF

SEQ ID NO: 12692 - protein, 460 aa, Zea mays subsp. mays
  peptide (1)..(460): Ceres Seq. ID no. 12450494
MEDVRATYTFGRELGRGQFGVTYLVTHSETGQRFACKSIATRKLVHRDDIEDVRREVQIMHHLTGHRNIVELRGAYEDRHSVNLVMELCEGGELFDRIIAKGHYTERAAASLCREIVAVVHSCHSMGVFHRDLKPENFLFLNNKEDSPLKATDFGLSVFFKHGETFKDLVGSAYYVAPEVLKRKYGAEADIWSAGVILYILLSGVPPFWAENEDGIFDAVLRGHIDFSSDPWPSISNGAKDLVKKMLRQDPKERLTAAEILNHPWIREDGEAPDKPLDITVIGRMKQFRAMNKLKKVALKVVAENLSDEEIMGLKEMFRSLDTDNSGTITLEELRSGLPKLGTKISESEIKQLMEAADVDGNGTIDYAEFISATMHLNRLEKEDHILKAFEYFDKDHSGYITVDELEEALKKYDMGDDKTIKEIIAEVDTDHDGRINYQEFVAMMRNNSPEIVPNRRRMF

SEQ ID NO: 12693 - DNA, 1549 bp, Zea mays subsp. mays
  misc_feature (1)..(1549): Ceres Seq. ID no. 12414516
  misc_feature (1)..(1549): Ortholog of  Ceres SEQ ID NO 13581327 as cited in SEQ ID NO 51165
  misc_feature (1)..(1549): Ortholog of  Ceres SEQ ID NO 12610002 as cited in SEQ ID NO 55823
  misc_feature (1)..(1549): Ortholog of  Ceres SEQ ID NO 14308310 as cited in SEQ ID NO 58573
  misc_feature (1)..(1549): Ortholog of  Ceres SEQ ID NO 14308795 as cited in SEQ ID NO 59140
  misc_feature (1)..(1549): Ortholog of  Ceres SEQ ID NO 14313354 as cited in SEQ ID NO 61520
  misc_feature (1)..(1549): Ortholog of  Ceres SEQ ID NO 13596744 as cited in SEQ ID NO 62765
atggacacttggacacctgccttctctccttccttccatccattcctccctgtctccgccctcttctcactcccgtaggccgtggtgccgccgccgactgctgggaccgccctacaccaagtgcccaggtcatcttcgggccattcgccggcgacgagcaccaccaggtgtgccaggttgaccgagctatggacagcctgtggcatcttggggacgagctccgcggngcagcccaaggtggtggaggaccgccagtggtctctcatgacgtccaagctggcggagatcaccaggtccaagggcgagaggatgaacactgtccctgacgccaagcagtgggacaagacgtcctaccagcttcacgacgacagcaggatgggccacatcaacctcggcctcatgaaccttgatctcaagatgaacgaggctgccgccatgaagctccccttccgtggcatgccctataacatgaaccagatgtacctcaaggggagcaatgccaattccaatgtcaatgcgttcaagatgaatgttggggtcaacaagtactccaatagtccaaacgggaaagacgccaatgggaaaaacaatggcggcaacaacaacaatgggagcgccaacggcacttctgtggctgacaagcgcttcaagacattgccgacgagtgagatgctaccgaggaatgaagtccttggtggatacatctttgtctgcaacaacgataccatgcaggaggatctcaagaggcagctttttggtttgccagcaagatatcgtgattcagtccgagcaatcactcctggcttgcctcttttcctctataactacacaacccaccagcttcatggggtatttgaggctgccagttttggtgggtccaatatcgatcctactgcatgggaggataagaagtgtaaaggtgaatctagattcccagcgcaggtgaggatctgcattaggaagctgtgcaagccgttggaagaggattccttcaggccagttttgcaccattatgatgggccaaagttccgccttgagctctccatcgcggagacattgtcactgctagacctatgcgggaaggaaggcatctgagctgtcgaggaggtggtggtggttgccttgtgagcttctagtaaataccaatcatctttgtatgttttgtggatggtggttggcaacgttgtttatttatgcacaagctgctgctggtttcgggatggaaggaaggacctggtccctgaaacaagctgcggagagtgatcctgtcagtgtattgtgtctggcgtggtcaagaaccaaatcaatgttggaccgaccgactgagagtttggagtgtgtatgttttgctattactcttatctctagtagagtgtgggtatacctgggcagaatgtgtccccaaaagttgggggcctgtctgtgtactgtgtgcgatggacgccctaagtaaaaaaagggcaggtgatggtcgtgctccaggtttgtgttttgtactctgttgtaccttgaacctcctttgcgttttgcctaatcagagaatgagtgc

SEQ ID NO: 12694 - protein, 276 aa, Zea mays subsp. mays
  peptide (1)..(276): Ceres Seq. ID no. 12414517
MTSKLAEITRSKGERMNTVPDAKQWDKTSYQLHDDSRMGHINLGLMNLDLKMNEAAAMKLPFRGMPYNMNQMYLKGSNANSNVNAFKMNVGVNKYSNSPNGKDANGKNNGGNNNNGSANGTSVADKRFKTLPTSEMLPRNEVLGGYIFVCNNDTMQEDLKRQLFGLPARYRDSVRAITPGLPLFLYNYTTHQLHGVFEAASFGGSNIDPTAWEDKKCKGESRFPAQVRICIRKLCKPLEEDSFRPVLHHYDGPKFRLELSIAETLSLLDLCGKEGI

SEQ ID NO: 12695 - protein, 261 aa, Zea mays subsp. mays
  peptide (1)..(261): Ceres Seq. ID no. 12414518
MNTVPDAKQWDKTSYQLHDDSRMGHINLGLMNLDLKMNEAAAMKLPFRGMPYNMNQMYLKGSNANSNVNAFKMNVGVNKYSNSPNGKDANGKNNGGNNNNGSANGTSVADKRFKTLPTSEMLPRNEVLGGYIFVCNNDTMQEDLKRQLFGLPARYRDSVRAITPGLPLFLYNYTTHQLHGVFEAASFGGSNIDPTAWEDKKCKGESRFPAQVRICIRKLCKPLEEDSFRPVLHHYDGPKFRLELSIAETLSLLDLCGKEGI

SEQ ID NO: 12696 - protein, 239 aa, Zea mays subsp. mays
  peptide (1)..(239): Ceres Seq. ID no. 12414519
MGHINLGLMNLDLKMNEAAAMKLPFRGMPYNMNQMYLKGSNANSNVNAFKMNVGVNKYSNSPNGKDANGKNNGGNNNNGSANGTSVADKRFKTLPTSEMLPRNEVLGGYIFVCNNDTMQEDLKRQLFGLPARYRDSVRAITPGLPLFLYNYTTHQLHGVFEAASFGGSNIDPTAWEDKKCKGESRFPAQVRICIRKLCKPLEEDSFRPVLHHYDGPKFRLELSIAETLSLLDLCGKEGI

SEQ ID NO: 12697 - DNA, 1164 bp, Zea mays subsp. mays
  misc_feature (1)..(1164): Ceres Seq. ID no. 12414536
  misc_feature (1)..(1164): Ortholog of  Ceres SEQ ID NO 15169809 as cited in SEQ ID NO 52839
  misc_feature (1)..(1164): Ortholog of  Ceres SEQ ID NO 15224302 as cited in SEQ ID NO 53942
  misc_feature (1)..(1164): Ortholog of  Ceres SEQ ID NO 14306297 as cited in SEQ ID NO 56907
gaccccgcacaccgacgacgaagagaggagaggaggcggagccgagagctcgagcccaaccgcgcaactcacttccccgtcgcgatttgcattgccctcctcttggcccccgatctcgccgtgccctacccccagacccgctccgccgccaccggagagatcgcgccccccattcccacaatctaatgcttccgtccctcgaggagccgagccctccgcgcggccgtgggatggggcggtgacaacaccggtgagtggcgtggggcagggagccggtggcgaggggcatatcatggtgcagtgcctggacggggtgaggcagctgctcgcggtcctgctcaagtgctgcgacgtcgagctcaagcagccgcccgggctcgaggaccctcaggttctcgcgagggagaccgtcttcagcgtgagcgaagtcgaggctctctacgagctgttcaagaagataagcagtgctgtcatcgatgatgggctgattaacaaggaggagtttcagttggcactatttaagaccagcaagaaggagagcctgttcgcagaccgcgtatttgatttgtttgacacaaagcacaatggaattttaggatttgaagaatttgctcgtgctctctcagtatttcatcctaatgctccccttgatgagaaaattgacttttcattccggctgtatgatctcaagcagcaaggctacattgagagacaagaggttaagcagatggttgttgctacacttgctgagtcaggaatgaatctttcagatgaaattgtagagagtataattgacaagacatttgaggaggcagacacaaaacatgatggaaggattgacaaggaagagtggcgcagtctagtcagtcggcatccatctttgctgaagaacatgactcttcagtacctcaaggacatcaccacaacatttccaagctttgtctttcactcccaagttgatgataactgattttcatgggattattttggcaagaagcattagaagatattctcgtggggttctgatatggttttctttttcaattattgggttgttggattgactgagatcgtagtgctcataagtatgttggatgttggattcgagaactcaaatcttttgtcaaccatgtttctttcatttgcatgtctggatgcgcttgg

SEQ ID NO: 12698 - protein, 322 aa, Zea mays subsp. mays
  peptide (1)..(322): Ceres Seq. ID no. 12414537
TPHTDDEERRGGGAESSSPTAQLTSPSRFALPSSWPPISPCPTPRPAPPPPERSRPPFPQSNASVPRGAEPSARPWDGAVTTPVSGVGQGAGGEGHIMVQCLDGVRQLLAVLLKCCDVELKQPPGLEDPQVLARETVFSVSEVEALYELFKKISSAVIDDGLINKEEFQLALFKTSKKESLFADRVFDLFDTKHNGILGFEEFARALSVFHPNAPLDEKIDFSFRLYDLKQQGYIERQEVKQMVVATLAESGMNLSDEIVESIIDKTFEEADTKHDGRIDKEEWRSLVSRHPSLLKNMTLQYLKDITTTFPSFVFHSQVDDN

SEQ ID NO: 12699 - protein, 225 aa, Zea mays subsp. mays
  peptide (1)..(225): Ceres Seq. ID no. 12414538
MVQCLDGVRQLLAVLLKCCDVELKQPPGLEDPQVLARETVFSVSEVEALYELFKKISSAVIDDGLINKEEFQLALFKTSKKESLFADRVFDLFDTKHNGILGFEEFARALSVFHPNAPLDEKIDFSFRLYDLKQQGYIERQEVKQMVVATLAESGMNLSDEIVESIIDKTFEEADTKHDGRIDKEEWRSLVSRHPSLLKNMTLQYLKDITTTFPSFVFHSQVDDN

SEQ ID NO: 12700 - DNA, 1112 bp, Zea mays subsp. mays
  misc_feature (1)..(1112): Ceres Seq. ID no. 12351804
  misc_feature (1)..(1112): Ortholog of  Ceres SEQ ID NO 15178931 as cited in SEQ ID NO 1125
  misc_feature (1)..(1112): Ortholog of  Ceres SEQ ID NO 13596648 as cited in SEQ ID NO 63080
aagttcaggcagtttcgtgcccttttcttctccaccagctcaaagctgaacgcggcatccttcctttcctcccctcttctgcccccatttcgttcctttcacaccggggaccggcgagcagagccgcgcacagcagaacgcggaagcaagaggaggcgatcgactactcgaccagccctctccgtgtctccgatggcggctcgcgtcctcgcggccctcgcccttgccctcgccctcgccctcgtcgccgtacccgctcccacgcgggcgtccaacgacgagggggacgcgctctacgcgctgcggcagcggctgtcggaccccaacggcgtgctgcagagctgggatcccacgctcgtcaccccctgcacctggttccacatctcctgcgaccaggtcggccgcgtcgtccgcctggacttgggcaactccaacgtctccggctccatcggccctgagctcggccgccttgtcaacctcaagtacctggagctgtacaggaacaaccttgacggcgagatccccaaggaattgggcaacctcaagaacctgatcagcttggatctgtatgccaacaagctcacgggaggaatccccaagtcactctccaagctcgactcactcagattcatgcgcttgaacaacaacaagcttacaggatcaattccaagggagtttgccaagctctccaacctgaaagtcatcgatttgtctaacaatgatctctgtggaactatccctgttgatgggcctttctcaacctttcctctccgaagctttgagaacaacagcaggctcaacggtccagagctacaaggattggttccttatgattttggatgttagatgccgatcaacaatgtaccaccttccccagttgaaagggggaaagacaagatagtattatcaatagaaacctagcttcaagaatgtcgtgactatatatatgtatgatattaagactagatttgataagggtggcatagcaagtcctgatattctgtgtgcattcagaatagctgcttttatgcccttgtgttgatattttgcaaaccaaaacaaactgttctgaaacgagggcacatattgttcatgaataaatttgagcctcc

SEQ ID NO: 12701 - protein, 281 aa, Zea mays subsp. mays
  peptide (1)..(281): Ceres Seq. ID no. 12351805
KFRQFRALFFSTSSKLNAASFLSSPLLPPFRSFHTGDRRAEPRTAERGSKRRRSTTRPALSVSPMAARVLAALALALALALVAVPAPTRASNDEGDALYALRQRLSDPNGVLQSWDPTLVTPCTWFHISCDQVGRVVRLDLGNSNVSGSIGPELGRLVNLKYLELYRNNLDGEIPKELGNLKNLISLDLYANKLTGGIPKSLSKLDSLRFMRLNNNKLTGSIPREFAKLSNLKVIDLSNNDLCGTIPVDGPFSTFPLRSFENNSRLNGPELQGLVPYDFGC

SEQ ID NO: 12702 - protein, 217 aa, Zea mays subsp. mays; identical to SEQ ID NO: 11158
  peptide (1)..(217): Ceres Seq. ID no. 12351806

SEQ ID NO: 12703 - protein, 151 aa, Zea mays subsp. mays
  peptide (1)..(151): Ceres Seq. ID no. 12351807
VQAVSCPFLLHQLKAERGILPFLPSSAPISFLSHRGPASRAAHSRTRKQEEAIDYSTSPLRVSDGGSRPRGPRPCPRPRPRRRTRSHAGVQRRGGRALRAAAAAVGPQRRAAELGSHARHPLHLVPHLLRPGRPRRPPGLGQLQRLRLHRP

SEQ ID NO: 12704 - DNA, 812 bp, Zea mays subsp. mays
  misc_feature (1)..(812): Ceres Seq. ID no. 12351463
  misc_feature (1)..(812): Ortholog of  Ceres SEQ ID NO 13598758 as cited in SEQ ID NO 61555
ctcaccaagaaagaaaaacagacacacgtcactgttcgccttgtccggtcgtttctgctccattcctcctcctgcaagccgcaaaggaatcaggcggagtggcgcgatgggagagcaggtcgtgacggagcagatccagcggaagctggaggaggtcaacgctaccgtccaacagcacctcgcgggtgtccaggaccacatcaacttcaccatgcagcaagcatacttcaagtgcgcatatggttgctttgatcggcgccatactcaggaagcgatcagcaactgtgtggagaattgtagtgtgcctgtccttgctgccaacaatatttttgagagtgagatggccaagtttcagggaatgttgaaccggtcattgagggtctgtcaagataagtttgaagctgccaatctccagaagttgaaatcagatgcaactcgggaactggaatcctgtgtcaacagatctattgatgacagcctcagggtccttccgcatgtggtggatcagatcaagtccaccctcaaaatcaattagaggcactattacttttagcaaatgaaccagatatagttgagaatgtttcatattcacattcgctgcataactccacattttcagagctcttaccgatattgatagaacatgatcaccctatcgtagttttttggattctgctcttaccacctagtcctggcatgtcaacagcgtcgacattttgaactctactgagaacacagcttaggcattgaaaggctggatgaacttgttgtgctacatgtacaagaatactcttacgtcttgtgattttttg

SEQ ID NO: 12705 - protein, 177 aa, Zea mays subsp. mays
  peptide (1)..(177): Ceres Seq. ID no. 12351464
SPRKKNRHTSLFALSGRFCSIPPPASRKGIRRSGAMGEQVVTEQIQRKLEEVNATVQQHLAGVQDHINFTMQQAYFKCAYGCFDRRHTQEAISNCVENCSVPVLAANNIFESEMAKFQGMLNRSLRVCQDKFEAANLQKLKSDATRELESCVNRSIDDSLRVLPHVVDQIKSTLKIN

SEQ ID NO: 12706 - protein, 142 aa, Zea mays subsp. mays
  peptide (1)..(142): Ceres Seq. ID no. 12351465
MGEQVVTEQIQRKLEEVNATVQQHLAGVQDHINFTMQQAYFKCAYGCFDRRHTQEAISNCVENCSVPVLAANNIFESEMAKFQGMLNRSLRVCQDKFEAANLQKLKSDATRELESCVNRSIDDSLRVLPHVVDQIKSTLKIN

SEQ ID NO: 12707 - protein, 107 aa, Zea mays subsp. mays
  peptide (1)..(107): Ceres Seq. ID no. 12351466
MQQAYFKCAYGCFDRRHTQEAISNCVENCSVPVLAANNIFESEMAKFQGMLNRSLRVCQDKFEAANLQKLKSDATRELESCVNRSIDDSLRVLPHVVDQIKSTLKIN

SEQ ID NO: 12708 - DNA, 1284 bp, Zea mays subsp. mays
  misc_feature (1)..(1284): Ceres Seq. ID no. 12414696
  misc_feature (1)..(1284): Ortholog of  Ceres SEQ ID NO 15175949 as cited in SEQ ID NO 58819
  misc_feature (1)..(1284): Ortholog of  Ceres SEQ ID NO 13596660 as cited in SEQ ID NO 63180
atgcagattcccaagtggagttgcggcggctggttatcatttatcatcaccttcgcctcacaccttccggccgcccattccgatccgatccccggccggccacctaccaccggtcagccccatcaatctctgaggcagcgtcagccatcaggcctccctcgtcgatctccccgccgccgccgctgctaataccagataatggaggccggcgccgccgctgctgccactgccatctaccctctgcaccatgcaaaaccatacacctggtgaggcatgcccaaggtgtccacaacgtggaaggcgacacggatcacagcgcctacatgaaacccgacttcttcgacgcgagcatcactcccttgggctggaaccaggttgacctcctgcgagagcatgtgaaggaatctgggcttgcagaaaagattgagctggttatttgttctcctttgtcgaggaccatgcagactgcagtgggagtttttgttggcgaaagctgcagtaatggtgtgagtgtgcctccactgatggtggagaatgctggacgtccggcagtttcaagtttgaactgcccaccatttcttgctgttgaggcctgcagggagcgcttgggtgtccatccttgtgacaagaggaggagcatcacagagtaccgtgctctcttccctgccattgatttttcgctgatagagagtgacgaagatgttctctgggtaccagatgtcagagaaacctttgagtcgctcgcagaaaggggtatgaagttcattgactggctatggacaagagaagagagagagatagccatcgtcacccatagcggtttattaagccataccttgcgcaggtacagcaaagagtgccatccaacagtaacacaagaagtgagcaagtactttgcaaactgcgagctccggtccttggtactggttgacaggagtatgcttggttcagatggccccagttacaacaactaccctggcaaaatgaaaatcccagccgcacttgatctgcccagcgatgacaagaagcagcctcttcagaaccagagcggctgagcaggcctgtcttggggcttgtttggtgttcaccaccactgattccttttcttttgtcatcctattttgaaacttccctagctgcattcagtccattttttgtgaactattttgaacttcccatctgtggttgttgagcaccatttgtggtactggacatggccggacggtccaacctgtggacggtccgtgattagatcagatcatacgtaattaacccttttcggcg

SEQ ID NO: 12709 - protein, 350 aa, Zea mays subsp. mays
  peptide (1)..(350): Ceres Seq. ID no. 12414697
ADSQVELRRLVIIYHHLRLTPSGRPFRSDPRPATYHRSAPSISEAASAIRPPSSISPPPPLLIPDNGGRRRRCCHCHLPSAPCKTIHLVRHAQGVHNVEGDTDHSAYMKPDFFDASITPLGWNQVDLLREHVKESGLAEKIELVICSPLSRTMQTAVGVFVGESCSNGVSVPPLMVENAGRPAVSSLNCPPFLAVEACRERLGVHPCDKRRSITEYRALFPAIDFSLIESDEDVLWVPDVRETFESLAERGMKFIDWLWTREEREIAIVTHSGLLSHTLRRYSKECHPTVTQEVSKYFANCELRSLVLVDRSMLGSDGPSYNNYPGKMKIPAALDLPSDDKKQPLQNQSG

SEQ ID NO: 12710 - protein, 243 aa, Zea mays subsp. mays
  peptide (1)..(243): Ceres Seq. ID no. 12414698
MKPDFFDASITPLGWNQVDLLREHVKESGLAEKIELVICSPLSRTMQTAVGVFVGESCSNGVSVPPLMVENAGRPAVSSLNCPPFLAVEACRERLGVHPCDKRRSITEYRALFPAIDFSLIESDEDVLWVPDVRETFESLAERGMKFIDWLWTREEREIAIVTHSGLLSHTLRRYSKECHPTVTQEVSKYFANCELRSLVLVDRSMLGSDGPSYNNYPGKMKIPAALDLPSDDKKQPLQNQSG

SEQ ID NO: 12711 - protein, 198 aa, Zea mays subsp. mays
  peptide (1)..(198): Ceres Seq. ID no. 12414699
MQTAVGVFVGESCSNGVSVPPLMVENAGRPAVSSLNCPPFLAVEACRERLGVHPCDKRRSITEYRALFPAIDFSLIESDEDVLWVPDVRETFESLAERGMKFIDWLWTREEREIAIVTHSGLLSHTLRRYSKECHPTVTQEVSKYFANCELRSLVLVDRSMLGSDGPSYNNYPGKMKIPAALDLPSDDKKQPLQNQSG

SEQ ID NO: 12712 - DNA, 1039 bp, Zea mays subsp. mays
  misc_feature (1)..(1039): Ceres Seq. ID no. 12345461
  misc_feature (1)..(1039): Ortholog of  Ceres SEQ ID NO 15176227 as cited in SEQ ID NO 51448
  misc_feature (1)..(1039): Ortholog of  Ceres SEQ ID NO 13597609 as cited in SEQ ID NO 65216
atcacttgacttgcgagcgaccgcggctcacgtcggctgcataaattgcttcgtagactagtaccacacagtttgcgagaaggggagaggtagaggttccgaggtagagagatagagaggaggagagggagggcgaggcggcggatccgtcactccgttcttctccgctgatctggaggaaggaggcgaggggagttgcaaatccatcaatggccactccaaccacctattcagtccgcatatcctcggagacccacaagattgaagcctgggtggtgtctgacgaagctttggccaggcaactgcaggaggaggagaacacgcgtgacgctgctgccgacaccagagaagtcgccggcaatgtacccttggagtcatcgtcaccggctgttgagtacaggcctgcacagaatgcagctcaggttgcaagggaagacaatgtggacccagataatatgtcatatgagcaactacaagcattaggggaagcagtaggaattcagtccagagggttatctgatgagctgatatcttatttggagccatttaggaacaagtgcactttcttctccaggaaaaagaacagtgaggaatgtgtgatctgcaagacaacatatagaagccggcagaaattgataagactaccctgcagccactgttatcacgcagattgcataactcgttggcttaagatcaacaaggcatgcccagtctgcaacgaggaggtgtttggatgaactgcaaggttcctggcagatgctgcggtttcatcgttacttgcttgcggcatgcttttgagaagacgttggacgcataaggtccattgtttgtgattatgttgtgagcctagtttggtgccctttgcttaagaggactggctctgcccatgcatgggtcggtctacacgtgtgctagtaactggaccaggtcgcgttttgtgatgcgtctatccatcttggttttatcacaaattgatagatctgttgtgtgggtagtttggttgccgttttctgaatataatggatggtgtttttgcccc

SEQ ID NO: 12713 - protein, 175 aa, Zea mays subsp. mays
  peptide (1)..(175): Ceres Seq. ID no. 12345462
MATPTTYSVRISSETHKIEAWVVSDEALARQLQEEENTRDAAADTREVAGNVPLESSSPAVEYRPAQNAAQVAREDNVDPDNMSYEQLQALGEAVGIQSRGLSDELISYLEPFRNKCTFFSRKKNSEECVICKTTYRSRQKLIRLPCSHCYHADCITRWLKINKACPVCNEEVFG

SEQ ID NO: 12714 - protein, 93 aa, Zea mays subsp. mays
  peptide (1)..(93): Ceres Seq. ID no. 12345463
MSYEQLQALGEAVGIQSRGLSDELISYLEPFRNKCTFFSRKKNSEECVICKTTYRSRQKLIRLPCSHCYHADCITRWLKINKACPVCNEEVFG

SEQ ID NO: 12715 - DNA, 1438 bp, Zea mays subsp. mays
  misc_feature (1)..(1438): Ceres Seq. ID no. 12351808
  misc_feature (1)..(1438): Ortholog of  Ceres SEQ ID NO 14314655 as cited in SEQ ID NO 56864
gacgccaccaatcaacgcttccctttatggccggagcaatagttggcagactcggccgccatcccaccacctccttgctcctcctaacactgccccgtcacgccgccgcacaccaccggctttactctccttcctcctcccaagttgcaagagccggattgccaggtgcttgtttcgtttcgggctgtgtcagtattcaaaaatgggtgatccaagtgagaggaatggacacggcgctcttacccgggtgctattctgtggtccatattggcctgcttctactaactacaccagggagtatttgcaggactatccattcattcaggttgatgaagtaggtcttgagcaggtacctgatgttattcacagctatcatatatgtgtagtaaaaaataagcgtatagattcagatattattgccaaggcaactcagatgaagattataatgcagtatggtgttgggttagaaggtgttgatgtaaatgctgctacagaacacaaaatcaaagttgcacgaatacctggaagtacgacaggaaatgctgtctcttgcgcagaaatggcaatctatcttactctaggcattctgcgtaagcaaaaggagatggatactgctgtgaaccggaaagaccttggtgttccagttggagatacattgttcggcaaaacaatccttatccttggatttggggccattggcatcgaggttgccaagaggctaagaccctttggggtaaaaattcttgctacaaaaagaaattggtcatcggacacattgccatctgatgtcgatgagctagttgacaagaaaggtgggccggaagatatgtatgagtttgctggtgaagctaacattgttatagcatgcatgaccttaaccagcgagacaattggaattgtggatcataagtttgtttcatcaatgaaaaaggggtcatatctggtcaacattgctcggggacgcctgctggactacaaggctgtgtttgatcacctggaatcgggccatctagctggtctggggattgatgttgcttggatggagccatttgatcctgaggaccctgttctgaaattcccaaacgtcattctaacgccccatgtggccggcgtcaccgagtattcctacagaactatggcaaagtctgttggtgacaccgcccttcagcttcatttaggcgaggcgttcacggaggtagagttcgtcaactaaaaaaccgtccaggcggcagccgtagacgcatgccattcgtcggctattggaaccgctgatgcgatcatttgtagagaataatggatccgcgacttgtaagaataaacatgtagccagatgtttgatggtgatctccatgagaactctgccactggctgcttagctggtacctggtagtggtagcaagtcatttttctcaaacattgcgttctctttcgccttctc

SEQ ID NO: 12716 - protein, 403 aa, Zea mays subsp. mays
  peptide (1)..(403): Ceres Seq. ID no. 12351809
TPPINASLYGRSNSWQTRPPSHHLLAPPNTAPSRRRTPPALLSFLLPSCKSRIARCLFRFGLCQYSKMGDPSERNGHGALTRVLFCGPYWPASTNYTREYLQDYPFIQVDEVGLEQVPDVIHSYHICVVKNKRIDSDIIAKATQMKIIMQYGVGLEGVDVNAATEHKIKVARIPGSTTGNAVSCAEMAIYLTLGILRKQKEMDTAVNRKDLGVPVGDTLFGKTILILGFGAIGIEVAKRLRPFGVKILATKRNWSSDTLPSDVDELVDKKGGPEDMYEFAGEANIVIACMTLTSETIGIVDHKFVSSMKKGSYLVNIARGRLLDYKAVFDHLESGHLAGLGIDVAWMEPFDPEDPVLKFPNVILTPHVAGVTEYSYRTMAKSVGDTALQLHLGEAFTEVEFVN

SEQ ID NO: 12717 - protein, 336 aa, Zea mays subsp. mays
  peptide (1)..(336): Ceres Seq. ID no. 12351810
MGDPSERNGHGALTRVLFCGPYWPASTNYTREYLQDYPFIQVDEVGLEQVPDVIHSYHICVVKNKRIDSDIIAKATQMKIIMQYGVGLEGVDVNAATEHKIKVARIPGSTTGNAVSCAEMAIYLTLGILRKQKEMDTAVNRKDLGVPVGDTLFGKTILILGFGAIGIEVAKRLRPFGVKILATKRNWSSDTLPSDVDELVDKKGGPEDMYEFAGEANIVIACMTLTSETIGIVDHKFVSSMKKGSYLVNIARGRLLDYKAVFDHLESGHLAGLGIDVAWMEPFDPEDPVLKFPNVILTPHVAGVTEYSYRTMAKSVGDTALQLHLGEAFTEVEFVN

SEQ ID NO: 12718 - protein, 259 aa, Zea mays subsp. mays
  peptide (1)..(259): Ceres Seq. ID no. 12351811
MKIIMQYGVGLEGVDVNAATEHKIKVARIPGSTTGNAVSCAEMAIYLTLGILRKQKEMDTAVNRKDLGVPVGDTLFGKTILILGFGAIGIEVAKRLRPFGVKILATKRNWSSDTLPSDVDELVDKKGGPEDMYEFAGEANIVIACMTLTSETIGIVDHKFVSSMKKGSYLVNIARGRLLDYKAVFDHLESGHLAGLGIDVAWMEPFDPEDPVLKFPNVILTPHVAGVTEYSYRTMAKSVGDTALQLHLGEAFTEVEFVN

SEQ ID NO: 12719 - DNA, 1324 bp, Zea mays subsp. mays
  misc_feature (1)..(1324): Ceres Seq. ID no. 12414692
  misc_feature (1)..(1324): Ortholog of  Ceres SEQ ID NO 12781552 as cited in SEQ ID NO 51997
  misc_feature (1)..(1324): Ortholog of  Ceres SEQ ID NO 15176548 as cited in SEQ ID NO 53387
  misc_feature (1)..(1324): Ortholog of  Ceres SEQ ID NO 15169228 as cited in SEQ ID NO 55423
  misc_feature (1)..(1324): Ortholog of  Ceres SEQ ID NO 14312196 as cited in SEQ ID NO 56984
  misc_feature (1)..(1324): Ortholog of  Ceres SEQ ID NO 13597237 as cited in SEQ ID NO 64136
  misc_feature (1)..(1324): Ortholog of  Ceres SEQ ID NO 13598601 as cited in SEQ ID NO 69129
atctcctccacttccttcctgggctctgggctacgtattatccatccgtctcagtcacctcgcctcctcctcctcctcccccagtccccctccctcatcctcgattgcgcccctcactcgccatgtcggggctctacagccaggggttctcccctgcgcgaaacctctcccctcagattagaagcaatccggacgctgatagtcagtacctggccgagctgctcgccgaacaccacaaactggggcccttcatgcaggtgctgcccgtatgcaacaagctgctgagccaagagattatgcgggtatcaagcattgtgcacaaccatggatttggcgatttcgacaggcatcggtttagaagtcctagtccaatgtcttctccaaaccctagagctaatctccctggcaatgggttcagtccttggagcggactacaagagagattaggttttcctcaaggaaccagcatggactggcaaggagcacccccaagtcctagctcccatgttgtaaagaagattcttcgtctggaggttccagttgattcttatccgaatttcaattttgtggggcgcattttaggacctagaggtaattctctaaagcgagtagaagcatccactgggtgtcgtgttttcattagaggaaagggttccatcaaagattcagggaaggaggacaaactacggggaaaaccgggctatgagcacctgagtgatccgctgcatatcttgatagaggccgagttccctgccagtatcatcgatgcaaggctgagacaagcacaggagattatagaagaattgcttaaaccagtggacgagtcccaagatctctacaaaaggcagcagctcagggagctggcaatgctgaactcaaccctgagagaggacagccctcatccggggagtgtctctccattcagcaacggtggcatgaagcgtgcgaaaacaggacagtagagaaaacaactatgctcccatatctggccccgtcgtcatgggaacgccatgggcatgcgtgaaggaaggccatgcgccttcgctggcggagtccggtatcttctgctagctttcacctccggacaggggaaagatgagatgagatgagatgagatagtcgcggacccttggttggatccggcgttggttgttgtatggtctagaacattcgttctatttgttattgacggttaaccctagtatgttggtgagctgcaacctgcaaactgcatggtaaactagctagagaggcctgctgagtatgtgagctttaggtcttttcttgacattgtattataacctttttaacattatggagttgc

SEQ ID NO: 12720 - protein, 319 aa, Zea mays subsp. mays
  peptide (1)..(319): Ceres Seq. ID no. 12414693
LLHFLPGLWATYYPSVSVTSPPPPPPPVPLPHPRLRPSLAMSGLYSQGFSPARNLSPQIRSNPDADSQYLAELLAEHHKLGPFMQVLPVCNKLLSQEIMRVSSIVHNHGFGDFDRHRFRSPSPMSSPNPRANLPGNGFSPWSGLQERLGFPQGTSMDWQGAPPSPSSHVVKKILRLEVPVDSYPNFNFVGRILGPRGNSLKRVEASTGCRVFIRGKGSIKDSGKEDKLRGKPGYEHLSDPLHILIEAEFPASIIDARLRQAQEIIEELLKPVDESQDLYKRQQLRELAMLNSTLREDSPHPGSVSPFSNGGMKRAKTGQ

SEQ ID NO: 12721 - protein, 279 aa, Zea mays subsp. mays
  peptide (1)..(279): Ceres Seq. ID no. 12414694
MSGLYSQGFSPARNLSPQIRSNPDADSQYLAELLAEHHKLGPFMQVLPVCNKLLSQEIMRVSSIVHNHGFGDFDRHRFRSPSPMSSPNPRANLPGNGFSPWSGLQERLGFPQGTSMDWQGAPPSPSSHVVKKILRLEVPVDSYPNFNFVGRILGPRGNSLKRVEASTGCRVFIRGKGSIKDSGKEDKLRGKPGYEHLSDPLHILIEAEFPASIIDARLRQAQEIIEELLKPVDESQDLYKRQQLRELAMLNSTLREDSPHPGSVSPFSNGGMKRAKTGQ

SEQ ID NO: 12722 - protein, 236 aa, Zea mays subsp. mays
  peptide (1)..(236): Ceres Seq. ID no. 12414695
MQVLPVCNKLLSQEIMRVSSIVHNHGFGDFDRHRFRSPSPMSSPNPRANLPGNGFSPWSGLQERLGFPQGTSMDWQGAPPSPSSHVVKKILRLEVPVDSYPNFNFVGRILGPRGNSLKRVEASTGCRVFIRGKGSIKDSGKEDKLRGKPGYEHLSDPLHILIEAEFPASIIDARLRQAQEIIEELLKPVDESQDLYKRQQLRELAMLNSTLREDSPHPGSVSPFSNGGMKRAKTGQ

SEQ ID NO: 12723 - DNA, 1011 bp, Zea mays subsp. mays
  misc_feature (1)..(1011): Ceres Seq. ID no. 12384230
  misc_feature (1)..(1011): Ortholog of  Ceres SEQ ID NO 15172913 as cited in SEQ ID NO 51824
  misc_feature (1)..(1011): Ortholog of  Ceres SEQ ID NO 13654659 as cited in SEQ ID NO 61998
gagtagcaatcactgctgcgcccgataggtggcagcgagccagcgacccacccgactctgttccaacgagccttccctcccaaacttgcacgctgcccccgctctcgcctccgcccccgatccagatccagggtggaatagggaacggccatacaccatggcggatttctccaaggaatcttgcccttctgtgaagaacattttacttctggattctgaaggaaagcgtgttgctgtaaagtatttctcagatgattggccgactaatgcatcaaagttagcctacgaaaagtctgtttttactaaaactctaaagacaaatgcacggacagaagctgagataacattgtttgatggttatattgtcgtttacaagtttgtacatgaccttcacttttttgtcaccgctggagatgatgagaatgagctcatcttagcaagtgtactacatggtttttctgattctgttggtcttctactcaggggtgatgttgagaagcggactgcgcttgagaacttggatttgatacttctctgcatcgatgaaattgtagatgggggaatcatcctggaaacagatgcaaacaccattgctggtaaggttgcaaccaatgctgttgatggttctgtgcccttttctgagcagacgatatctcaggcactagccacagctagggagcaccttgcaagatctctactgaaatgaacaaccagcaatatgtatgacgtattatatgacatatatgtgtgtaggttgggctactgaatgttgagggtctttgtagacgttattcgtcccaaagtgctgctgtgacagagcctagttgaatatccgagggattggtcacatgctcgttaaattttttttttgaaccagtgagtttgtagctgccatatttcaggtaaaacataaaataaagagttgtaattgggtgtaatataattttcaccatacaaaaaaaaattcatctcaactatcaaaccatggtaaaaggttcaaaattatctatc

SEQ ID NO: 12724 - protein, 182 aa, Zea mays subsp. mays
  peptide (1)..(182): Ceres Seq. ID no. 12384231
MADFSKESCPSVKNILLLDSEGKRVAVKYFSDDWPTNASKLAYEKSVFTKTLKTNARTEAEITLFDGYIVVYKFVHDLHFFVTAGDDENELILASVLHGFSDSVGLLLRGDVEKRTALENLDLILLCIDEIVDGGIILETDANTIAGKVATNAVDGSVPFSEQTISQALATAREHLARSLLK

SEQ ID NO: 12725 - DNA, 1462 bp, Zea mays subsp. mays; identical to SEQ ID NO: 10801
  misc_feature (1)..(1462): Ceres Seq. ID no. 13579635
  misc_feature (1)..(1462): Ortholog of  Ceres SEQ ID NO 13596039 as cited in SEQ ID NO 62117

SEQ ID NO: 12726 - protein, 410 aa, Zea mays subsp. mays; identical to SEQ ID NO: 10802
  peptide (1)..(410): Ceres Seq. ID no. 13579636

SEQ ID NO: 12727 - protein, 381 aa, Zea mays subsp. mays; identical to SEQ ID NO: 10803
  peptide (1)..(381): Ceres Seq. ID no. 13579637

SEQ ID NO: 12728 - protein, 305 aa, Zea mays subsp. mays; identical to SEQ ID NO: 10804
  peptide (1)..(305): Ceres Seq. ID no. 13579638

SEQ ID NO: 12729 - DNA, 1022 bp, Zea mays subsp. mays
  misc_feature (1)..(1022): Ceres Seq. ID no. 12350942
  misc_feature (1)..(1022): Ortholog of  Ceres SEQ ID NO 14304209 as cited in SEQ ID NO 56460
  misc_feature (1)..(1022): Ortholog of  Ceres SEQ ID NO 12586351 as cited in SEQ ID NO 64028
  misc_feature (1)..(1022): Ortholog of  Ceres SEQ ID NO 15177482 as cited in SEQ ID NO 0
aaaccaaaccctctaatccatttcggcatttccaacgccttcgccctaccagccacgtcgtttcgaggccgatcgaccgagcagcagcagctggtggcaatggcggcggcggcggaggtcgtgctgctggacttctgggtgagccccttcgggcagcgctgccggatcgcgctggcggagaagggcgtggcctacgagtaccgcgagcaggacctcctgaacaagggcgagctgctcctccgctccaaccccatccacaagaagatccccgtcctgctccacgccggcaggcccgtctgcgagtcgctcgtcatcctccagtacatcgacgaggcctggccggacgtcgcgccgctcctccccaaggacgacccctacgcccgcgcgcaggcgcgtttctgggccgattacatcgacaagaagatctatgacagccagactcggctgtggaagttcgagggcgaggcgcgggagcaggcgaagaaggacctggtggaggtcctggagaccctggagggggagctcgccgacaagcctttcttcggcggcggcgccctcggcttcgtggacgtggctctggtgcccttcacgtcctggttcctcgcctacgagaagctgggcgggttcagcatccaggagcactgccccaggatcgtggcctgggcggcgcgctgcagggagcgggagagcgtggccaaggcgctgtccgaccctgccaaggtgctcgggttcgtccagttcctccagagcaagttcggggccaagtgatcggaaacgctgtgtgtgctgctatgcaggccaggctggtgctttgatctctgctcgatcagctccatgcccatgctagcgttgcatagcgcagttgatgtgtgatgtgtctggttggttgtagctgctctttgcctggttgcgttgcgtcagtgtgttttcagcgtctggggtagctctgcgttgcccttgcccctgccccctgttgcatactcctagctctcgccgagtttgacaatttcgtcagttaatcc

SEQ ID NO: 12730 - protein, 255 aa, Zea mays subsp. mays
  peptide (1)..(255): Ceres Seq. ID no. 12350943
KPNPLIHFGISNAFALPATSFRGRSTEQQQLVAMAAAAEVVLLDFWVSPFGQRCRIALAEKGVAYEYREQDLLNKGELLLRSNPIHKKIPVLLHAGRPVCESLVILQYIDEAWPDVAPLLPKDDPYARAQARFWADYIDKKIYDSQTRLWKFEGEAREQAKKDLVEVLETLEGELADKPFFGGGALGFVDVALVPFTSWFLAYEKLGGFSIQEHCPRIVAWAARCRERESVAKALSDPAKVLGFVQFLQSKFGAK

SEQ ID NO: 12731 - protein, 222 aa, Zea mays subsp. mays
  peptide (1)..(222): Ceres Seq. ID no. 12350944
MAAAAEVVLLDFWVSPFGQRCRIALAEKGVAYEYREQDLLNKGELLLRSNPIHKKIPVLLHAGRPVCESLVILQYIDEAWPDVAPLLPKDDPYARAQARFWADYIDKKIYDSQTRLWKFEGEAREQAKKDLVEVLETLEGELADKPFFGGGALGFVDVALVPFTSWFLAYEKLGGFSIQEHCPRIVAWAARCRERESVAKALSDPAKVLGFVQFLQSKFGAK

SEQ ID NO: 12732 - protein, 142 aa, Zea mays subsp. mays
  peptide (1)..(142): Ceres Seq. ID no. 12350945
TKPSNPFRHFQRLRPTSHVVSRPIDRAAAAGGNGGGGGGRAAGLLGEPLRAALPDRAGGEGRGLRVPRAGPPEQGRAAPPLQPHPQEDPRPAPRRQARLRVARHPPVHRRGLAGRRAAPPQGRPLRPRAGAFLGRLHRQEDL

SEQ ID NO: 12733 - DNA, 1913 bp, Zea mays subsp. mays
  misc_feature (1)..(1913): Ceres Seq. ID no. 12355817
  misc_feature (1)..(1913): Ortholog of  Ceres SEQ ID NO 13593889 as cited in SEQ ID NO 53305
  misc_feature (1)..(1913): Ortholog of  Ceres SEQ ID NO 13581959 as cited in SEQ ID NO 56156
  misc_feature (1)..(1913): Ortholog of  Ceres SEQ ID NO 15171809 as cited in SEQ ID NO 57329
actctcgctttcttctgtctcgcctcgccctcgcctttgttgatcttttcctttctcgcgttcccctcgccttcctcttcctcccccacacccaccggtcgccgcccccgtcgccccggcctcctcggtccagagacgagggggtccgcgccgttccgacgccacaccgcaaccgcatcacatcaccgcctgctcccaccgtccatccgccctccctcgatcgcgctccccggatcgctggtacctccgcgcgcggctccgacctcatcttcctccatcgactggcatcggcagcggcggcgtgttcccggccaaccttcgaaagggtaatcaatcgccagacttttgggagctgtgttgggggggaccggggggaagagccaagttactgcagaggctaacatttcggttgtcgagtgatggcgcaaggcatcaacttccctgacttcatcggcgccgtgggtggccatgatggtggcgtggactttggtgggaacttctgtgacatggccttctaccagaagctaggggagggcaccaacatgtcggtcgacagcctcaacagcatgcagaccagcatgcatggggggtccatcgccatgtctgtggacaacaacagtagcgttggctctaacagtgactcccgcactggcatgcttggtcatcctggtctcaaggggcctgccattgtgggaagctactcagttgggcacagcatcttccgccctggccgggtgtcccatgccttgagtgaggatgcgctggcacatgctctgatggacaataagttcccaactgagacactcaaggattatgaggagtggactattgatctggggaagctccacttgggaatgccctttgcacaaggtgcctttgggaagctctacaggggaacatacaatgggatggatgttgctattaagcttttggagcgacctgaggctgaccctgagaaagctcaactgttagagcagcagtttgtccaagaagttatgatgcttgcaacactgagtcacccgaatattgtcaagttcattggtgcgtgcaggaagccattggtttggtgtattgtgacggagtatgcgaagggtggatctctcaagaatttcttgagcaagaggcagaacaggtctgtcccgctgaagttggcagtcaagcaggcattagatgttgcacgtggcatggcctatgtccatggccttgggttcattcatagagatcttaagtcggacaacctcctgatttctggtgataagtccattaagattgctgactttggagtggctaggattgaagtcaagactgaggggatgacacctgaaactggaacataccgctggatggctcctgaaatgatccagcataggccatacaaccagaaagttgatgtctacagttttgccattgtcctgtgggagttagtgactgggaatgtcccctttgcaaacatgagcgcagtgcaagctgcatttgctgtggttaacaagggcgtgcgaccagccataccccacgactgcctccctgcccttgcggagatcatgaccatgtgctgggacacaaaccctgaagtccgtcccccattcgctgagattgtgaggatgctggagcaggtggaggtggaggttctgaccactgtccgtaaggctcgcttccgctgttgcatcgcccaaccgatgacgctggactgacggactgagtcgtccgcaatccaggaaaagaacctggagaggggtttaatcctatgtgtttataatcccaatagacttgtgcttcagaaacagaaggctgactcctcagtctgccttctgtctttgacatgttatcgtagagtacacctagctgtcgtcaccagtggttgtaatagaggtagctttatgcttgactaaatacccttccgttataacaagtgc

SEQ ID NO: 12734 - protein, 423 aa, Zea mays subsp. mays
  peptide (1)..(423): Ceres Seq. ID no. 12355818
MAQGINFPDFIGAVGGHDGGVDFGGNFCDMAFYQKLGEGTNMSVDSLNSMQTSMHGGSIAMSVDNNSSVGSNSDSRTGMLGHPGLKGPAIVGSYSVGHSIFRPGRVSHALSEDALAHALMDNKFPTETLKDYEEWTIDLGKLHLGMPFAQGAFGKLYRGTYNGMDVAIKLLERPEADPEKAQLLEQQFVQEVMMLATLSHPNIVKFIGACRKPLVWCIVTEYAKGGSLKNFLSKRQNRSVPLKLAVKQALDVARGMAYVHGLGFIHRDLKSDNLLISGDKSIKIADFGVARIEVKTEGMTPETGTYRWMAPEMIQHRPYNQKVDVYSFAIVLWELVTGNVPFANMSAVQAAFAVVNKGVRPAIPHDCLPALAEIMTMCWDTNPEVRPPFAEIVRMLEQVEVEVLTTVRKARFRCCIAQPMTLD

SEQ ID NO: 12735 - protein, 394 aa, Zea mays subsp. mays
  peptide (1)..(394): Ceres Seq. ID no. 12355819
MAFYQKLGEGTNMSVDSLNSMQTSMHGGSIAMSVDNNSSVGSNSDSRTGMLGHPGLKGPAIVGSYSVGHSIFRPGRVSHALSEDALAHALMDNKFPTETLKDYEEWTIDLGKLHLGMPFAQGAFGKLYRGTYNGMDVAIKLLERPEADPEKAQLLEQQFVQEVMMLATLSHPNIVKFIGACRKPLVWCIVTEYAKGGSLKNFLSKRQNRSVPLKLAVKQALDVARGMAYVHGLGFIHRDLKSDNLLISGDKSIKIADFGVARIEVKTEGMTPETGTYRWMAPEMIQHRPYNQKVDVYSFAIVLWELVTGNVPFANMSAVQAAFAVVNKGVRPAIPHDCLPALAEIMTMCWDTNPEVRPPFAEIVRMLEQVEVEVLTTVRKARFRCCIAQPMTLD

SEQ ID NO: 12736 - protein, 382 aa, Zea mays subsp. mays
  peptide (1)..(382): Ceres Seq. ID no. 12355820
MSVDSLNSMQTSMHGGSIAMSVDNNSSVGSNSDSRTGMLGHPGLKGPAIVGSYSVGHSIFRPGRVSHALSEDALAHALMDNKFPTETLKDYEEWTIDLGKLHLGMPFAQGAFGKLYRGTYNGMDVAIKLLERPEADPEKAQLLEQQFVQEVMMLATLSHPNIVKFIGACRKPLVWCIVTEYAKGGSLKNFLSKRQNRSVPLKLAVKQALDVARGMAYVHGLGFIHRDLKSDNLLISGDKSIKIADFGVARIEVKTEGMTPETGTYRWMAPEMIQHRPYNQKVDVYSFAIVLWELVTGNVPFANMSAVQAAFAVVNKGVRPAIPHDCLPALAEIMTMCWDTNPEVRPPFAEIVRMLEQVEVEVLTTVRKARFRCCIAQPMTLD

SEQ ID NO: 12737 - DNA, 1106 bp, Zea mays subsp. mays
  misc_feature (1)..(1106): Ceres Seq. ID no. 12344615
  misc_feature (1)..(1106): Ortholog of  Ceres SEQ ID NO 13574766 as cited in SEQ ID NO 33
gccgcctctgttccttcgctagtcgacaggccccgcttccgctctcctcttccaccggccaccgccgcgcgccgagaagatggggaagcggtggatcccactggaggccaacccggatgtcatgaaccagttcatatggggtctgggagtctccgagagggctgtgcagttctgcgacgtctacggcctggacgacgagctgatcgccttggtgccccatcccgttctcgcagtcctcttcctctacccgttcacctccctggacgaggagaataaagaagaatcaagtgtttctgccacatcgaccgcagggggcaaggatttgagcaagaaggtatactttacaaagcagactattggcaatgcttgtggaacaattggtgttattcatgcaataggaaatgcaacatctcaaatcaagctagttgagggttcctattttggaaagttatataagcaaacagctgatatggatccagtccagcgtgctgcctttcttgagcaagatgatgagatggaggatgcacattctattgctgcatctgctggtgacactaatattaatcttgatgttaatgtacactttgtatgtttctcctgtgttgatggtgaactttacgagcttgatggactaaaatcacaacccacaccccatggcccatcatcacctgaaaccttgttgcaggatgctgcagaagtcatcaaagctagaattgcggagaaccctaactcgatgaacttcaatgtcatggccctttcaaagaagtgaagtatactgtgatgggtggatttcatttggcagaatacgggtccctttttttcagttctgctgagtactgcactgagtggaaggtttgcacagggaaacaaagatagggaaaaaatgttgactcgatgattctcgtgccttcttgatggatagagagatggtggttcacgatttcacctttttcctgcgtacttaggctatttacaagggtagttttatgatggtttcatacacatttaatagtatgtcacatcaccattttatatgatatgtcatagtatttaagataaataagtttcataggatgaaataggaatgaaatcgtgtcacctttttc

SEQ ID NO: 12738 - protein, 229 aa, Zea mays subsp. mays
  peptide (1)..(229): Ceres Seq. ID no. 12344616
MGKRWIPLEANPDVMNQFIWGLGVSERAVQFCDVYGLDDELIALVPHPVLAVLFLYPFTSLDEENKEESSVSATSTAGGKDLSKKVYFTKQTIGNACGTIGVIHAIGNATSQIKLVEGSYFGKLYKQTADMDPVQRAAFLEQDDEMEDAHSIAASAGDTNINLDVNVHFVCFSCVDGELYELDGLKSQPTPHGPSSPETLLQDAAEVIKARIAENPNSMNFNVMALSKK

SEQ ID NO: 12739 - protein, 215 aa, Zea mays subsp. mays
  peptide (1)..(215): Ceres Seq. ID no. 12344617
MNQFIWGLGVSERAVQFCDVYGLDDELIALVPHPVLAVLFLYPFTSLDEENKEESSVSATSTAGGKDLSKKVYFTKQTIGNACGTIGVIHAIGNATSQIKLVEGSYFGKLYKQTADMDPVQRAAFLEQDDEMEDAHSIAASAGDTNINLDVNVHFVCFSCVDGELYELDGLKSQPTPHGPSSPETLLQDAAEVIKARIAENPNSMNFNVMALSKK

SEQ ID NO: 12740 - DNA, 861 bp, Zea mays subsp. mays
  misc_feature (1)..(861): Ceres Seq. ID no. 12414781
  misc_feature (1)..(861): Ortholog of  Ceres SEQ ID NO 14316367 as cited in SEQ ID NO 57626
  misc_feature (1)..(861): Ortholog of  Ceres SEQ ID NO 14315039 as cited in SEQ ID NO 57668
  misc_feature (1)..(861): Ortholog of  Ceres SEQ ID NO 13664189 as cited in SEQ ID NO 66834
  misc_feature (1)..(861): Ortholog of  Ceres SEQ ID NO 13654321 as cited in SEQ ID NO 67850
gcacgagaccattacctagaacatcctaatcgaaaaagctctgacttgtgtgttgtggctccttgcttgacactctactcttccagggattgaggccaggggcttcatatttggcccggcagtcgcattggctattggcgccaagttcatacctttgcgcaagcctaggaagctccccggcgaggtgatctccgagaaatacgttctcgagtacgggaccgattgcttagagatgcatgtcggagccatcgaacggcctggtgagcgcgtgctgatcaccgacgacttggtcgcgaccggagggacgctctgtgctgcaatcaggcttcttgaacgtgctgaagctgatgtggtcgagtgcgcatgcctcattggcctcccaaaattcaaggatttctacaagttgaatggaaagcccgtctacgtgctggttgagtcccgtgaatcagataaataagaacttatgggtcagaggaaagctgacggttcattccttgctgctgtgcttgagcagtggagggacatcgacaagccaaccatggggggtgcgtcagcgttactaaggctagctgctaagatcgacttggtgagaggagagattagaagtgatggggggggcgttagtcttgtaggctgagtagattttcagagtactgaagagcttgtagttctgccaggaacatgcttattagttgaagcaagagtgttgatggtccattgcttgttggattttgtggttttgatttgaagggcgcaaacatggctggatcagcttgacggaagaacttggacatcaataccttagcatcaaatactagggaagtaggaacctgctacttgtagcgtgttattcctatctcc

SEQ ID NO: 12741 - protein, 74 aa, Zea mays subsp. mays
  peptide (1)..(74): Ceres Seq. ID no. 12414782
MHVGAIERPGERVLITDDLVATGGTLCAAIRLLERAEADVVECACLIGLPKFKDFYKLNGKPVYVLVESRESDK

SEQ ID NO: 12742 - protein, 57 aa, Zea mays subsp. mays
  peptide (1)..(57): Ceres Seq. ID no. 12414783
MGQRKADGSFLAAVLEQWRDIDKPTMGGASALLRLAAKIDLVRGEIRSDGGGVSLVG

SEQ ID NO: 12743 - protein, 51 aa, Zea mays subsp. mays
  peptide (1)..(51): Ceres Seq. ID no. 12414784
MESPSTCWLSPVNQINKNLWVRGKLTVHSLLLCLSSGGTSTSQPWGVRQRY

SEQ ID NO: 12744 - DNA, 2463 bp, Zea mays subsp. mays
  misc_feature (1)..(2463): Ceres Seq. ID no. 12369025
  misc_feature (1)..(2463): Ortholog of  Ceres SEQ ID NO 14307896 as cited in SEQ ID NO 66915
  misc_feature (1)..(2463): Ortholog of  Ceres SEQ ID NO 13657008 as cited in SEQ ID NO 69164
ctggtcttctgcgagaagcacacgaagcaaccggggcacctccgcctgcgcctcccctctcagctactctgtttgtacgcggccgcatccatttcgtctgcccaggaatggaggaagaatatctgcagtgagggactgaggggatcccaggttccagacaaaactcaccgaggaaaaccattctccgacatggtgaggatgagaaggaggttggtgctgctgctgctcctcctcggcctcacggtgctttccccgctcgcgctctacactagccgcctctccgtggcgcttaactctataccgcgggttttccctggagaaatcacgaatcagggccgtggcgtcgaggcagataagctgaatgcgcttcctctggaaacagtgagctccttgaaagaacctgtcgacattgtcttctcagaggagctgactgaatctaagagccaagaattgcgattgccaaaggtaggtgcgcacaagagccgtgtgctctctgaagtcacggttgctgatgatggtacatcatcgaaagataatgaagtgattgagcaagtaattacgctggaagcacaggatggtggcttggtgaagggagcaggtgtttcagatgagcaggagaaaaacattggatctctgcagcaatcttcttctgaggaaagttcacaggacactatgcctaaacagacacctgcaaaggttgttgcggagaactcccaatcagctagaacagacggtaaaactaaaaccgctgttctacctgatatgcggatccgaaatatcaaggatcagttaatcaaggcgaaggtataccttggtcttggatccattagagcgagttctcaatatcttaaagacctacggcagaggatacgggaagttcaaaaggtgcttggtgatgcatccaaggactctgatctaccaaagaatgcacatgaaaaggttaaagcactggagcagatgctgattaagggaaaacagatgcaggatgattgttctattattgtaaaaaagcttcgagctatgcttcattcagcagaggagcagctgcatgcacacaaaaaacagactgtttttctgacacaacttgcagctaaaacccttcctaaaggtcttcactgcctccccctgagactagctaacgaatacttttcattggatcctgttcggcagcagttcccaaaccaacaaaatctcattaacccaaaactgtatcattatgcgttgttctcggataacatactagcaacagcggttgttgttaactcaacagtgttaaatgctaagcatccttctgatcatgttatccacatagtaactgacaaactgaattatgctccaatgagaatgtggttcctctctaatcctccggggaaagcaacaattgaagtacagaatattgaggagtttacatggctaaatgacagctacagtccagtactcaaacatcttgggtcccaatccatgattgattactactttggaacgaatcgtgcaaactcagattcaaacctaaaatatcgaaacccaaagtacctgtcaatccttaatcatctccgcttttacctacctgagatttatccaaagcttgacaagatggtctttcttgatgatgacatcgtagtaaagaaggatctggctggcctttggtcaatcaacatgaaggggaaggtaaacggtgctgttgagacttgtggagagagtttccatcgctatgatcgatacctgaatttttcaaatcctgttatcaccaagagttttgacccacatgcttgtgtttgggcttttggaatgaatgtgtttgacctggctgaatggaggcggcagaacataactgaaatttatcactcgtggcagaagcttaatgaagatagatcactctggaaacttggtactctccctccgggtttggtcacattctggaacaagacatttcccctcagccggtcatggcatgttcttggtctaggttacaatccccatgttaacagcagagacattgagcatgctgcagtcatacattacaatggcaacatgaagccctggttggagattggtctacccaagttccggagctactggtccaagtatctggattatgaccaatctttccttcgggaatgcaacatcaatccatgaaggaacctggtgcttttagtcccttctgacataaccaatagcctgttttctgtcgatgtgcactttagtgtagtcagcatagtactctcttgctttagatatcagttgttaacaagatttcttattgcctgtgcttcttgtcagaccctttgcataattgcaggaatatctgttatgtttttagagtacatgctttagagcagggcaaactttagatagtgcaatgctcttatgcgatatcgcctttatgtactgaacgtttgctgcaatcatgtaatttggaagcaaactttcccaacaatttaataggtattcaattgggtatcg

SEQ ID NO: 12745 - protein, 711 aa, Zea mays subsp. mays
  peptide (1)..(711): Ceres Seq. ID no. 12369026
LVFCEKHTKQPGHLRLRLPSQLLCLYAAASISSAQEWRKNICSEGLRGSQVPDKTHRGKPFSDMVRMRRRLVLLLLLLGLTVLSPLALYTSRLSVALNSIPRVFPGEITNQGRGVEADKLNALPLETVSSLKEPVDIVFSEELTESKSQELRLPKVGAHKSRVLSEVTVADDGTSSKDNEVIEQVITLEAQDGGLVKGAGVSDEQEKNIGSLQQSSSEESSQDTMPKQTPAKVVAENSQSARTDGKTKTAVLPDMRIRNIKDQLIKAKVYLGLGSIRASSQYLKDLRQRIREVQKVLGDASKDSDLPKNAHEKVKALEQMLIKGKQMQDDCSIIVKKLRAMLHSAEEQLHAHKKQTVFLTQLAAKTLPKGLHCLPLRLANEYFSLDPVRQQFPNQQNLINPKLYHYALFSDNILATAVVVNSTVLNAKHPSDHVIHIVTDKLNYAPMRMWFLSNPPGKATIEVQNIEEFTWLNDSYSPVLKHLGSQSMIDYYFGTNRANSDSNLKYRNPKYLSILNHLRFYLPEIYPKLDKMVFLDDDIVVKKDLAGLWSINMKGKVNGAVETCGESFHRYDRYLNFSNPVITKSFDPHACVWAFGMNVFDLAEWRRQNITEIYHSWQKLNEDRSLWKLGTLPPGLVTFWNKTFPLSRSWHVLGLGYNPHVNSRDIEHAAVIHYNGNMKPWLEIGLPKFRSYWSKYLDYDQSFLRECNINP

SEQ ID NO: 12746 - protein, 648 aa, Zea mays subsp. mays
  peptide (1)..(648): Ceres Seq. ID no. 12369027
MVRMRRRLVLLLLLLGLTVLSPLALYTSRLSVALNSIPRVFPGEITNQGRGVEADKLNALPLETVSSLKEPVDIVFSEELTESKSQELRLPKVGAHKSRVLSEVTVADDGTSSKDNEVIEQVITLEAQDGGLVKGAGVSDEQEKNIGSLQQSSSEESSQDTMPKQTPAKVVAENSQSARTDGKTKTAVLPDMRIRNIKDQLIKAKVYLGLGSIRASSQYLKDLRQRIREVQKVLGDASKDSDLPKNAHEKVKALEQMLIKGKQMQDDCSIIVKKLRAMLHSAEEQLHAHKKQTVFLTQLAAKTLPKGLHCLPLRLANEYFSLDPVRQQFPNQQNLINPKLYHYALFSDNILATAVVVNSTVLNAKHPSDHVIHIVTDKLNYAPMRMWFLSNPPGKATIEVQNIEEFTWLNDSYSPVLKHLGSQSMIDYYFGTNRANSDSNLKYRNPKYLSILNHLRFYLPEIYPKLDKMVFLDDDIVVKKDLAGLWSINMKGKVNGAVETCGESFHRYDRYLNFSNPVITKSFDPHACVWAFGMNVFDLAEWRRQNITEIYHSWQKLNEDRSLWKLGTLPPGLVTFWNKTFPLSRSWHVLGLGYNPHVNSRDIEHAAVIHYNGNMKPWLEIGLPKFRSYWSKYLDYDQSFLRECNINP

SEQ ID NO: 12747 - protein, 645 aa, Zea mays subsp. mays
  peptide (1)..(645): Ceres Seq. ID no. 12369028
MRRRLVLLLLLLGLTVLSPLALYTSRLSVALNSIPRVFPGEITNQGRGVEADKLNALPLETVSSLKEPVDIVFSEELTESKSQELRLPKVGAHKSRVLSEVTVADDGTSSKDNEVIEQVITLEAQDGGLVKGAGVSDEQEKNIGSLQQSSSEESSQDTMPKQTPAKVVAENSQSARTDGKTKTAVLPDMRIRNIKDQLIKAKVYLGLGSIRASSQYLKDLRQRIREVQKVLGDASKDSDLPKNAHEKVKALEQMLIKGKQMQDDCSIIVKKLRAMLHSAEEQLHAHKKQTVFLTQLAAKTLPKGLHCLPLRLANEYFSLDPVRQQFPNQQNLINPKLYHYALFSDNILATAVVVNSTVLNAKHPSDHVIHIVTDKLNYAPMRMWFLSNPPGKATIEVQNIEEFTWLNDSYSPVLKHLGSQSMIDYYFGTNRANSDSNLKYRNPKYLSILNHLRFYLPEIYPKLDKMVFLDDDIVVKKDLAGLWSINMKGKVNGAVETCGESFHRYDRYLNFSNPVITKSFDPHACVWAFGMNVFDLAEWRRQNITEIYHSWQKLNEDRSLWKLGTLPPGLVTFWNKTFPLSRSWHVLGLGYNPHVNSRDIEHAAVIHYNGNMKPWLEIGLPKFRSYWSKYLDYDQSFLRECNINP

SEQ ID NO: 12748 - DNA, 2188 bp, Zea mays subsp. mays
  misc_feature (1)..(2188): Ceres Seq. ID no. 12376651
  misc_feature (1)..(2188): Ortholog of  Ceres SEQ ID NO 13639243 as cited in SEQ ID NO 56820
  misc_feature (1)..(2188): Ortholog of  Ceres SEQ ID NO 13496409 as cited in SEQ ID NO 65697
gcacgagaccattacctagaacatcctaatcgaaaaacaacaaactcagtttccaaattagcaaattagcaagcaactgagtgcaacagaaacatgaaggtaacatgtttttttttctgcttcttttttttctgccgggaagagtttgtctctcttcgatggaccacggcatctagctcttttgtgtgtgtgtgcctctagccctccagctgatgaaacatcttcttgggcttttttttgatattattcgggtcccagcaaaggattgtgatcaaggtgcagatgacctgcgacaagtgccgtaaaaacgctctggctctagcttgctcgacatatggtaagcactgcgttactgatcgcagtgacccgtgtctgaacgcccagcctctcgcgtggtcgaggagcggcacagcagctgatcgtgtctgtgactgtgacgtcttggttgcaggagtgcaatccgtggggatcgagggtgaggagcgggaccagctcgtggtgatcggcgacggcgtcgacgccacctgcctggcgagcggcctgcggaagaaggtgaaggtgggcagggcggacatcgtgaaggtggaagcggtgggcgacgagaaggaggcgacgacgaaggacgacgcggccgccagtagtagtagtagtagtcctaatcccgtggcccaccgcttacaccttccctcggtcccttccatctcctagccgccgccgccgccgcccaaaaccctacctaccctcttctccccctcactctcctttcatctccattctaatggcggcccaacccgtccggcgaagctgctagtgcttgtatctactatcttcatcaggtacttcgcgatcctactgaagtattccccgccgccgctgccatggccaccctcaaccctttcgaactcctcggcgccgacgacaacgacgacccgtcgctgttgattgcggcggcggcggctgctgctcagaaagccgaggcgaagaagtccgccgtggcgcctgctgggaaggctgcccagcctgcggcgaccaccaagttcccgaccaagcccgctcctccctcgcagacggttcgggatgcacgcggcggtggctcatcagctcgtggaggctttggccgtggtgaacgtggccgtggcagaggtggacggggatatggtcagaaccgtggcttcagtggtgacaatggcaatgagttccagggaggttatggtggcggaggctatggggatggtgctgtaactggtggatctgaaggagaaagggagagagacactcgtcccccgtaccgtggcggaggcagacgtggtggttacaggaatgttgagtttggtgatgactctgcagaggccaccacggagaaactatgagcgccacagcgggactggccatggctatgagatgaagcgtgatggcgcagggcgtgggaactggggcactgccactgatgagcttattgcccaggatgcagaggactctccgaagatggaggaggctgctcctgttgctgagaaacaaggtgagcagatcgatgccccagcagcagatgagaacaaagataacaaggatgctactgcaaatgaggaggaagaaaaggaagaggacaaggagatgactctggaggaatttgagaaaataagagaggagaagaggaaagcactacttgcgttgaaggctgaggagaggaaagttgaagttgacaaggatctgcgttctctgcagccactttcaaacaagaaagaaaatgatgaagttttcattaagctgggttctgacaaggataagaagaaggaaaatgctgagcgtgatgagcgtgccaagaagtcggtgagcatcaacgagttcctgaaacctgctgaaggagaaaggtactacggcggccgtggccgtggaaggggccgtggggatcgtggtggttttagaggcggatacggagggggatacagtcgtggcccagctgctgctgctccatccattgaagatcaagctcagttcccaagccttggtgggaagtgaagggcgcccagctgctgctgtcaccgagcgttgtgttgtctgctgttgtcatatttaaattttgtccgacgttacatttctgtgccacggtttaaacggaacaaataatggtgttgcatgtggctatctttggttatgtggtacttgacgttgaataccggagttgtttatc

SEQ ID NO: 12749 - protein, 231 aa, Zea mays subsp. mays
  peptide (1)..(231): Ceres Seq. ID no. 12376652
MLSLVMTLQRPPRRNYERHSGTGHGYEMKRDGAGRGNWGTATDELIAQDAEDSPKMEEAAPVAEKQGEQIDAPAADENKDNKDATANEEEEKEEDKEMTLEEFEKIREEKRKALLALKAEERKVEVDKDLRSLQPLSNKKENDEVFIKLGSDKDKKKENAERDERAKKSVSINEFLKPAEGERYYGGRGRGRGRGDRGGFRGGYGGGYSRGPAAAAPSIEDQAQFPSLGGK

SEQ ID NO: 12750 - protein, 226 aa, Zea mays subsp. mays
  peptide (1)..(226): Ceres Seq. ID no. 12376653
MTLQRPPRRNYERHSGTGHGYEMKRDGAGRGNWGTATDELIAQDAEDSPKMEEAAPVAEKQGEQIDAPAADENKDNKDATANEEEEKEEDKEMTLEEFEKIREEKRKALLALKAEERKVEVDKDLRSLQPLSNKKENDEVFIKLGSDKDKKKENAERDERAKKSVSINEFLKPAEGERYYGGRGRGRGRGDRGGFRGGYGGGYSRGPAAAAPSIEDQAQFPSLGGK

SEQ ID NO: 12751 - protein, 204 aa, Zea mays subsp. mays
  peptide (1)..(204): Ceres Seq. ID no. 12376654
MKRDGAGRGNWGTATDELIAQDAEDSPKMEEAAPVAEKQGEQIDAPAADENKDNKDATANEEEEKEEDKEMTLEEFEKIREEKRKALLALKAEERKVEVDKDLRSLQPLSNKKENDEVFIKLGSDKDKKKENAERDERAKKSVSINEFLKPAEGERYYGGRGRGRGRGDRGGFRGGYGGGYSRGPAAAAPSIEDQAQFPSLGGK

SEQ ID NO: 12752 - DNA, 822 bp, Zea mays subsp. mays
  misc_feature (1)..(822): Ceres Seq. ID no. 12366902
  misc_feature (1)..(822): Ortholog of  Ceres SEQ ID NO 13659044 as cited in SEQ ID NO 66526
caagttcagtcacagccacaggtatgctgacactcctgccccttcgcttgccattctcgctacctgtagccgccacactcccgaacgccgccttgctcctcccggcaagcaccagggtctccctccgccagatcacgcagggagccagcatgaacgctgccgccgcctcctccgctccggacgctgctgcggccgccactggcgaggagggcgcgaaggaggccgtggacgtgctggtccagtacgtggtcctgcggcgcgatctggcggacgcgtggccgctggggagcgtcgtggcgcagggctgccacgccgccgtggccgccgtgtgggcgcaccgggaccacccggacaccgccgcctactgcgcgcccgacaacctcgaccgaatgcacaaggtaacactggaggtgaaaggagagacacagctgaataacctggctgagaagctggcagcagctggtgtccggtacaagctgtggatagagcagcctgagaacatcccaacatgcatagctacagcaccctgcccaaagtcgcaggtttcttctttcttcaagaagctcaagctttgcaaatgagcaaagaacaacagttgttcattgctccgtctgctactgtcattacggaggatcatcaaaactttcaaaactgcccatgtatgtttcatgacatgttctgctagcaacaagccatagataattagatatctcagtgatgtaatggagatatttgtgtcgttattcgccttgctgattttacatgattgtccattcacttactgtgtacctgtctcagcagttaattaatgcgaataaattg

SEQ ID NO: 12753 - protein, 192 aa, Zea mays subsp. mays
  peptide (1)..(192): Ceres Seq. ID no. 12366903
SSVTATGMLTLLPLRLPFSLPVAATLPNAALLLPASTRVSLRQITQGASMNAAAASSAPDAAAAATGEEGAKEAVDVLVQYVVLRRDLADAWPLGSVVAQGCHAAVAAVWAHRDHPDTAAYCAPDNLDRMHKVTLEVKGETQLNNLAEKLAAAGVRYKLWIEQPENIPTCIATAPCPKSQVSSFFKKLKLCK

SEQ ID NO: 12754 - protein, 185 aa, Zea mays subsp. mays
  peptide (1)..(185): Ceres Seq. ID no. 12366904
MLTLLPLRLPFSLPVAATLPNAALLLPASTRVSLRQITQGASMNAAAASSAPDAAAAATGEEGAKEAVDVLVQYVVLRRDLADAWPLGSVVAQGCHAAVAAVWAHRDHPDTAAYCAPDNLDRMHKVTLEVKGETQLNNLAEKLAAAGVRYKLWIEQPENIPTCIATAPCPKSQVSSFFKKLKLCK

SEQ ID NO: 12755 - protein, 144 aa, Zea mays subsp. mays
  peptide (1)..(144): Ceres Seq. ID no. 12366905
KFSHSHRYADTPAPSLAILATCSRHTPERRLAPPGKHQGLPPPDHAGSQHERCRRLLRSGRCCGRHWRGGREGGRGRAGPVRGPAARSGGRVAAGERRGAGLPRRRGRRVGAPGPPGHRRLLRARQPRPNAQGNTGGERRDTAE

SEQ ID NO: 12756 - DNA, 1898 bp, Zea mays subsp. mays
  misc_feature (1)..(1898): Ceres Seq. ID no. 12352643
  misc_feature (1)..(1898): Ortholog of  Ceres SEQ ID NO 15177919 as cited in SEQ ID NO 52743
aatccaaaccctagagagagagagagagagtgtgtagtgtgtgtgtgtgagagagagggggattggaggcgaaggcagcgggctagcgctagcggaggaggagagatccgctgaggtggaacgcccgatcggcggagccccatccaccaccactccacaagatgcggggcgggacgctgcagatcaactggcacgaccagcagccggtgctcagcctcgacttccaccccgtctcccgccgcctcgccacagccggagcggaccacgacgtcaagatctgggaggtagcgtcggacggcaagctccccaccgccaccttcaagaccggcctggtccccaacaccaccgcccacagctccgcggtcaacgtcctccggttctccccttcaggggagtatctcgcctccggtgctgatggtggcggcatcaccctctggaaactgcatcccgctgacgacggcgaggcatggaaaattcacaagacgttactattccatcacaaggatgttcttgaccttcagtggtcgcatgacagcacatttcttgtttctgcatcagtcgacaacacttgcataatttgggaagctagtaaaggcacagtgcaacaaaagctagagggacatctgcattatgttcagggtgtggcatgggatcctttgggccagtatattgcttcactgagttctgacagaacctgtaaaatatatgcaaaaaagcctcagggcaaatccaagaacgcggagaggttgaactttgtttgccagcatacactagtgaaggtagaataccagaatcatgatgaatctaagccaccaaccaaatctcatttgtttcatgatgagacactaccatctttcttccgaaggttggcatggtcacctgatggatcttttctagtattgccagcaggcctttctaaacactcctccgaggtgattaatacagcttatgtaatgtccaggcgtgacctctcaaggccttcgatacaactccctggggcaagtaaagctatagtggcagtacgcttctgccctgtactattcaaaccacgtggttctaactcagatggtttcttcaagcttccttatagagttgtctttgctgtggctactttgaactctctgtatgtctatgatacagaaagtgttcctccaattctagtccatgctggtctacactatgctgccattaccgatattgcatggtcttctgatgctaagtacctggcagtgtcatcacgagatggctactgtactataatagagtttgagaatgaggaactgggacagcctcacatactccccggatcaaaggaagttgctaatgggaatctgacacctgagaccaagaagcctgtatgtgctgatagcatgaaggttgataatagtgccaacaagcttaagatggaagccagtcctgttgctgtaggagttagagcaccactgctgccaactgagaacatcaagagaacaggagagcttgccgaaggaaatgtaacctgtgaaaacaaggagccggtaacaatagacagtatggaagtagatgccgatgataccaaaggcaaggaggcaaccatacccgtggcagctgaagtgacaccgccaccagcggtaccggcagcgaagaacagcgcatctagtaagcctgctaagaggcgaattactcctatcgcaatcgactaggtagtagacgcagcagttagggttttgatgtgttatgtagtgatggcaagtactggatactatgtttaggctaccctgtaaagtcgtttgtgctgcggtgctcatcttctgctctagtcctcctgctcttgacacaattggggagaatgtgaacagaagggctgtgtgtatgtatgagcacactttgttatggcgcaacatgcaagccactaaccg

SEQ ID NO: 12757 - protein, 506 aa, Zea mays subsp. mays
  peptide (1)..(506): Ceres Seq. ID no. 12352644
MRGGTLQINWHDQQPVLSLDFHPVSRRLATAGADHDVKIWEVASDGKLPTATFKTGLVPNTTAHSSAVNVLRFSPSGEYLASGADGGGITLWKLHPADDGEAWKIHKTLLFHHKDVLDLQWSHDSTFLVSASVDNTCIIWEASKGTVQQKLEGHLHYVQGVAWDPLGQYIASLSSDRTCKIYAKKPQGKSKNAERLNFVCQHTLVKVEYQNHDESKPPTKSHLFHDETLPSFFRRLAWSPDGSFLVLPAGLSKHSSEVINTAYVMSRRDLSRPSIQLPGASKAIVAVRFCPVLFKPRGSNSDGFFKLPYRVVFAVATLNSLYVYDTESVPPILVHAGLHYAAITDIAWSSDAKYLAVSSRDGYCTIIEFENEELGQPHILPGSKEVANGNLTPETKKPVCADSMKVDNSANKLKMEASPVAVGVRAPLLPTENIKRTGELAEGNVTCENKEPVTIDSMEVDADDTKGKEATIPVAAEVTPPPAVPAAKNSASSKPAKRRITPIAID

SEQ ID NO: 12758 - DNA, 751 bp, Zea mays subsp. mays
  misc_feature (1)..(751): Ceres Seq. ID no. 12414680
  misc_feature (1)..(751): Ortholog of  Ceres SEQ ID NO 14307065 as cited in SEQ ID NO 53918
cactgtttacaaaatcaggaatgttattcttggaagtgagtctcatagcctttctacttcaaggaaatgatgccagcggttttgaatctttggcacgaacctttgttatatctggagctgtagttgctgctgatgtattgctcaagactatatatgtttttggcttcggtgttcctttgttcattgatactgatcaaggaactagtgggaaatggggcctgtggattctccacaaacttgtgcttactggagtctatgggctgattgttttcatgcatcattcaagatggagagacaggctgcctgcaaaaccagcatactacaactatgtatgtgtgatgttgctactgaatggcatatcactgtttggatgtttccttattgcaagtggagctggatttggtttatggttatataatctcacaaccgtatgctatcattctctttaccttcccctcctatatgtgactttcttagcagacttcttccaggaggaagacatgctcctagagaacgtctactattctgaaatgaaggatgctgggttcttcgatgctgactgggattaatccgtggctactgtgctgtatgacccatcccatatgaagtacgctgtatttgtttttattttatctgtgtactctcaacgtagaacaggaaatgtatgtagctagtcgtggtagtgaatggaaatatgtaatcttactgctgcatacttcagaaaatcagaattcaagtgatttcacggccg

SEQ ID NO: 12759 - protein, 188 aa, Zea mays subsp. mays
  peptide (1)..(188): Ceres Seq. ID no. 12414681
LFTKSGMLFLEVSLIAFLLQGNDASGFESLARTFVISGAVVAADVLLKTIYVFGFGVPLFIDTDQGTSGKWGLWILHKLVLTGVYGLIVFMHHSRWRDRLPAKPAYYNYVCVMLLLNGISLFGCFLIASGAGFGLWLYNLTTVCYHSLYLPLLYVTFLADFFQEEDMLLENVYYSEMKDAGFFDADWD

SEQ ID NO: 12760 - protein, 182 aa, Zea mays subsp. mays
  peptide (1)..(182): Ceres Seq. ID no. 12414682
MLFLEVSLIAFLLQGNDASGFESLARTFVISGAVVAADVLLKTIYVFGFGVPLFIDTDQGTSGKWGLWILHKLVLTGVYGLIVFMHHSRWRDRLPAKPAYYNYVCVMLLLNGISLFGCFLIASGAGFGLWLYNLTTVCYHSLYLPLLYVTFLADFFQEEDMLLENVYYSEMKDAGFFDADWD

SEQ ID NO: 12761 - protein, 98 aa, Zea mays subsp. mays
  peptide (1)..(98): Ceres Seq. ID no. 12414683
MHHSRWRDRLPAKPAYYNYVCVMLLLNGISLFGCFLIASGAGFGLWLYNLTTVCYHSLYLPLLYVTFLADFFQEEDMLLENVYYSEMKDAGFFDADWD

SEQ ID NO: 12762 - DNA, 1064 bp, Zea mays subsp. mays
  misc_feature (1)..(1064): Ceres Seq. ID no. 12345171
  misc_feature (1)..(1064): Ortholog of  Ceres SEQ ID NO 13598846 as cited in SEQ ID NO 1217
acagagcctgaaatcggctacacacacgcacacgcatacgcaggaattgaaccagccgctagtcccgcgccttttgcggccatgatcaagctgagctactccaagaggctcttcaagaggatctcctccacgtccaataagcagcaggcggccgcttccggcggcggcgacaatggcagcgcggccgcgaccggcggaggaggcgcccgggagatcgagtgggaggtgaggccgggagggatgctggtgcagaagagggacgggaggggcggccgggagacggtcgccgtcagggtttccaccggcttctcctggcatgatgtgtccatcggagccacctccacttttggggagctgaaggtgatgctgtccatggtaacagggctggagccacgggagcagaggctgctgttcaggggcaaagagaggaacgacaccgaccacctccacatggttggggtgagggacaaggacaaggtcctcctgctagaggacccggccctcaaggacatgaagctccgggctctgtcggctcgagtcgtgccggggccgtgccagtcttttatccaagtgtaacttcccgctaccgtgctaactgttaccactatacttgttagttgtgttatatcccaccaccaaggtacttttagtttctggaaagcccttttaaatatccggaatccgaagggtttgctctctaaaccactctgtctttagtgtcacttcgtggaagggtccctgaagatgagagtcagccatagtggctgtgatgtgatttggagcctacagcttgttcgctgcggcttgctgcggctgcaatccggctgcggctgcggcttctacagtatttttctctctatggattgcagctgcagcagtccaaacagctgcaacagtgtcggcttgcagccaaccgaacacgcccctagtgtctgggatgtttttttatggtccctactactactactaccaccgtggtcatttctcattcctacctacatctacatgcatgggtcatgggtaggcaactaggcatgagtgataaagattgtatgtatgtacac

SEQ ID NO: 12763 - protein, 191 aa, Zea mays subsp. mays
  peptide (1)..(191): Ceres Seq. ID no. 12345172
TEPEIGYTHAHAYAGIEPAASPAPFAAMIKLSYSKRLFKRISSTSNKQQAAASGGGDNGSAAATGGGGAREIEWEVRPGGMLVQKRDGRGGRETVAVRVSTGFSWHDVSIGATSTFGELKVMLSMVTGLEPREQRLLFRGKERNDTDHLHMVGVRDKDKVLLLEDPALKDMKLRALSARVVPGPCQSFIQV

SEQ ID NO: 12764 - protein, 164 aa, Zea mays subsp. mays
  peptide (1)..(164): Ceres Seq. ID no. 12345173
MIKLSYSKRLFKRISSTSNKQQAAASGGGDNGSAAATGGGGAREIEWEVRPGGMLVQKRDGRGGRETVAVRVSTGFSWHDVSIGATSTFGELKVMLSMVTGLEPREQRLLFRGKERNDTDHLHMVGVRDKDKVLLLEDPALKDMKLRALSARVVPGPCQSFIQV

SEQ ID NO: 12765 - protein, 111 aa, Zea mays subsp. mays
  peptide (1)..(111): Ceres Seq. ID no. 12345174
MLVQKRDGRGGRETVAVRVSTGFSWHDVSIGATSTFGELKVMLSMVTGLEPREQRLLFRGKERNDTDHLHMVGVRDKDKVLLLEDPALKDMKLRALSARVVPGPCQSFIQV

SEQ ID NO: 12766 - DNA, 1161 bp, Zea mays subsp. mays
  misc_feature (1)..(1161): Ceres Seq. ID no. 12414676
  misc_feature (1)..(1161): Ortholog of  Ceres SEQ ID NO 13594809 as cited in SEQ ID NO 51847
  misc_feature (1)..(1161): Ortholog of  Ceres SEQ ID NO 15176321 as cited in SEQ ID NO 52814
  misc_feature (1)..(1161): Ortholog of  Ceres SEQ ID NO 12563124 as cited in SEQ ID NO 57104
  misc_feature (1)..(1161): Ortholog of  Ceres SEQ ID NO 15226273 as cited in SEQ ID NO 64934
  misc_feature (1)..(1161): Ortholog of  Ceres SEQ ID NO 12617639 as cited in SEQ ID NO 65219
  misc_feature (1)..(1161): Ortholog of  Ceres SEQ ID NO 15173998 as cited in SEQ ID NO 0
  misc_feature (1)..(1161): Ortholog of  Ceres SEQ ID NO 15178333 as cited in SEQ ID NO 0
  misc_feature (1)..(1161): Ortholog of  Ceres SEQ ID NO 15179982 as cited in SEQ ID NO 0
atcggacggccgcgtggctcccaggagccctatatcaccatccttgcccaccacctcctgaccctcatcacccgcgtccgccaccgccgccgcctttcgtaccgcggcccctaaacccctttcctcgttcccctccgtctctcagttaggcacaatgatgctagctaataagcttggtggtttgctcaagaatgctacgagttcaaagagttcaaatatgtctgtctaccaagcaatcagatgcatgttcatcatccaagctttttgttggagggctttcttatggaaccgatgatcaccagtctcagagacgagtttgccaaatatggacaagttattgaagctaagattatccttgatcgtgagtctgggaggtccagaggttttggctttataacttacacgtcttctgaggaggcttcggctgccatcactgccatggatggaaagactctggatggacggaacatacgggttaatcatgctaacgagaggacaggtggcttccgcagcagccgtggttatggtggtggcggctatggtggtggtggtggtggctatggtggcggtggctatggtggcggctatggtggtggtagcggtggctatggcggcggcggcagcggtgactatggtggcggcagcggtggatatggtggcaactacggcaacagggctggtggtggctatggtggtggtggtgattatggagttgcaggtggggctgaaggcagttttgctgctggaggtagcgacagctttggcagcagtaactttgctgacagtggttttggtgaaaaccctgctggtagctttggcgcaacgggtggttccagtggcgctgatgggttctctgctggcacacctggtgacggtaacaagaatgatgaaatcatggatgatctcttcaaggacgatgagcctgacagctacgccaacaagaggagctaatttgtgtccaccaccaccatgcgaggccgtgtggattctaggccatatgtattcggtagtgttttctgttaacatgataggtgtctgatgtctaaataatggaacgagtccttttgttgagtttgagttgtggaactttcaaagcgtgcgttgcatgtggcgcttgtgccggcaaacatggcatactttcatgttatattgntatttgct

SEQ ID NO: 12767 - protein, 236 aa, Zea mays subsp. mays
  peptide (1)..(236): Ceres Seq. ID no. 12414677
MHVHHPSFLLEGFLMEPMITSLRDEFAKYGQVIEAKIILDRESGRSRGFGFITYTSSEEASAAITAMDGKTLDGRNIRVNHANERTGGFRSSRGYGGGGYGGGGGGYGGGGYGGGYGGGSGGYGGGGSGDYGGGSGGYGGNYGNRAGGGYGGGGDYGVAGGAEGSFAAGGSDSFGSSNFADSGFGENPAGSFGATGGSSGADGFSAGTPGDGNKNDEIMDDLFKDDEPDSYANKRS

SEQ ID NO: 12768 - protein, 222 aa, Zea mays subsp. mays
  peptide (1)..(222): Ceres Seq. ID no. 12414678
MEPMITSLRDEFAKYGQVIEAKIILDRESGRSRGFGFITYTSSEEASAAITAMDGKTLDGRNIRVNHANERTGGFRSSRGYGGGGYGGGGGGYGGGGYGGGYGGGSGGYGGGGSGDYGGGSGGYGGNYGNRAGGGYGGGGDYGVAGGAEGSFAAGGSDSFGSSNFADSGFGENPAGSFGATGGSSGADGFSAGTPGDGNKNDEIMDDLFKDDEPDSYANKRS

SEQ ID NO: 12769 - protein, 219 aa, Zea mays subsp. mays
  peptide (1)..(219): Ceres Seq. ID no. 12414679
MITSLRDEFAKYGQVIEAKIILDRESGRSRGFGFITYTSSEEASAAITAMDGKTLDGRNIRVNHANERTGGFRSSRGYGGGGYGGGGGGYGGGGYGGGYGGGSGGYGGGGSGDYGGGSGGYGGNYGNRAGGGYGGGGDYGVAGGAEGSFAAGGSDSFGSSNFADSGFGENPAGSFGATGGSSGADGFSAGTPGDGNKNDEIMDDLFKDDEPDSYANKRS

SEQ ID NO: 12770 - DNA, 1206 bp, Zea mays subsp. mays
  misc_feature (1)..(1206): Ceres Seq. ID no. 13492266
  misc_feature (1)..(1206): Ortholog of  Ceres SEQ ID NO 14308727 as cited in SEQ ID NO 58726
  misc_feature (1)..(1206): Ortholog of  Ceres SEQ ID NO 13663517 as cited in SEQ ID NO 66850
aaaagagagagggggaggtcgacgagacagagagagaaggccaagaggcttcctctccccattcctcccttccgtgccctagccgagccagccgcgaggaaggaggcatcccgccgtctcgcctggcgcccgcccgtcggccgaccttctgccgcagcttccaattgtaaaaagatcatagatttttgtgcaagagcgagtggatatggaaccatcccctcagcctatgggtgtcgctgccggtgggtcacaagtgtatcctgcctctgcctatccgcctgcagcaacagtagctcctgcttctgttgtatctgctggtttacagtcagggcagccattcccagccaatcctggtcatatgagtgctcagcaccagattgtctaccaacaagctcaacaattccaccaacagctccagcagcaacaacaacagcagcttcagcagttctgggttgaacgcatgactgaaattgaggcgacgactgatttcaagaaccacaacttgccacttgcgaggataaagaagatcatgaaggccgatgaagatgttcgcatgatctcagctgaagctcctgtagtctttgcaaaagcttgtgagatattcatactggagctgacacttaggtcgtggatgcacactgaggagaacaagcgccgcaccttgcaaaagaatgacattgcagcagcgatcactaggactgacatttatgacttcttggtcgacattgttcccagggatgagatgaaggaggacggaattgggcttcctagggctggtctgccacccatgggagccccagctgatgcatatccatactactacatgccacagcagcaggtgcctggttctggaatggtttatggtgcccagcaagggcacccagtgacttatttgtggcaggagcctcagcaacagcaggagcaagctcctgaagagcagcaatctgcatgaaagtggctgagaatattgctcagaagctatcacctgattcagagttctcattttaggttgtccaaactgcaggttttcttagtaatatcgttggttatcaaactgaaacaggcgattctaagtagggtgtagcatcatggtagtttcatttctgcttgtgatgttagttgaaaggataatgattagtggctagtggattaaagttaccataccatttccttctattccgaaagtttgcctccatgaggcctctg

SEQ ID NO: 12771 - protein, 248 aa, Zea mays subsp. mays
  peptide (1)..(248): Ceres Seq. ID no. 13492267
MEPSPQPMGVAAGGSQVYPASAYPPAATVAPASVVSAGLQSGQPFPANPGHMSAQHQIVYQQAQQFHQQLQQQQQQQLQQFWVERMTEIEATTDFKNHNLPLARIKKIMKADEDVRMISAEAPVVFAKACEIFILELTLRSWMHTEENKRRTLQKNDIAAAITRTDIYDFLVDIVPRDEMKEDGIGLPRAGLPPMGAPADAYPYYYMPQQQVPGSGMVYGAQQGHPVTYLWQEPQQQQEQAPEEQQSA

SEQ ID NO: 12772 - protein, 241 aa, Zea mays subsp. mays
  peptide (1)..(241): Ceres Seq. ID no. 13492268
MGVAAGGSQVYPASAYPPAATVAPASVVSAGLQSGQPFPANPGHMSAQHQIVYQQAQQFHQQLQQQQQQQLQQFWVERMTEIEATTDFKNHNLPLARIKKIMKADEDVRMISAEAPVVFAKACEIFILELTLRSWMHTEENKRRTLQKNDIAAAITRTDIYDFLVDIVPRDEMKEDGIGLPRAGLPPMGAPADAYPYYYMPQQQVPGSGMVYGAQQGHPVTYLWQEPQQQQEQAPEEQQSA

SEQ ID NO: 12773 - protein, 197 aa, Zea mays subsp. mays
  peptide (1)..(197): Ceres Seq. ID no. 13492269
MSAQHQIVYQQAQQFHQQLQQQQQQQLQQFWVERMTEIEATTDFKNHNLPLARIKKIMKADEDVRMISAEAPVVFAKACEIFILELTLRSWMHTEENKRRTLQKNDIAAAITRTDIYDFLVDIVPRDEMKEDGIGLPRAGLPPMGAPADAYPYYYMPQQQVPGSGMVYGAQQGHPVTYLWQEPQQQQEQAPEEQQSA

SEQ ID NO: 12774 - DNA, 2031 bp, Zea mays subsp. mays; identical to SEQ ID NO: 1960
  misc_feature (1)..(2031): Ceres Seq. ID no. 12348893
  misc_feature (1)..(2031): Ortholog of  Ceres SEQ ID NO 15171626 as cited in SEQ ID NO 57201

SEQ ID NO: 12775 - protein, 393 aa, Zea mays subsp. mays; identical to SEQ ID NO: 1961
  peptide (1)..(393): Ceres Seq. ID no. 12348894

SEQ ID NO: 12776 - protein, 281 aa, Zea mays subsp. mays; identical to SEQ ID NO: 1962
  peptide (1)..(281): Ceres Seq. ID no. 12348895

SEQ ID NO: 12777 - protein, 210 aa, Zea mays subsp. mays; identical to SEQ ID NO: 1963
  peptide (1)..(210): Ceres Seq. ID no. 12348896

SEQ ID NO: 12778 - DNA, 902 bp, Zea mays subsp. mays; identical to SEQ ID NO: 8007
  misc_feature (1)..(902): Ceres Seq. ID no. 12341316
  misc_feature (1)..(902): Ortholog of  Ceres SEQ ID NO 13594090 as cited in SEQ ID NO 51093

SEQ ID NO: 12779 - protein, 213 aa, Zea mays subsp. mays; identical to SEQ ID NO: 8008
  peptide (1)..(213): Ceres Seq. ID no. 12341317

SEQ ID NO: 12780 - protein, 188 aa, Zea mays subsp. mays; identical to SEQ ID NO: 8009
  peptide (1)..(188): Ceres Seq. ID no. 12341318

SEQ ID NO: 12781 - protein, 123 aa, Zea mays subsp. mays; identical to SEQ ID NO: 8010
  peptide (1)..(123): Ceres Seq. ID no. 12341319

SEQ ID NO: 12782 - DNA, 960 bp, Zea mays subsp. mays
  misc_feature (1)..(960): Ceres Seq. ID no. 12344622
  misc_feature (1)..(960): Ortholog of  Ceres SEQ ID NO 12603572 as cited in SEQ ID NO 20702
  misc_feature (1)..(960): Ortholog of  Ceres SEQ ID NO 13592738 as cited in SEQ ID NO 20784
  misc_feature (1)..(960): Ortholog of  Ceres SEQ ID NO 15178253 as cited in SEQ ID NO 55885
  misc_feature (1)..(960): Ortholog of  Ceres SEQ ID NO 12616797 as cited in SEQ ID NO 63716
gactgccatcttcttccgcttctaacttccgttccgcaaattgaaagctcggcgttgccctgcctcgagctcgaaggactgtccctatacgtcgttgtccagctcctcgcatattgtggcctggtgcagattggagatccgcccggacttggatcgagtcctcctgtctttggacattcattggagtgctccattcattaggcagcatgcctaagataaagacaagccgtgtcaagtatcctgaaggatgggagcttattgaaccaacaatccgtgagttggatgccaaaatgagagaagctgaaaatgatccacatgatgggaagagaaagtgtgaagctctctggcctattttccgcatttctcatcaaaggagccgctacatatacgatctttactacagaaggaaggagatatcacaggagctttatgagttctgcctagaccagggttatgcagaccgtaacctgattgcaaagtggaaaaagccaggttacgagcgcctttgctgcctccggtgcatacagacacgtgaccacaacttcgcaacgacctgcgtctgccgcgtccccaagcatctgagggaggagcaggtgatagaatgtgtccactgcggctgcaggggttgtgccagcggtgactaatcttgtcatcatgtcgttcggctcacgagtcacgactcaccatcgcaaccttaaccggatgaggtgccctgctgtgaacatggatccggctgcggtgattagcattagtttattgggtaaactagtatggggaggactaaatttcctcacgtttggatgtttctaactgttatgtactactatgacgctctctcgtgtcacaattgcttgcgttaaattagtggcgcttttgcattttattgagtctgttaattggctactgttgtgggttctaacaatattaaattttatattttatatttttcaacgatttttc

SEQ ID NO: 12783 - protein, 145 aa, Zea mays subsp. mays
  peptide (1)..(145): Ceres Seq. ID no. 12344623
MPKIKTSRVKYPEGWELIEPTIRELDAKMREAENDPHDGKRKCEALWPIFRISHQRSRYIYDLYYRRKEISQELYEFCLDQGYADRNLIAKWKKPGYERLCCLRCIQTRDHNFATTCVCRVPKHLREEQVIECVHCGCRGCASGD

SEQ ID NO: 12784 - protein, 117 aa, Zea mays subsp. mays
  peptide (1)..(117): Ceres Seq. ID no. 12344624
MREAENDPHDGKRKCEALWPIFRISHQRSRYIYDLYYRRKEISQELYEFCLDQGYADRNLIAKWKKPGYERLCCLRCIQTRDHNFATTCVCRVPKHLREEQVIECVHCGCRGCASGD

SEQ ID NO: 12785 - DNA, 2419 bp, Zea mays subsp. mays
  misc_feature (1)..(2419): Ceres Seq. ID no. 12358117
  misc_feature (1)..(2419): Ortholog of  Ceres SEQ ID NO 13595870 as cited in SEQ ID NO 62101
  misc_feature (1)..(2419): Ortholog of  Ceres SEQ ID NO 13590241 as cited in SEQ ID NO 63878
  misc_feature (1)..(2419): Ortholog of  Ceres SEQ ID NO 13657939 as cited in SEQ ID NO 66349
atgtgggctcatctcttccttatcgacgctgtggccgcccagccgcccacgttgcctcctccctgagacaatccccacgccaccgcgcaccggagacgaacctgaggagagaaaaatctgcgcccgtcagtgtgctcgcctacttctacgctccgctcgttcccccaaatagttcctcggcttcgctcccttcccctccctgctccggctccggtttgcacacagtaagaaaagatggcgctgccatccatgagtcttgcggcaaagggtgtgcttcccttctcagcacgtacctcgagtggtgtcacacaaaggccggtgtcagtgaccgcttccttggagcacaaaaccagcgatgccagaaggaagttcctaaaacttgcgcttgggaaccttggagttggactgcccaccttgttgggcgctaagaaagctctcgctgatgagcaaggcgtctcgtcctcgaggatgtcttattcgaggttccttgagtatcttgacaaggatagagtgaagaaggttgatttgtttgagaatgggacaattgctattgtggaggccatttctcctgagcttggtaaccgcatgcaaagagtccgtgtgcagcttcctggtctaagccaggagcttcttcagaagttgagggagaagaacatcgattttgctgctcacagcaaccaggaagactctggttctcttctgttcaaccttattggaaatttggcattcccgcttatccttatcggtggtctgtttttactttcaagaagggcacagggtggcctcggtggacccaatggtcctggctttccccttggttttggtcaatctagggccaagtttcagatggaacccaacactggtgttacatttgatgatgttgctggtgtcgatgaagcgaagcaagacttcatggaagtggttgagttcttgaagaaacccgaaaggttcactgctgttggtgctcgcattcctaagggtgttctgcttgtcggtcctcctgggacgggtaaaactttgcttgccaaggcaattgcaggagaggctggcgtgccatttttctcaatttcaggttctgagtttgtggagatgtttgttggtgttggagcttccagagttcgtgaccttttcaagaaggccaaggagaatgctccttgcatagtgtttgttgatgaaattgatgctgttggaaggcaaagaggtacaggtattggtggtggaaatgatgaaagggagcagactctcaatcaactactaactgagatggatggtttcgagggcaacactggaattattgttattgctgccactaaccgggctgacatcttggattccgctttacttagacctgggcgttttgatagacaggtgtctgtcgacgttcctgatgtacgtggaaggacagagattctaaaagtgcatggtagcaacaagaagtttgattctgatgtttctcttgatgtcatagcaatgagaacacctgggttcagcggagcagacttggcaaaccttctgaatgaagcagccattctggctggaagacggggaaggacagcaatttcttcaaaagagattgatgattctattgacagaattgtagctggtatggaagggactgtgatgacagactggaagagcaaaagtcttgttgcttaccatgaagttgggcatgcaatttgcggaactttgacgcctggccatgatcctgtccaaaaggttaccttagttccaaggggtcaagctcgtggtcttacatggtttatcccgatggatgacccaacactcatctccaggcagcaactttttgccagaattgttggcggccttggtggtagagctgctgaggaggtcatatttggagagcctgaggtgaccactggagctgctggtgacttgcagcaaattactggcttagccaagcagatggttgtgacattcggtatgtctgaaattggtccatggtctctgatggagggtggagcgcagagtggggacgtcatcatgagaatgatggcaaggaactccatgtcagagaagctcgcggaggacattgattcggccgtgaagcagttgtcggatgaggcctacgagatcgctttgaggcacattagaaacaacagggaggccattgacaaaatcgttgaggtgctcattgagaaggagacagtgaccggagacgagttccgggcgatcctttctgagtttgccgagatccctgttgagaaccgggttcccccagccacaccggcggccgcgctcccagcctaaaccctagccttgtaggggaggattttcttgttgtatggtgttcatattttggattcttggtgtacactaactctactaaatctgccggattttcggtacacgacatgtaagatgtaacttactcatggtgaattaatagtaaaatgtaatt

SEQ ID NO: 12786 - protein, 677 aa, Zea mays subsp. mays
  peptide (1)..(677): Ceres Seq. ID no. 12358118
MALPSMSLAAKGVLPFSARTSSGVTQRPVSVTASLEHKTSDARRKFLKLALGNLGVGLPTLLGAKKALADEQGVSSSRMSYSRFLEYLDKDRVKKVDLFENGTIAIVEAISPELGNRMQRVRVQLPGLSQELLQKLREKNIDFAAHSNQEDSGSLLFNLIGNLAFPLILIGGLFLLSRRAQGGLGGPNGPGFPLGFGQSRAKFQMEPNTGVTFDDVAGVDEAKQDFMEVVEFLKKPERFTAVGARIPKGVLLVGPPGTGKTLLAKAIAGEAGVPFFSISGSEFVEMFVGVGASRVRDLFKKAKENAPCIVFVDEIDAVGRQRGTGIGGGNDEREQTLNQLLTEMDGFEGNTGIIVIAATNRADILDSALLRPGRFDRQVSVDVPDVRGRTEILKVHGSNKKFDSDVSLDVIAMRTPGFSGADLANLLNEAAILAGRRGRTAISSKEIDDSIDRIVAGMEGTVMTDWKSKSLVAYHEVGHAICGTLTPGHDPVQKVTLVPRGQARGLTWFIPMDDPTLISRQQLFARIVGGLGGRAAEEVIFGEPEVTTGAAGDLQQITGLAKQMVVTFGMSEIGPWSLMEGGAQSGDVIMRMMARNSMSEKLAEDIDSAVKQLSDEAYEIALRHIRNNREAIDKIVEVLIEKETVTGDEFRAILSEFAEIPVENRVPPATPAAALPA

SEQ ID NO: 12787 - protein, 672 aa, Zea mays subsp. mays
  peptide (1)..(672): Ceres Seq. ID no. 12358119
MSLAAKGVLPFSARTSSGVTQRPVSVTASLEHKTSDARRKFLKLALGNLGVGLPTLLGAKKALADEQGVSSSRMSYSRFLEYLDKDRVKKVDLFENGTIAIVEAISPELGNRMQRVRVQLPGLSQELLQKLREKNIDFAAHSNQEDSGSLLFNLIGNLAFPLILIGGLFLLSRRAQGGLGGPNGPGFPLGFGQSRAKFQMEPNTGVTFDDVAGVDEAKQDFMEVVEFLKKPERFTAVGARIPKGVLLVGPPGTGKTLLAKAIAGEAGVPFFSISGSEFVEMFVGVGASRVRDLFKKAKENAPCIVFVDEIDAVGRQRGTGIGGGNDEREQTLNQLLTEMDGFEGNTGIIVIAATNRADILDSALLRPGRFDRQVSVDVPDVRGRTEILKVHGSNKKFDSDVSLDVIAMRTPGFSGADLANLLNEAAILAGRRGRTAISSKEIDDSIDRIVAGMEGTVMTDWKSKSLVAYHEVGHAICGTLTPGHDPVQKVTLVPRGQARGLTWFIPMDDPTLISRQQLFARIVGGLGGRAAEEVIFGEPEVTTGAAGDLQQITGLAKQMVVTFGMSEIGPWSLMEGGAQSGDVIMRMMARNSMSEKLAEDIDSAVKQLSDEAYEIALRHIRNNREAIDKIVEVLIEKETVTGDEFRAILSEFAEIPVENRVPPATPAAALPA

SEQ ID NO: 12788 - protein, 599 aa, Zea mays subsp. mays
  peptide (1)..(599): Ceres Seq. ID no. 12358120
MSYSRFLEYLDKDRVKKVDLFENGTIAIVEAISPELGNRMQRVRVQLPGLSQELLQKLREKNIDFAAHSNQEDSGSLLFNLIGNLAFPLILIGGLFLLSRRAQGGLGGPNGPGFPLGFGQSRAKFQMEPNTGVTFDDVAGVDEAKQDFMEVVEFLKKPERFTAVGARIPKGVLLVGPPGTGKTLLAKAIAGEAGVPFFSISGSEFVEMFVGVGASRVRDLFKKAKENAPCIVFVDEIDAVGRQRGTGIGGGNDEREQTLNQLLTEMDGFEGNTGIIVIAATNRADILDSALLRPGRFDRQVSVDVPDVRGRTEILKVHGSNKKFDSDVSLDVIAMRTPGFSGADLANLLNEAAILAGRRGRTAISSKEIDDSIDRIVAGMEGTVMTDWKSKSLVAYHEVGHAICGTLTPGHDPVQKVTLVPRGQARGLTWFIPMDDPTLISRQQLFARIVGGLGGRAAEEVIFGEPEVTTGAAGDLQQITGLAKQMVVTFGMSEIGPWSLMEGGAQSGDVIMRMMARNSMSEKLAEDIDSAVKQLSDEAYEIALRHIRNNREAIDKIVEVLIEKETVTGDEFRAILSEFAEIPVENRVPPATPAAALPA

SEQ ID NO: 12789 - DNA, 1984 bp, Zea mays subsp. mays
  misc_feature (1)..(1984): Ceres Seq. ID no. 12365052
  misc_feature (1)..(1984): Ortholog of  Ceres SEQ ID NO 14310841 as cited in SEQ ID NO 53666
  misc_feature (1)..(1984): Ortholog of  Ceres SEQ ID NO 15178736 as cited in SEQ ID NO 56439
  misc_feature (1)..(1984): Ortholog of  Ceres SEQ ID NO 14308493 as cited in SEQ ID NO 60320
atccacaccccggtcggctagtcccaaggctgctgccgccgcctgctgctaggggatcgcttgctttcctcggaccactctgccgaccacatctacaccgcatcaacggtccttccaagtgagctccaatcccctgtctgtagatggagagggtgctcaaggatgacgccgtcgaggagaagggcgagcgcgccaggatggcatcgtttgttggggccatggcaatctcggatttggtgaagaccacattgggcccaaaaggaatggacaagatcctgcaatcaactggcagaggacgtaatgttactgttacaaatgatggggctaccattttgaagtcacttcacattgacaatcctgctgcaaaggtccttgttgacatctcaaaagttcaagatgatgaagttggtgatgggacaacttctgttgttgttctagctggagaacttttgaaggaggctgagaagttaattaacatgaaaattcatccaatgactattattgcaggttacagaatggctctcgagtgtgccagagattctttgctaaaaaagaccatggacaacaaagaaaatacagataaattcagatctgatctcatgaatattgctatgactactcttagttcaaaaatactttcccaagacaaggagtacttcgctgaacttgcggttgatgctgtcttgaggcttaagggtagcaccaacttggaatctattcaaattctgaagaaacctggaggatctcttaaggattcctttttggacgaagggttcattcttgacaagaaaattggcattgggcagcccaaacgcattgagaatgccaaaattttggttgcaaacactgctatggacacagataaagttaagatatatggagcacgggtccgggtggattcaatgtctaaggttgcagatattgaagctgctgagaagcagaaaatgagagagaaagtccaaaagatcatagcacacgggatcaactgttttgtcaacaggcagttaatctataacttccctgaggaactctttgctgacgctggcatacttgcaattgagcatgctgactttgagggcattgaacggctggctcttgttactggtggtgagatcgcatcaacttttgataatccagagtctgttaagcttggtcactgcaaggtcattgaagagattatgattggggaggacaggctaatccatttctctggggttgcgatggggcaggcttgcaccattgtcctaaggggggctagtgagcatgtgctcgatgaggctgagaggtccttgcatgatgccttgtgcgtgttgtcccagacggtaaatgatacccgtgtcttgtttggaggcggatggcctgagatggtgatggccaaagaagtggatgaacttgcaaggaagacccctgggaagaaatcccatgctatcgatgctttctcacatgctctgcaagccatcccaacaatcatagctgacaatgctggtttggatagcgctgatttgatctctcagctacgagctgagcaccacaaagagaactccactgctggaattgatgtcatcacaggcactgttggggacatgcaaaagctagggattcaagagtcgttcaaggtgaagcaggccattcttctgtctgcaacagaggctgcggagatgatcctcagggtcgatgagatcataacctgtgccccgcgcagaagagaggataggatgtgatattacacgctgtttctcgatgtagcgggatgctcattaccctagttttgaggggtattatggtttaggggcgctcaagttggtcagatttcgagtgtttttggcccctaagcaactggtacttgttatttggttgaaacaatcagccttaggtttgtgttctacattctcatgctgtaccgtttggtagcgagttacgtcgtacgatatgcttgttccatattgtttttctattccttttaacgtaagaatgggcttgtctt

SEQ ID NO: 12790 - protein, 525 aa, Zea mays subsp. mays
  peptide (1)..(525): Ceres Seq. ID no. 12365053
MERVLKDDAVEEKGERARMASFVGAMAISDLVKTTLGPKGMDKILQSTGRGRNVTVTNDGATILKSLHIDNPAAKVLVDISKVQDDEVGDGTTSVVVLAGELLKEAEKLINMKIHPMTIIAGYRMALECARDSLLKKTMDNKENTDKFRSDLMNIAMTTLSSKILSQDKEYFAELAVDAVLRLKGSTNLESIQILKKPGGSLKDSFLDEGFILDKKIGIGQPKRIENAKILVANTAMDTDKVKIYGARVRVDSMSKVADIEAAEKQKMREKVQKIIAHGINCFVNRQLIYNFPEELFADAGILAIEHADFEGIERLALVTGGEIASTFDNPESVKLGHCKVIEEIMIGEDRLIHFSGVAMGQACTIVLRGASEHVLDEAERSLHDALCVLSQTVNDTRVLFGGGWPEMVMAKEVDELARKTPGKKSHAIDAFSHALQAIPTIIADNAGLDSADLISQLRAEHHKENSTAGIDVITGTVGDMQKLGIQESFKVKQAILLSATEAAEMILRVDEIITCAPRRREDRM

SEQ ID NO: 12791 - protein, 507 aa, Zea mays subsp. mays
  peptide (1)..(507): Ceres Seq. ID no. 12365054
MASFVGAMAISDLVKTTLGPKGMDKILQSTGRGRNVTVTNDGATILKSLHIDNPAAKVLVDISKVQDDEVGDGTTSVVVLAGELLKEAEKLINMKIHPMTIIAGYRMALECARDSLLKKTMDNKENTDKFRSDLMNIAMTTLSSKILSQDKEYFAELAVDAVLRLKGSTNLESIQILKKPGGSLKDSFLDEGFILDKKIGIGQPKRIENAKILVANTAMDTDKVKIYGARVRVDSMSKVADIEAAEKQKMREKVQKIIAHGINCFVNRQLIYNFPEELFADAGILAIEHADFEGIERLALVTGGEIASTFDNPESVKLGHCKVIEEIMIGEDRLIHFSGVAMGQACTIVLRGASEHVLDEAERSLHDALCVLSQTVNDTRVLFGGGWPEMVMAKEVDELARKTPGKKSHAIDAFSHALQAIPTIIADNAGLDSADLISQLRAEHHKENSTAGIDVITGTVGDMQKLGIQESFKVKQAILLSATEAAEMILRVDEIITCAPRRREDRM

SEQ ID NO: 12792 - protein, 500 aa, Zea mays subsp. mays
  peptide (1)..(500): Ceres Seq. ID no. 12365055
MAISDLVKTTLGPKGMDKILQSTGRGRNVTVTNDGATILKSLHIDNPAAKVLVDISKVQDDEVGDGTTSVVVLAGELLKEAEKLINMKIHPMTIIAGYRMALECARDSLLKKTMDNKENTDKFRSDLMNIAMTTLSSKILSQDKEYFAELAVDAVLRLKGSTNLESIQILKKPGGSLKDSFLDEGFILDKKIGIGQPKRIENAKILVANTAMDTDKVKIYGARVRVDSMSKVADIEAAEKQKMREKVQKIIAHGINCFVNRQLIYNFPEELFADAGILAIEHADFEGIERLALVTGGEIASTFDNPESVKLGHCKVIEEIMIGEDRLIHFSGVAMGQACTIVLRGASEHVLDEAERSLHDALCVLSQTVNDTRVLFGGGWPEMVMAKEVDELARKTPGKKSHAIDAFSHALQAIPTIIADNAGLDSADLISQLRAEHHKENSTAGIDVITGTVGDMQKLGIQESFKVKQAILLSATEAAEMILRVDEIITCAPRRREDRM

SEQ ID NO: 12793 - DNA, 2671 bp, Zea mays subsp. mays
  misc_feature (1)..(2671): Ceres Seq. ID no. 12414664
  misc_feature (1)..(2671): Ortholog of  Ceres SEQ ID NO 15172609 as cited in SEQ ID NO 61938
  misc_feature (1)..(2671): Ortholog of  Ceres SEQ ID NO 13595870 as cited in SEQ ID NO 62101
  misc_feature (1)..(2671): Ortholog of  Ceres SEQ ID NO 13590241 as cited in SEQ ID NO 63878
  misc_feature (1)..(2671): Ortholog of  Ceres SEQ ID NO 13657939 as cited in SEQ ID NO 66349
  misc_feature (1)..(2671): Ortholog of  Ceres SEQ ID NO 13660597 as cited in SEQ ID NO 67655
  misc_feature (1)..(2671): Ortholog of  Ceres SEQ ID NO 13654484 as cited in SEQ ID NO 67717
gcatctcgcattctcgccggtgctgctgcaattcacgccacccccggccaaccgcctgaaaactacctctgccgccggcgccgccatccccaacatggcgagccaaggggagccctcggcctctgcttccgatccgaaggagaagaaggactactcgacggcgatactagagaggaaaaagtcaccgaaccgccttgtcgtcgacgaggccaccaacgacgataactccgtcgtcgcactgcaccctgacaccatggagaggctgcagctcttccgcggcgatactgtgctcctcaagggtaagaagaggaaagacactatttgcattgtccttgcggatgagacctgtgaggagccaaaggttcggatgaacaaggttgtccgccagaacctgagggtgaggcttggtgatgtggtttctgtccaccagtgccaggatgtgaaatatgggaagcgtgtgcacattcttccaattgatgatacagttgaaggcattacagggaacctgtttgatgccttcttgaaaccatacttcctagaagcatacaggcccgtgaggaaaggagaccttttccttgtcaggggtggaatgagaagcgtggaattcaaagtgatagagactgacccttctgaatattgtatcgttgccccagatactgaaatattttgtgatggggagcctattaagagagaggatgaggagcgtcttgatgaagttggttatgatgatgttggtggagttagaaagcaaatggcccaaatcagagagcttgttgagcttccactacgccatcctcagcttttcaaatctattggtgtgaagccaccaaagggcatattgctgtatgggccacctggttctggaaagactcttattgctcgtgctgttgcaaatgagactggagcctttttctttctgatcaatggcccagagattatgtcgaagttagcaggagagagtgagagcaatctcagaaaggcatttgaagaagcagagaagaatgctccatctatcattttcattgatgaaattgattccattgcacccaagagagaaaagaccaatggagaagtagaacgtcgtattgtttcacagctactgactcttatggatggactcaaatctcgttcccatgttattgttatgggtgctacaaaccggccaaacagcattgatcctgctcttagaagatttggaaggtttgaccgggaaattgacattggagttcctgatgaagttggccggcttgaggttctccgtattcacactaagaacatgaagctagctgaagatgttaatttggaactcatttcaaaggatacccatggatacgttggtgctgatcttgctgccctttgcactgaggctgctcttcagtgcattcgtgagaagatggacatcatagatcttgaggatgagacaatagatgcagagatattgaactcgatggctgttacaaatgaccatttcaagactgcgcttggaacaagcaacccatctgctctccgtgaaactgttgttgaagtcccaaatgtcttgggaggatattggtgggctggagaatgtcaagagagagctccaggagactgttcaatatcctgtggagcatccagagaagttcgagaagtttggcatgtctccatccaaaggagttctgttttatggtcctcctggttgtggtaaaaccttgttggcaaaggcaattgccaatgagtgccaagctaacttcatcagtgtcaagggtcctgaattgcttaccatgtggtttggtgagagtgaagccaacgtccgcgaaatttttgataaggctcgccaatctgctccttgtgtcctcttctttgatgagcttgactcaattgcaactcagagaggaagtagtgtgggtgatgctgggggcgcggctgatagagtgcttaatcagctactgaccgagatggatggcatgaacgccaagaaaactgtgttcattattggtgctacaaacaggcctgacatcattgatcctgctcttctgaggccagggcgtcttaaccagctgatctacattccactgcctgatgagcagtctaggctccagatcttcaaggcctgcctaaggaagtcccctgtggcaaaggatgtggacctgaatgctcttgctaagtacacacaagggttcagtggagcagatatcacagaaatttgccagcgtgcgtgcaaatatgcaatcagagagaacattgagaaggacattgagagggaaaggcggatgaaggacaaccctgaggcgatggaggaagatgaagtggacgagattgccgagatcaaggcagctcatttcgaggagtctatgaagtattctcggcgcagtgtcagtgatgctgatatccgcaagtaccaggcgttcgcccagacgttgcagcagtcccgtgggttcggcagtgagttccgcttctcagagcaatcggcgacagctagtgctgctgcagccgatccgtttgcttctgccggtgccgcggctgacgatgacgatctatacagctaggtgtccttttgggttggttctgggttgtgcaatatcagtctcatcagtcatctgtttaaaactctgagtatacttagacacgggatgtcatgcaatgatatttgttttccgtacatttggacgttgagataatgcctgtttatttt

SEQ ID NO: 12794 - protein, 560 aa, Zea mays subsp. mays
  peptide (1)..(560): Ceres Seq. ID no. 12414665
HLAFSPVLLQFTPPPANRLKTTSAAGAAIPNMASQGEPSASASDPKEKKDYSTAILERKKSPNRLVVDEATNDDNSVVALHPDTMERLQLFRGDTVLLKGKKRKDTICIVLADETCEEPKVRMNKVVRQNLRVRLGDVVSVHQCQDVKYGKRVHILPIDDTVEGITGNLFDAFLKPYFLEAYRPVRKGDLFLVRGGMRSVEFKVIETDPSEYCIVAPDTEIFCDGEPIKREDEERLDEVGYDDVGGVRKQMAQIRELVELPLRHPQLFKSIGVKPPKGILLYGPPGSGKTLIARAVANETGAFFFLINGPEIMSKLAGESESNLRKAFEEAEKNAPSIIFIDEIDSIAPKREKTNGEVERRIVSQLLTLMDGLKSRSHVIVMGATNRPNSIDPALRRFGRFDREIDIGVPDEVGRLEVLRIHTKNMKLAEDVNLELISKDTHGYVGADLAALCTEAALQCIREKMDIIDLEDETIDAEILNSMAVTNDHFKTALGTSNPSALRETVVEVPNVLGGYWWAGECQERAPGDCSISCGASREVREVWHVSIQRSSVLWSSWLW

SEQ ID NO: 12795 - protein, 529 aa, Zea mays subsp. mays
  peptide (1)..(529): Ceres Seq. ID no. 12414666
MASQGEPSASASDPKEKKDYSTAILERKKSPNRLVVDEATNDDNSVVALHPDTMERLQLFRGDTVLLKGKKRKDTICIVLADETCEEPKVRMNKVVRQNLRVRLGDVVSVHQCQDVKYGKRVHILPIDDTVEGITGNLFDAFLKPYFLEAYRPVRKGDLFLVRGGMRSVEFKVIETDPSEYCIVAPDTEIFCDGEPIKREDEERLDEVGYDDVGGVRKQMAQIRELVELPLRHPQLFKSIGVKPPKGILLYGPPGSGKTLIARAVANETGAFFFLINGPEIMSKLAGESESNLRKAFEEAEKNAPSIIFIDEIDSIAPKREKTNGEVERRIVSQLLTLMDGLKSRSHVIVMGATNRPNSIDPALRRFGRFDREIDIGVPDEVGRLEVLRIHTKNMKLAEDVNLELISKDTHGYVGADLAALCTEAALQCIREKMDIIDLEDETIDAEILNSMAVTNDHFKTALGTSNPSALRETVVEVPNVLGGYWWAGECQERAPGDCSISCGASREVREVWHVSIQRSSVLWSSWLW

SEQ ID NO: 12796 - protein, 476 aa, Zea mays subsp. mays
  peptide (1)..(476): Ceres Seq. ID no. 12414667
MERLQLFRGDTVLLKGKKRKDTICIVLADETCEEPKVRMNKVVRQNLRVRLGDVVSVHQCQDVKYGKRVHILPIDDTVEGITGNLFDAFLKPYFLEAYRPVRKGDLFLVRGGMRSVEFKVIETDPSEYCIVAPDTEIFCDGEPIKREDEERLDEVGYDDVGGVRKQMAQIRELVELPLRHPQLFKSIGVKPPKGILLYGPPGSGKTLIARAVANETGAFFFLINGPEIMSKLAGESESNLRKAFEEAEKNAPSIIFIDEIDSIAPKREKTNGEVERRIVSQLLTLMDGLKSRSHVIVMGATNRPNSIDPALRRFGRFDREIDIGVPDEVGRLEVLRIHTKNMKLAEDVNLELISKDTHGYVGADLAALCTEAALQCIREKMDIIDLEDETIDAEILNSMAVTNDHFKTALGTSNPSALRETVVEVPNVLGGYWWAGECQERAPGDCSISCGASREVREVWHVSIQRSSVLWSSWLW

SEQ ID NO: 12797 - DNA, 1112 bp, Zea mays subsp. mays
  misc_feature (1)..(1112): Ceres Seq. ID no. 13493435
  misc_feature (1)..(1112): Ortholog of  Ceres SEQ ID NO 15171402 as cited in SEQ ID NO 51174
gtcttctcgcgatggggagcaccggcgacacgacgatggccgaggcggaggcgccggcgccggtgggtgactacgagctgctggagcgcctgggggggcgtcccccgtacacgtccgtgtggcgagcggtctcccggtccaccggcacgcccgtggctgtgaagcaggtgcggctcaccggcctccccgcgcgcctccgcgacagcctcgactgcgaggtccgcttcctcgccgccgtcagccaccccaacatcatccgcctcatcgacgtcgtccagacccagagctgcctttacctcgtcctggagctctgcgagggcggggacctggcggccttcatccggcgcaatgggagcgtagacgagcgcgtggccagaaattttatgaaacagatcggagctggcttacaagtgctgcaccggcaccatgtcgtccaccgggacttgaaacctcagaatatcctgctctcttctccgagaagcagcgatgcgatcctcaagatatctgattttggtcttgcaaggtttcttggacccggggagtacgcagacacatcttgtggttcttgtttgtacatggccccagaagttgctgtttcaaaagtacaatgacaaggtagacatgtggagcatcggcgcgatcctatttgagctcttgaatggctacccgccattctatggcagaagcaacgtgcagctgcttcagtacatcaacagaagcacgtctctcccgttctcggaaccactggcgtctaccttaggccccgattgtgtcgatatatgcaccaggctactatgcactaatccagtgaagcgtctgtccttccaagagttcttggaccaccgcttcttcagagtatgagtgcccaagccatggggaccaccgggcagcgacatgatctgaagaacatcaagaagtttcttgtccttggagtgctgactgactctgttataaagcgttcagaaattgatgcccagtgctcgtcgtcttggttttctgttcgcgtccatttccttctccaaagagccatgtggccaacgtttcaatctgttgtgatctggtctgtactgtttcaatctgctaacagtaggagttttaaagatatttagtcc

SEQ ID NO: 12798 - protein, 202 aa, Zea mays subsp. mays
  peptide (1)..(202): Ceres Seq. ID no. 13493436
LLAMGSTGDTTMAEAEAPAPVGDYELLERLGGRPPYTSVWRAVSRSTGTPVAVKQVRLTGLPARLRDSLDCEVRFLAAVSHPNIIRLIDVVQTQSCLYLVLELCEGGDLAAFIRRNGSVDERVARNFMKQIGAGLQVLHRHHVVHRDLKPQNILLSSPRSSDAILKISDFGLARFLGPGEYADTSCGSCLYMAPEVAVSKVQ

SEQ ID NO: 12799 - protein, 199 aa, Zea mays subsp. mays
  peptide (1)..(199): Ceres Seq. ID no. 13493437
MGSTGDTTMAEAEAPAPVGDYELLERLGGRPPYTSVWRAVSRSTGTPVAVKQVRLTGLPARLRDSLDCEVRFLAAVSHPNIIRLIDVVQTQSCLYLVLELCEGGDLAAFIRRNGSVDERVARNFMKQIGAGLQVLHRHHVVHRDLKPQNILLSSPRSSDAILKISDFGLARFLGPGEYADTSCGSCLYMAPEVAVSKVQ

SEQ ID NO: 12800 - protein, 191 aa, Zea mays subsp. mays
  peptide (1)..(191): Ceres Seq. ID no. 13493438
MAEAEAPAPVGDYELLERLGGRPPYTSVWRAVSRSTGTPVAVKQVRLTGLPARLRDSLDCEVRFLAAVSHPNIIRLIDVVQTQSCLYLVLELCEGGDLAAFIRRNGSVDERVARNFMKQIGAGLQVLHRHHVVHRDLKPQNILLSSPRSSDAILKISDFGLARFLGPGEYADTSCGSCLYMAPEVAVSKVQ

SEQ ID NO: 12801 - DNA, 1229 bp, Zea mays subsp. mays
  misc_feature (1)..(1229): Ceres Seq. ID no. 12414660
  misc_feature (1)..(1229): Ortholog of  Ceres SEQ ID NO 15176145 as cited in SEQ ID NO 0
aaattccacccctcgccgccatctccgtctctctctctcccgcaaccaagcagttcaactcacacccgaagcggcgccgctagggtttgctccgacagccgcgaaacctagtccttactgcgccctcccacagaggccgtcattcactaatctagctgctacgcttcgcttcccactccgattgggagctagggtttagcttatctctgagctcagcttcgggtcgcggcacgcggcatggcggggtacggggaagagaaccagaacgccatgaacgggtacgaggaggaagaggaggaagaagaggttgaagaagtcgaggaggtgtacgaagaggaggaggagggggacggggagggggaaggagacgagggggcagccgccgaggcagcagcgatggcggccgagacgagaagtgtcgatggaggccggggcctagcggaggccgttgggaatgttgatgccggaggcgaggatgagagggatgcagattctagcggcggtgacgcttcggggaaggttttcgtagggggtgtagcctgggagacaactgaagaaacattcacaaagcattttcagaagtatggagctataactgattctgtgatcatgaaggacaagcatactaggatgcctcgtggatttggatttgttacattttccgatccgtctgtgcttgacagggttctagaggatgaacatgtcatagatggaaggacggttgaagtcaaaaggactgttccaaaagagctgtcgtcaaaagatggccctaagacaaaaaagatctttgtgggtggtatcccaccatctcttaccgaagataaattaaaggagcacttctcatcgtacgggaaggtggttgagcatcagattatgcttgatcatagcactggacgttcacggggctttggatttgtcacatttgaaagcgaggatgctgttgaaagggttatgtcagaggggagaatgcatgatcttggagggaagcaggtcacttctttatctctcattgtgttctgtgttggtaaatatcattggcatgtaagcagttctgcagttgtcaggttcaattagcaaatggtctaacctggcatgttgtctataattttgttgttgttaacttagttttggttagtaatcatgaagatgcgattctgtctgtacaatataactgatgtgtctgggagtttttgaacattgatcattgtttgtttagtactttctcttcc

SEQ ID NO: 12802 - protein, 278 aa, Zea mays subsp. mays
  peptide (1)..(278): Ceres Seq. ID no. 12414661
MAGYGEENQNAMNGYEEEEEEEEVEEVEEVYEEEEEGDGEGEGDEGAAAEAAAMAAETRSVDGGRGLAEAVGNVDAGGEDERDADSSGGDASGKVFVGGVAWETTEETFTKHFQKYGAITDSVIMKDKHTRMPRGFGFVTFSDPSVLDRVLEDEHVIDGRTVEVKRTVPKELSSKDGPKTKKIFVGGIPPSLTEDKLKEHFSSYGKVVEHQIMLDHSTGRSRGFGFVTFESEDAVERVMSEGRMHDLGGKQVTSLSLIVFCVGKYHWHVSSSAVVRFN

SEQ ID NO: 12803 - protein, 267 aa, Zea mays subsp. mays
  peptide (1)..(267): Ceres Seq. ID no. 12414662
MNGYEEEEEEEEVEEVEEVYEEEEEGDGEGEGDEGAAAEAAAMAAETRSVDGGRGLAEAVGNVDAGGEDERDADSSGGDASGKVFVGGVAWETTEETFTKHFQKYGAITDSVIMKDKHTRMPRGFGFVTFSDPSVLDRVLEDEHVIDGRTVEVKRTVPKELSSKDGPKTKKIFVGGIPPSLTEDKLKEHFSSYGKVVEHQIMLDHSTGRSRGFGFVTFESEDAVERVMSEGRMHDLGGKQVTSLSLIVFCVGKYHWHVSSSAVVRFN

SEQ ID NO: 12804 - protein, 225 aa, Zea mays subsp. mays
  peptide (1)..(225): Ceres Seq. ID no. 12414663
MAAETRSVDGGRGLAEAVGNVDAGGEDERDADSSGGDASGKVFVGGVAWETTEETFTKHFQKYGAITDSVIMKDKHTRMPRGFGFVTFSDPSVLDRVLEDEHVIDGRTVEVKRTVPKELSSKDGPKTKKIFVGGIPPSLTEDKLKEHFSSYGKVVEHQIMLDHSTGRSRGFGFVTFESEDAVERVMSEGRMHDLGGKQVTSLSLIVFCVGKYHWHVSSSAVVRFN

SEQ ID NO: 12805 - DNA, 2019 bp, Zea mays subsp. mays
  misc_feature (1)..(2019): Ceres Seq. ID no. 12359674
  misc_feature (1)..(2019): Ortholog of  Ceres SEQ ID NO 13597407 as cited in SEQ ID NO 64106
acccgcgatctccgcgaccgcaagcagctcggcaggcaggcctccaccgctccaccacctccactcggtctacgtgctccgtcaccaaacccacccgggccaacgccgaagcaaccccccctccgtccccagatccggcgccgcctccgccctcacttacactagcacgcacggcggacacgtcgcctcccccgcgcgatctgatgcaggcgcacgcggtggccagcggcgatgcggtggaagcttaactcctccgtctacaagcgcgtgccgtccagggaaaccgccatggaacccgacgtcgagacgccaatgagaatgacggacggcggcggcagcggcgcggggccgtcgtggcgcatgtcgttgccgcatgtctgtgtcgccacgctcacctcgttcctctttggataccactccggggtggtgaacgagcccttggaggtcatctccgctgaccttggcttcgccggcaacactcttgctgaagggctcgtggtgagtatctgtttgggaggagcttttgttgggtgcctcttcagcggctccatcgcagatggtattgggcgacgccgtgcgttccagctcagtgcgctgcctatgattattggtgctgccataagtgctctctccaatagtttggagggtatgctccttggaagatttttggtaggaacagggatgggattgggtccaccagtagcttcactttatataacggaggtttctccttctacagtgaggggtacatatggtagctttgttcagattgcaacctgccttggaattatagtatcactactcattggtacacctgtcaaagatattgatagatggtggagagtgtgtttctgggttgccgttatcccagcaactttacaagctctcggtatggagttttgtgctgagagccctcagtggctttataagtgtggaaaaataagtgaagcagagatgcaatttgaaaagcttttaggtccccttcatgtaaaatctgccatggcagaactttctagatatgaaagagtagatgatggagaaagtgtcaagtactcagagttgttctatggtcgccacttcaatgttgtttttattggcacaacgctctttgctttacaacagttatccggcataaattctgtgttctatttctcatcaactgtattcagaagtgtgggggtgccctctaaccttgccaacatatgcatggggatttctaatctatcaggatcaattgtagcaatgcttctaatggacaagctaggtagaaaagtgcttctttcagggagttttcttgggatggcttttgcaatggggcttcaggctgttggagcaaaccgtcagtatcttggttctgcatgtgtatatctttcagttggtggcattctgttgtttgtcttgtcattttcactaggagcaggccctgtcccaggacttcttttgcctgagattttccctaataaaatccgagctaaggctatggctctctgcatgtctgtacattggatcgtgaacttctttgttagtttgatgttcttgcgtcttctggagcaacttggtccacagcttctctacacaatattttcgtcagtctgtgtggtagcctcaatatttgtgaggcgccatgtgttggagacgaagggaaagactttacaagagatagaggtttcactcctgcaaccacaataaaggtacatatttgacgtggctggaaccttgggcaggctgtttgctgaacagaaacaagctggccctgcagaagttgattcctgaagtcatcggcaacgccctacaaatggtctcagggaagttccagatatgcgcctgcgacagctagggcggtgtttccatagagcatcatgtactgaagttatgcctgtatcgcccgccctagataggatattttcatacttgtgttgtcatctgttctatctatgagtcgtaatatcagaaaaaaaaggtactactgttttaccgttgatgagcacagttgaaaaaaggaactatcatcttcatttt

SEQ ID NO: 12806 - protein, 485 aa, Zea mays subsp. mays
  peptide (1)..(485): Ceres Seq. ID no. 12359675
MRWKLNSSVYKRVPSRETAMEPDVETPMRMTDGGGSGAGPSWRMSLPHVCVATLTSFLFGYHSGVVNEPLEVISADLGFAGNTLAEGLVVSICLGGAFVGCLFSGSIADGIGRRRAFQLSALPMIIGAAISALSNSLEGMLLGRFLVGTGMGLGPPVASLYITEVSPSTVRGTYGSFVQIATCLGIIVSLLIGTPVKDIDRWWRVCFWVAVIPATLQALGMEFCAESPQWLYKCGKISEAEMQFEKLLGPLHVKSAMAELSRYERVDDGESVKYSELFYGRHFNVVFIGTTLFALQQLSGINSVFYFSSTVFRSVGVPSNLANICMGISNLSGSIVAMLLMDKLGRKVLLSGSFLGMAFAMGLQAVGANRQYLGSACVYLSVGGILLFVLSFSLGAGPVPGLLLPEIFPNKIRAKAMALCMSVHWIVNFFVSLMFLRLLEQLGPQLLYTIFSSVCVVASIFVRRHVLETKGKTLQEIEVSLLQPQ

SEQ ID NO: 12807 - protein, 466 aa, Zea mays subsp. mays
  peptide (1)..(466): Ceres Seq. ID no. 12359676
MEPDVETPMRMTDGGGSGAGPSWRMSLPHVCVATLTSFLFGYHSGVVNEPLEVISADLGFAGNTLAEGLVVSICLGGAFVGCLFSGSIADGIGRRRAFQLSALPMIIGAAISALSNSLEGMLLGRFLVGTGMGLGPPVASLYITEVSPSTVRGTYGSFVQIATCLGIIVSLLIGTPVKDIDRWWRVCFWVAVIPATLQALGMEFCAESPQWLYKCGKISEAEMQFEKLLGPLHVKSAMAELSRYERVDDGESVKYSELFYGRHFNVVFIGTTLFALQQLSGINSVFYFSSTVFRSVGVPSNLANICMGISNLSGSIVAMLLMDKLGRKVLLSGSFLGMAFAMGLQAVGANRQYLGSACVYLSVGGILLFVLSFSLGAGPVPGLLLPEIFPNKIRAKAMALCMSVHWIVNFFVSLMFLRLLEQLGPQLLYTIFSSVCVVASIFVRRHVLETKGKTLQEIEVSLLQPQ

SEQ ID NO: 12808 - protein, 458 aa, Zea mays subsp. mays
  peptide (1)..(458): Ceres Seq. ID no. 12359677
MRMTDGGGSGAGPSWRMSLPHVCVATLTSFLFGYHSGVVNEPLEVISADLGFAGNTLAEGLVVSICLGGAFVGCLFSGSIADGIGRRRAFQLSALPMIIGAAISALSNSLEGMLLGRFLVGTGMGLGPPVASLYITEVSPSTVRGTYGSFVQIATCLGIIVSLLIGTPVKDIDRWWRVCFWVAVIPATLQALGMEFCAESPQWLYKCGKISEAEMQFEKLLGPLHVKSAMAELSRYERVDDGESVKYSELFYGRHFNVVFIGTTLFALQQLSGINSVFYFSSTVFRSVGVPSNLANICMGISNLSGSIVAMLLMDKLGRKVLLSGSFLGMAFAMGLQAVGANRQYLGSACVYLSVGGILLFVLSFSLGAGPVPGLLLPEIFPNKIRAKAMALCMSVHWIVNFFVSLMFLRLLEQLGPQLLYTIFSSVCVVASIFVRRHVLETKGKTLQEIEVSLLQPQ

SEQ ID NO: 12809 - DNA, 921 bp, Zea mays subsp. mays
  misc_feature (1)..(921): Ceres Seq. ID no. 12414856
  misc_feature (1)..(921): Ortholog of  Ceres SEQ ID NO 15170395 as cited in SEQ ID NO 58055
atttttagacgacacccctacccgacccgatcggcgggagagcacgagacgccagcgccatccatcgcggcaaaagccgagacgacccaggaatctcggcaccgtcgcccccctttctctctcgctcaaaagttgctgctggagccctctcccctctctccgaccaccaaccatggatgaggcgcaagttgtggagtcaaaggatggaaccatctcggttgcttctgcatttgctggttatcaggaagctgtgcaagacagggatcacaaattcttgacaaaagcagtggaagaagcatatcgaggagtcgattgcggtgacggaggtccattcggagcagttgtcgtctgtaatgacgaagtagtagtcagctgccataacatggttctgaagcacactgaccctactgcgcatgctgaagtaactgcaattagagaggcttgcaaaaagcttgggaaaattgagctctcagactgcgaaatttacgcgtcctgcgagccatgcccaatgtgctttagtgcagttcatctctcccgaatcaagaggctggtttatggggccaaggcagaggctgccatcgccattggatttgatgacttcattgcagatgctctgagaggcactgggttctaccagaaggccaacttggagatcaagaaagctgacggcaatggtgcattgatcgctgagcaagtctttgaaaagactaaagagaagttccagatgtactgatgctgagcagaagagagatctcagatttgtacaatgcttactcataaggacaagaaataatacagtgcccaaatgtccattgtttcgggaaaaaaatctcaattccactgttcaacattttgatgatgcctgaatttcttgttaacagacacaagattgttatttgctgtaaaatgtgcagttgatgg

SEQ ID NO: 12810 - protein, 243 aa, Zea mays subsp. mays
  peptide (1)..(243): Ceres Seq. ID no. 12414857
FLDDTPTRPDRRESTRRQRHPSRQKPRRPRNLGTVAPLSLSLKSCCWSPLPSLRPPTMDEAQVVESKDGTISVASAFAGYQEAVQDRDHKFLTKAVEEAYRGVDCGDGGPFGAVVVCNDEVVVSCHNMVLKHTDPTAHAEVTAIREACKKLGKIELSDCEIYASCEPCPMCFSAVHLSRIKRLVYGAKAEAAIAIGFDDFIADALRGTGFYQKANLEIKKADGNGALIAEQVFEKTKEKFQMY

SEQ ID NO: 12811 - protein, 186 aa, Zea mays subsp. mays
  peptide (1)..(186): Ceres Seq. ID no. 12414858
MDEAQVVESKDGTISVASAFAGYQEAVQDRDHKFLTKAVEEAYRGVDCGDGGPFGAVVVCNDEVVVSCHNMVLKHTDPTAHAEVTAIREACKKLGKIELSDCEIYASCEPCPMCFSAVHLSRIKRLVYGAKAEAAIAIGFDDFIADALRGTGFYQKANLEIKKADGNGALIAEQVFEKTKEKFQMY

SEQ ID NO: 12812 - DNA, 939 bp, Zea mays subsp. mays
  misc_feature (1)..(939): Ceres Seq. ID no. 12346943
  misc_feature (1)..(939): Ortholog of  Ceres SEQ ID NO 13594090 as cited in SEQ ID NO 51093
aaaaacaagaagccgtacctgtacggtcttctctatagagggagcaattggagagagagagaaagaacagcgaaaaatggtcgatgccggcgacataacggccggagggccgccgcgcgctcacgaggaggagcaagcgggaactccggcatacggttcggtggtcctcggcggcacttttgaccgcctccacgacggccaccgccgccttctcaaggcctccgcggatttggggagagaccggatcgtggtgggcgtctgcacgggacctatgctcgccaagaaggagtatgcggagcttattgagcccgttgacaagcgcatcaagggtgtggaggattacatcaagtctataaagccagaactgatagtacaagtggagcctattgaggacccttatggcccatccataactgatgagaagttggatgccattattgtcagtaaggagacattaaatggtggactggctgtaaataggaaaagagaagagaaagggttcccactgttgaaggttgaggttgttgatctcctttccggcggtgtggagggggaaaaattgagttcttctgctttaaggaaacttgaggcagaacaagctcaacaaagtgaaacaaaatctggtagccttgaagcttcttagggaggaaattgaatactttgatctggttagctgaatgcacaaatacgggggtgatctgctccaagctcagtgtgaacaaaaaatatgatcagagctgacagtttggttacctttctagaggaataatcttcgaacactggcccatggccctgtaacagtattgctctaaccttctaaaatcaacctggcaacatagactctcccctactaaccaaatttacaaattttgtattggcaatgccatctgaatgttaaaaggaaatcttcttgggtttgtataaatatctacaattgtg

SEQ ID NO: 12813 - protein, 213 aa, Zea mays subsp. mays
  peptide (1)..(213): Ceres Seq. ID no. 12346944
KTRSRTCTVFSIEGAIGEREKEQRKMVDAGDITAGGPPRAHEEEQAGTPAYGSVVLGGTFDRLHDGHRRLLKASADLGRDRIVVGVCTGPMLAKKEYAELIEPVDKRIKGVEDYIKSIKPELIVQVEPIEDPYGPSITDEKLDAIIVSKETLNGGLAVNRKREEKGFPLLKVEVVDLLSGGVEGEKLSSSALRKLEAEQAQQSETKSGSLEAS

SEQ ID NO: 12814 - protein, 188 aa, Zea mays subsp. mays; identical to SEQ ID NO: 8009
  peptide (1)..(188): Ceres Seq. ID no. 12346945

SEQ ID NO: 12815 - protein, 123 aa, Zea mays subsp. mays; identical to SEQ ID NO: 8010
  peptide (1)..(123): Ceres Seq. ID no. 12346946

SEQ ID NO: 12816 - DNA, 896 bp, Zea mays subsp. mays
  misc_feature (1)..(896): Ceres Seq. ID no. 13494469
  misc_feature (1)..(896): Ortholog of  Ceres SEQ ID NO 12610412 as cited in SEQ ID NO 55977
accacatctccagtcctccactgacaagccgccgccgctcttccacccccaccacccacccacctctccccggcctcgcacccatggccacgactttgatggttgcagccaccacctcctgctccccgggccgcgccgcgccgcgcctgaagccggtggcctcctcctcctccagcagcagcagcagcagctcggcgcggccgcggcggcccttggcgcagcagctcccgcggctgctggcgacggcggcggcggcggcggtggcagccgcgccgctcccggcgctggcggagcagatggagaaggccgcactgtttgacttcaacctgacgctcccggcgatcgcgaccgagttcctgctgctcatggtggcgctggacaagctctacttcacgccgctaggcaagttcatggatgagcgggacgccaagatccgcggtgagctcggcgatgtcaagggcgcctccgaggaggtgaagcagctggaggaccaggcggcggccatcatgaaggcggcgcgcgccgagatcgcggcggcgcttaacaagatgaagaaggagaccaccgcggagctggaggccaagctggacgagggacgcagccgtgtggaggccgagctcgtagaggcgctcgccaacctcgaggcgcagaaggaggaggctgtcaaggcgctcgacgcccagatcgcctcgctcagtgatgagatcgtcaagaaggtgctcccatccgcgtgatgaaaccaaaccggccctgccttatcctacgactatagttacatgaacatcataaattaatgataattttgaagaaaattggccgatgactccgacactttactcatgaaagattattggatgggttgtgtccaccgcctgtgttgggcgtggattggttgt

SEQ ID NO: 12817 - protein, 243 aa, Zea mays subsp. mays
  peptide (1)..(243): Ceres Seq. ID no. 13494470
HISSPPLTSRRRSSTPTTHPPLPGLAPMATTLMVAATTSCSPGRAAPRLKPVASSSSSSSSSSSARPRRPLAQQLPRLLATAAAAAVAAAPLPALAEQMEKAALFDFNLTLPAIATEFLLLMVALDKLYFTPLGKFMDERDAKIRGELGDVKGASEEVKQLEDQAAAIMKAARAEIAAALNKMKKETTAELEAKLDEGRSRVEAELVEALANLEAQKEEAVKALDAQIASLSDEIVKKVLPSA

SEQ ID NO: 12818 - protein, 216 aa, Zea mays subsp. mays
  peptide (1)..(216): Ceres Seq. ID no. 13494471
MATTLMVAATTSCSPGRAAPRLKPVASSSSSSSSSSSARPRRPLAQQLPRLLATAAAAAVAAAPLPALAEQMEKAALFDFNLTLPAIATEFLLLMVALDKLYFTPLGKFMDERDAKIRGELGDVKGASEEVKQLEDQAAAIMKAARAEIAAALNKMKKETTAELEAKLDEGRSRVEAELVEALANLEAQKEEAVKALDAQIASLSDEIVKKVLPSA

SEQ ID NO: 12819 - protein, 211 aa, Zea mays subsp. mays
  peptide (1)..(211): Ceres Seq. ID no. 13494472
MVAATTSCSPGRAAPRLKPVASSSSSSSSSSSARPRRPLAQQLPRLLATAAAAAVAAAPLPALAEQMEKAALFDFNLTLPAIATEFLLLMVALDKLYFTPLGKFMDERDAKIRGELGDVKGASEEVKQLEDQAAAIMKAARAEIAAALNKMKKETTAELEAKLDEGRSRVEAELVEALANLEAQKEEAVKALDAQIASLSDEIVKKVLPSA

SEQ ID NO: 12820 - DNA, 1486 bp, Zea mays subsp. mays
  misc_feature (1)..(1486): Ceres Seq. ID no. 13499131
  misc_feature (1)..(1486): Ortholog of  Ceres SEQ ID NO 14316215 as cited in SEQ ID NO 53085
aaaattcgtcacaggtctcctggtccaggccgccgccggttcaatctctcctctgacttctccggctgtcctcgactgcgaacccgatctcgattcgatccccaagccatcccatggcggctgccctctcctcgcggcgtgccctgcacagcctccaccgccgcctcctcttccacccctccccctcacccgccgccgcacgccgcgcgctacccacttccactcgcagccccatccccgcacactcccccaccttctccttctccttctactcctcctcccgcttcttcaccaccgcgcgccccgatgcgaggctgcggcacgggatgctgccgcagcggctgataggcggggtcaggtcggtggcgaacggtgggtcgaaactgggaccgctgggtcagggggtcaaggggctggggcggcccatggaggcggcgaggagcgcggccgcgcggtaccgcgcggccgtcggcctgcaggtcgaggccttctggcggcgcaactccatgatcctcgtcggtgcggggggagtcatcgtctgtttcttgctctggaggatcatgttcggcatcgccagcaccttcgtcggcctctccgagggtatggccaagtacggcttcctcgcccttgccaccgccattgtcgcctttgccggtatgtatgcccgggcaaggttaaccataaaccctgacaaggtttaccggctggctatgacaaaactcaatacatctgctgccatccttgaagttatgggtgcgcccctaactggtactgatgtcagagcatatgttatgtctggaggaggcccgaaactgaaggacttcaaatttaagcttggcagtaaacggtgcttcctcattttccccatcaaaggatcagaaagaaggggcctcgtaagtgttgaggccaagaagaaaaatggacagtatgacatgaagctactagctgttgacataccaatggcatcaggtcctgaccagcggctgttcctcgtcggtgatgaacaagagtacaaggtgggcggggggcttgatatctgagctgcgagacccgatcgtaaaagctatggccgcggagaaggagtttgactatctcgacgagagagaggatgaggaggacgagcggagggagcgtgaggaggcggagcaagaggaagcggaagcattgaggcgcgaggaggaaaggctgcgccaggagggtgaagagcgtaggcggcgggaggaggctgagagcctggagaaagctacgtgacatgacttactgtactgactttccaccttgccttgtgcattgtcttctacctctgtctctaccggagtgtagcgatcagcggtttccacagcaggagattgcttccgagttcacttgagtttctggtggtcagttcggcgtcactagtctcaaagttgttgagaaggaaggaataattttgacggttacgcgacaggtcacttcggcgaagcaatgtaatttatagtggttgatc

SEQ ID NO: 12821 - protein, 308 aa, Zea mays subsp. mays
  peptide (1)..(308): Ceres Seq. ID no. 13499132
MAAALSSRRALHSLHRRLLFHPSPSPAAARRALPTSTRSPIPAHSPTFSFSFYSSSRFFTTARPDARLRHGMLPQRLIGGVRSVANGGSKLGPLGQGVKGLGRPMEAARSAAARYRAAVGLQVEAFWRRNSMILVGAGGVIVCFLLWRIMFGIASTFVGLSEGMAKYGFLALATAIVAFAGMYARARLTINPDKVYRLAMTKLNTSAAILEVMGAPLTGTDVRAYVMSGGGPKLKDFKFKLGSKRCFLIFPIKGSERRGLVSVEAKKKNGQYDMKLLAVDIPMASGPDQRLFLVGDEQEYKVGGGLDI

SEQ ID NO: 12822 - protein, 237 aa, Zea mays subsp. mays
  peptide (1)..(237): Ceres Seq. ID no. 13499133
MLPQRLIGGVRSVANGGSKLGPLGQGVKGLGRPMEAARSAAARYRAAVGLQVEAFWRRNSMILVGAGGVIVCFLLWRIMFGIASTFVGLSEGMAKYGFLALATAIVAFAGMYARARLTINPDKVYRLAMTKLNTSAAILEVMGAPLTGTDVRAYVMSGGGPKLKDFKFKLGSKRCFLIFPIKGSERRGLVSVEAKKKNGQYDMKLLAVDIPMASGPDQRLFLVGDEQEYKVGGGLDI

SEQ ID NO: 12823 - protein, 229 aa, Zea mays subsp. mays
  peptide (1)..(229): Ceres Seq. ID no. 13499134
KFVTGLLVQAAAGSISPLTSPAVLDCEPDLDSIPKPSHGGCPLLAACPAQPPPPPPLPPLPLTRRRTPRATHFHSQPHPRTLPHLLLLLLLLLPLLHHRAPRCEAAARDAAAAADRRGQVGGERWVETGTAGSGGQGAGAAHGGGEERGRAVPRGRRPAGRGLLAAQLHDPRRCGGSHRLFLALEDHVRHRQHLRRPLRGYGQVRLPRPCHRHCRLCRYVCPGKVNHKP

SEQ ID NO: 12824 - DNA, 900 bp, Zea mays subsp. mays
  misc_feature (1)..(900): Ceres Seq. ID no. 12414562
  misc_feature (1)..(900): Ortholog of  Ceres SEQ ID NO 14303722 as cited in SEQ ID NO 63143
tcttccttatccagatggcggcgccggccaactccaccaccttctccggcgacgtgtgggcggagctccgcctggccgacgcccgcgacgtgccgcacatccaccgcctcatacaccatatggccgagttcgagctgctcaccgacctcttcgccgccaccgaagagctcctcacgtccacgctcttcccatcgccgacgccgcctcccttcacctccttcacagccctcgtccttgacctatcccccacccccatcctcccggactcctcttccaccatcgcctcccgccgcctcgacctctccgcgtccccgctcgcagacccggaggccgccaccttcgcctccccgcgcggcggcgggcgcgtcactgccgggttcgtgatctgcttccccaactactccaccttcctctccaagcccgggctgtacgttgaggacatcttcgtgcgcgcaccctggcgccgccgcggccttggccggatgatgctgtctgccgtcgccggcagggccnccgagctcgggatgggccgggtggagtggtgcgtgctcgactggancaagaacgccatcgacttntacgaggggatgggcnccgatgtgctcccgcagtggcgcatntgccggctcgccggcgcagcccttgacaaatacaaggtcagccagaaggaggccgccggtgggaaggctgcagagtaggagggcctggaaattcgcttattgagagtgcctgccaataataaaggtggtggatttgcttgcgctgcttagctctggcatggtttagaactagatgattagtgattcagtgcatttgatcagctcattagggcgagatgggcaatcgggacttgttgtggtataaaccttgctgcattatgctagactgtcttctgatttg

SEQ ID NO: 12825 - protein, 231 aa, Zea mays subsp. mays
  peptide (1)..(231): Ceres Seq. ID no. 12414563
  misc_feature (171)..(171): Xaa is any aa, unknown or other
  misc_feature (186)..(186): Xaa is any aa, unknown or other
  misc_feature (192)..(192): Xaa is any aa, unknown or other
  misc_feature (198)..(198): Xaa is any aa, unknown or other
  misc_feature (206)..(206): Xaa is any aa, unknown or other
FLIQMAAPANSTTFSGDVWAELRLADARDVPHIHRLIHHMAEFELLTDLFAATEELLTSTLFPSPTPPPFTSFTALVLDLSPTPILPDSSSTIASRRLDLSASPLADPEAATFASPRGGGRVTAGFVICFPNYSTFLSKPGLYVEDIFVRAPWRRRGLGRMMLSAVAGRAXELGMGRVEWCVLDWXKNAIDXYEGMGXDVLPQWRXCRLAGAALDKYKVSQKEAAGGKAAE

SEQ ID NO: 12826 - protein, 227 aa, Zea mays subsp. mays
  peptide (1)..(227): Ceres Seq. ID no. 12414564
  misc_feature (167)..(167): Xaa is any aa, unknown or other
  misc_feature (182)..(182): Xaa is any aa, unknown or other
  misc_feature (188)..(188): Xaa is any aa, unknown or other
  misc_feature (194)..(194): Xaa is any aa, unknown or other
  misc_feature (202)..(202): Xaa is any aa, unknown or other
MAAPANSTTFSGDVWAELRLADARDVPHIHRLIHHMAEFELLTDLFAATEELLTSTLFPSPTPPPFTSFTALVLDLSPTPILPDSSSTIASRRLDLSASPLADPEAATFASPRGGGRVTAGFVICFPNYSTFLSKPGLYVEDIFVRAPWRRRGLGRMMLSAVAGRAXELGMGRVEWCVLDWXKNAIDXYEGMGXDVLPQWRXCRLAGAALDKYKVSQKEAAGGKAAE

SEQ ID NO: 12827 - protein, 192 aa, Zea mays subsp. mays
  peptide (1)..(192): Ceres Seq. ID no. 12414565
  misc_feature (132)..(132): Xaa is any aa, unknown or other
  misc_feature (147)..(147): Xaa is any aa, unknown or other
  misc_feature (153)..(153): Xaa is any aa, unknown or other
  misc_feature (159)..(159): Xaa is any aa, unknown or other
  misc_feature (167)..(167): Xaa is any aa, unknown or other
MAEFELLTDLFAATEELLTSTLFPSPTPPPFTSFTALVLDLSPTPILPDSSSTIASRRLDLSASPLADPEAATFASPRGGGRVTAGFVICFPNYSTFLSKPGLYVEDIFVRAPWRRRGLGRMMLSAVAGRAXELGMGRVEWCVLDWXKNAIDXYEGMGXDVLPQWRXCRLAGAALDKYKVSQKEAAGGKAAE

SEQ ID NO: 12828 - DNA, 2286 bp, Zea mays subsp. mays
  misc_feature (1)..(2286): Ceres Seq. ID no. 12414637
  misc_feature (1)..(2286): Ortholog of  Ceres SEQ ID NO 15169092 as cited in SEQ ID NO 60430
  misc_feature (1)..(2286): Ortholog of  Ceres SEQ ID NO 14303680 as cited in SEQ ID NO 66019
  misc_feature (1)..(2286): Ortholog of  Ceres SEQ ID NO 15224940 as cited in SEQ ID NO 0
atctgcctctctcttcccctccctctctggaaccagggtggttgtcaagcggtgttggagttgggagtccttgccattggtacaagagcaagaagcaaggacagggaggggcgagaggaggaagaaagcgagggacactagaaaggtgcttgctttgtttccagttgcttcttctctctccctgggcgggagagaaagaagcaggagagatatgggcgagatggtcgtggccgggtatggcatggacaaggctctgcgggccagcgtcagcttcgacacgccatgcggcgcgctgctgcgcgagcttgagcaaatatggacagagattggggagcgtgaacaagataaagatcgcatgttccttgaactggaaacaggagtgcatgcgtgtgtaccgtagaaaggttgatagtgccaatgctgagagagcccagctccgtcagtcactgatggccaaagaagcagagcttaaagctctagttgcttctatcggggaaaatggcccacgatttacggtggatgaaaagcacacatcgttgaaagatcaaacttgctgcagtggcacctcttttggaagatcttagagtaaagaaacaagacagagtcaaacaaatctcaaatgtgcaatgtcaaatcgagaagataaaagcacaaatttctgatcacaattatcaggacagtgatggttccatcaaacaacttaacgatgaccatgacttatcgaccagaagaatttctgatcttcaaatgcaactgcgtaatctacagaaggagaagtccgatcgtcttcagaaggtttttatatatgtggatgaagtgcacagcctatgtgcagtgcttgggatggattttccaaagactgtaaaagaggtccacccgagtttgcatggatccaactctgaaaattcaacaaatattagtgatagcactcttgaaggtcttactcagactatcctgaagctcaaagcagaaaagaagacaagagttttaaagttgcaagagactgtagaaaaacttcacaagttatggaatctgatggagtcaactgagaaagagaggatacacttctctgaagtagctgctattcttggatctactgaggaagagatcaattctccaggcattctgtcattagagacaattcagaagactgaagaggaagtcgaaaagctaactgtacaaaaaactagtagaatgaaggagcttgttctcaagaaaaggttagaactagaaggcatctgtagaaatgcacacatggagcctgatatgagcacagcaccagagaagatcaccgcgctgattgattccggtttagtggatccttgcgaactcctttccagcattgaagtgcaaataacaaaagcaaatgaagagtccttaacgaggaaagatatcatggagagagtggataaatggctatcagcttgtgatgaagagacttggcttgaggaatataaccaagatgataataggtatagtgctggcaggggtgcccacttgaatcttaagcgtgcagagaaggcaaggataactgtccaaaagattccaactatgattgacagcttgatagccaaaacttttgcatgggaggatgaaagaaatgtgccatttttatatgatgggattcgtttggttgccattttggaagagcaaaaactcagaagggcacaaagggaggaagagaagagacgcagccgggatcagaggaagctgcacagtttattgcttaaggagaaggagttgattttcgggtccaaacctagtcctagaaagacaagcagcttcaataggaggaccagcaaccaccatccaaacgcaaatggcgctggattcatgactccggtgccacgccgagtttcagctggcagtgccaccccagagcttctgaccccacgctcgtattctggccggtacaacaactacttcaaggagaacaggcgcctgacagctgcaccactgaacttctcagttggttccaaggaggatagcatgtcatccttcgcatccatcagtggctcggaacctgattcgccattgtttttgcactaagtgttggttagggaggagacttcttggtgagaagggtggatagcctcaagatcggaccattgtgtgtgtgtgtgtgtggcagctgttaacattgctgattggtaacaacaggttgtgacaagtttagatgcgattgcttgtagatataatatctaacattcatggttctgctgtacttccaaatttaagttgtaagtcgtttggttaggaaggatgcaatgcccaagtgtgcaatgt

SEQ ID NO: 12829 - protein, 433 aa, Zea mays subsp. mays
  peptide (1)..(433): Ceres Seq. ID no. 12414638
MQLRNLQKEKSDRLQKVFIYVDEVHSLCAVLGMDFPKTVKEVHPSLHGSNSENSTNISDSTLEGLTQTILKLKAEKKTRVLKLQETVEKLHKLWNLMESTEKERIHFSEVAAILGSTEEEINSPGILSLETIQKTEEEVEKLTVQKTSRMKELVLKKRLELEGICRNAHMEPDMSTAPEKITALIDSGLVDPCELLSSIEVQITKANEESLTRKDIMERVDKWLSACDEETWLEEYNQDDNRYSAGRGAHLNLKRAEKARITVQKIPTMIDSLIAKTFAWEDERNVPFLYDGIRLVAILEEQKLRRAQREEEKRRSRDQRKLHSLLLKEKELIFGSKPSPRKTSSFNRRTSNHHPNANGAGFMTPVPRRVSAGSATPELLTPRSYSGRYNNYFKENRRLTAAPLNFSVGSKEDSMSSFASISGSEPDSPLFLH

SEQ ID NO: 12830 - protein, 401 aa, Zea mays subsp. mays
  peptide (1)..(401): Ceres Seq. ID no. 12414639
MDFPKTVKEVHPSLHGSNSENSTNISDSTLEGLTQTILKLKAEKKTRVLKLQETVEKLHKLWNLMESTEKERIHFSEVAAILGSTEEEINSPGILSLETIQKTEEEVEKLTVQKTSRMKELVLKKRLELEGICRNAHMEPDMSTAPEKITALIDSGLVDPCELLSSIEVQITKANEESLTRKDIMERVDKWLSACDEETWLEEYNQDDNRYSAGRGAHLNLKRAEKARITVQKIPTMIDSLIAKTFAWEDERNVPFLYDGIRLVAILEEQKLRRAQREEEKRRSRDQRKLHSLLLKEKELIFGSKPSPRKTSSFNRRTSNHHPNANGAGFMTPVPRRVSAGSATPELLTPRSYSGRYNNYFKENRRLTAAPLNFSVGSKEDSMSSFASISGSEPDSPLFLH

SEQ ID NO: 12831 - protein, 337 aa, Zea mays subsp. mays
  peptide (1)..(337): Ceres Seq. ID no. 12414640
MESTEKERIHFSEVAAILGSTEEEINSPGILSLETIQKTEEEVEKLTVQKTSRMKELVLKKRLELEGICRNAHMEPDMSTAPEKITALIDSGLVDPCELLSSIEVQITKANEESLTRKDIMERVDKWLSACDEETWLEEYNQDDNRYSAGRGAHLNLKRAEKARITVQKIPTMIDSLIAKTFAWEDERNVPFLYDGIRLVAILEEQKLRRAQREEEKRRSRDQRKLHSLLLKEKELIFGSKPSPRKTSSFNRRTSNHHPNANGAGFMTPVPRRVSAGSATPELLTPRSYSGRYNNYFKENRRLTAAPLNFSVGSKEDSMSSFASISGSEPDSPLFLH

SEQ ID NO: 12832 - DNA, 1289 bp, Zea mays subsp. mays
  misc_feature (1)..(1289): Ceres Seq. ID no. 13492669
  misc_feature (1)..(1289): Ortholog of  Ceres SEQ ID NO 15177059 as cited in SEQ ID NO 60196
ctttgttgcctacagcctgtaacctactaccacaccaagctaatctgggtgaggtatcccgtgctcagcgcactattgaagccgtggagaagctgttgctgcaggggatgggttcagttattgaatccaaggacattattggaatctacaggactccattattggatgaccacggacaagtccgttaccatattcaccaaaagcaagtacaggttaccggatgtcatcgtggaaacgcaaatgtccgttatgcatggcttccttgctccaaaagcactgtgcatgtaatgatgctgaatggtgttttgcaagttgataagcctcccaataagtgtgcagcctatggagagggcactctccttacaccagcaaatcgttcggatgcctgtgtgaaatactctgatgttgatgaaaatggcattgtccgtatgatgttgtgccgtgtaataatggggaacgtagaaatagttcaccctggatctaagcagtgccaacctagtaataagtattttgatagtggagtagacgaccttaaaaatccacggcattacgttgtgtgggatatgaatctgaatagtcatatctattctgagtttgtagtcactgtcaaattgccttctaaaaccaaagattcctttgtatcgcaagaaaactgtcagaattcgtctgatctatcactggtgttgaactctagttcacctgattgtatttcacaggagatgaacctggaggcacctccagcattgggaggtggatgtgcagcccccatgctaggagattcgatggaaaaggctccaagctcaccttggatgcctttctccatgctgtttgcagcgatctctaccaaagtgtctcctgagaatatggacgtgattattggttgctatgaagagtttaagagcaagaaaataagccgaggtgaactagtgaagaagctgaggcatgtagttggtgatagagtgctaatatcgacgataatgcgtctccaagataagttacctccagtggataagcgtgaggaaccagacacatcggcgtccaaggtggtggcggaaccatgagatgggtgtcaggaggtgggcgaggaatgcagaaagggaggaaccagccgacttgacatagaaaaccctgtgggaagcagcaactatgaagcctcttgcatcagtcttgtgcatggaggctgctgtttgttctctgtatcgtaggtgtctacgtttgcgaggaaattgtatccggtgtttctctttcttcaaattaaaccacgcacatgcagctgccgtactttttgg

SEQ ID NO: 12833 - protein, 352 aa, Zea mays subsp. mays
  peptide (1)..(352): Ceres Seq. ID no. 13492670
LLPTACNLLPHQANLGEVSRAQRTIEAVEKLLLQGMGSVIESKDIIGIYRTPLLDDHGQVRYHIHQKQVQVTGCHRGNANVRYAWLPCSKSTVHVMMLNGVLQVDKPPNKCAAYGEGTLLTPANRSDACVKYSDVDENGIVRMMLCRVIMGNVEIVHPGSKQCQPSNKYFDSGVDDLKNPRHYVVWDMNLNSHIYSEFVVTVKLPSKTKDSFVSQENCQNSSDLSLVLNSSSPDCISQEMNLEAPPALGGGCAAPMLGDSMEKAPSSPWMPFSMLFAAISTKVSPENMDVIIGCYEEFKSKKISRGELVKKLRHVVGDRVLISTIMRLQDKLPPVDKREEPDTSASKVVAEP

SEQ ID NO: 12834 - protein, 317 aa, Zea mays subsp. mays
  peptide (1)..(317): Ceres Seq. ID no. 13492671
MGSVIESKDIIGIYRTPLLDDHGQVRYHIHQKQVQVTGCHRGNANVRYAWLPCSKSTVHVMMLNGVLQVDKPPNKCAAYGEGTLLTPANRSDACVKYSDVDENGIVRMMLCRVIMGNVEIVHPGSKQCQPSNKYFDSGVDDLKNPRHYVVWDMNLNSHIYSEFVVTVKLPSKTKDSFVSQENCQNSSDLSLVLNSSSPDCISQEMNLEAPPALGGGCAAPMLGDSMEKAPSSPWMPFSMLFAAISTKVSPENMDVIIGCYEEFKSKKISRGELVKKLRHVVGDRVLISTIMRLQDKLPPVDKREEPDTSASKVVAEP

SEQ ID NO: 12835 - protein, 257 aa, Zea mays subsp. mays
  peptide (1)..(257): Ceres Seq. ID no. 13492672
MMLNGVLQVDKPPNKCAAYGEGTLLTPANRSDACVKYSDVDENGIVRMMLCRVIMGNVEIVHPGSKQCQPSNKYFDSGVDDLKNPRHYVVWDMNLNSHIYSEFVVTVKLPSKTKDSFVSQENCQNSSDLSLVLNSSSPDCISQEMNLEAPPALGGGCAAPMLGDSMEKAPSSPWMPFSMLFAAISTKVSPENMDVIIGCYEEFKSKKISRGELVKKLRHVVGDRVLISTIMRLQDKLPPVDKREEPDTSASKVVAEP

SEQ ID NO: 12836 - DNA, 1091 bp, Zea mays subsp. mays
  misc_feature (1)..(1091): Ceres Seq. ID no. 12414629
  misc_feature (1)..(1091): Ortholog of  Ceres SEQ ID NO 13595613 as cited in SEQ ID NO 59866
gcacgcgcgcgcacgacgcacagatacctttcctctcttctcccgtcccctcttacgcggcaaccccggcgcggcatggcgagcccgtcctcctcctctttcccgtcccggaaggccctgagcaagatcgcctgcaggcgcctgcagaaggagctaacggagtggcaggtcaacccgcccgccggcttcgagcacagggtcaccgacaacctccagagttccttggcggcggcagctagctcacgtcccggcgaaccctcgtcggtggccaagggccgttacaggatgaaacaacaacaaaaaaggtgggtcgtcgatgtagccggggcaccaggcacgctctacaccggcgagacctacaaactgcaggtggatttctccgagcattatcccatggaggcacctcaggttatatttctgcatccagcaccgatgcatccacacatttacagtaatggacacatctgtttagatatattgtatgattcgtggtccccagcaatgactgtcagttctatctgtatcagcatattatctatgctgtccagctcaccagcaaagcaacgcccagccgataacgatcgctatgtcaggaactgtcgcaatgggaggtcaccaaaggagaccacgtggtggttccatgacgacactgtgtgatgggtgtttccggctgttgtcctgcccgcattttagttgccagactacatgggagatgatctaggcatatttcaagcgacccatttgaccagaaactaacacgctcttctggtttgtaaatcagtgtgcatcagcgtcaggtctctgtacttgttgatccttacaccgtctatagtatgtagaataatgtttgtatctttgtcaatttacggaacagacatgaaatgcaggtcactgttgacttgcaagatttctgaatccttctagttgaaagttgaaacgagggttatatatgcttggtagtctgctccagatgcagcagctttagctctagttccacttaactctagctcaaactatggcagagctcttttgggagtggctgtgtgatcgtgtaataatatagctgttgtgtgagtattgcaaaattctgt

SEQ ID NO: 12837 - protein, 218 aa, Zea mays subsp. mays
  peptide (1)..(218): Ceres Seq. ID no. 12414630
ARARTTHRYLSSLLPSPLTRQPRRGMASPSSSSFPSRKALSKIACRRLQKELTEWQVNPPAGFEHRVTDNLQSSLAAAASSRPGEPSSVAKGRYRMKQQQKRWVVDVAGAPGTLYTGETYKLQVDFSEHYPMEAPQVIFLHPAPMHPHIYSNGHICLDILYDSWSPAMTVSSICISILSMLSSSPAKQRPADNDRYVRNCRNGRSPKETTWWFHDDTV

SEQ ID NO: 12838 - protein, 193 aa, Zea mays subsp. mays
  peptide (1)..(193): Ceres Seq. ID no. 12414631
MASPSSSSFPSRKALSKIACRRLQKELTEWQVNPPAGFEHRVTDNLQSSLAAAASSRPGEPSSVAKGRYRMKQQQKRWVVDVAGAPGTLYTGETYKLQVDFSEHYPMEAPQVIFLHPAPMHPHIYSNGHICLDILYDSWSPAMTVSSICISILSMLSSSPAKQRPADNDRYVRNCRNGRSPKETTWWFHDDTV

SEQ ID NO: 12839 - protein, 123 aa, Zea mays subsp. mays
  peptide (1)..(123): Ceres Seq. ID no. 12414632
MKQQQKRWVVDVAGAPGTLYTGETYKLQVDFSEHYPMEAPQVIFLHPAPMHPHIYSNGHICLDILYDSWSPAMTVSSICISILSMLSSSPAKQRPADNDRYVRNCRNGRSPKETTWWFHDDTV

SEQ ID NO: 12840 - DNA, 1530 bp, Zea mays subsp. mays
  misc_feature (1)..(1530): Ceres Seq. ID no. 12358125
  misc_feature (1)..(1530): Ortholog of  Ceres SEQ ID NO 13661548 as cited in SEQ ID NO 61474
aatacgatcaggtctagatcttatcggattatcgttttttgttgcctaggcgtgatgtgatttcgttggattgctgttggaagctattttttctgatctggatcggcctaaaagcaactccaagaacgagttctaaacttgagccttaaaatttgtgttaggaccttatttgatttatttaggatctccaacaaccaggccttaaaatcaggatacccagcttccatcttctctgccaggcaacgcgcttttttctagcatatccttctcgtcagctacgcattcgttcgcaatcggccgcatgaggcccacatcatccttcctcaagggctgcacagttaagcgcgacggctgcacatcacggctgcaaggtacagctcgacggctgctggtaggggcatcagcattaccgcatcatccctgcacggtaggcccttgacccctgcacaatacggctggacggctacgagacgagtggtggcggagtctgctcgctggaggttgggtgcgtggacgaggtgaatagttcatttagaacctgctgcagatttgcaacaaaaacatgtatgcaactaggagatctatgatccatctcgaagatgaagaattagatgatgaacttgaccacctcatgcttctcatgatgggtgaatatcggaagaggaagcataagcagcgaaagaagcatcgaggttcagtttttggacacaaggtttacaatcaaaatagagatgaacacgggcaagaagcaaatactggacacccatctcctcctagctgttcactcttaagtgctggaagatcttttgctgggactcaaaatgtttcaagcctgcagaaggatgaagcatggaaagtgaatgtacgcatccatggttgtgatcttgaacagggttatttatgtggaacgatggaagcgcttaatgttccattagcagatacacctgttgtgactttctgggagggggagatagtggatgctaaaaattacacttttttcactggaaagtgggaggcatcaccagatgatgatataagacattggtccaagttcccatcatttacgcctcttctgggtcagattgagacagatggtggcaagtctctggactttagcaactatccttatatatttatgagatggaaagagcaatattttgtcaacgttggagtcgactgtgggttaaccatcgctggtttctactacgtctgcttttcttgtagcgatggctccattaatggattttattatgatccaaatagcagtccatttcagaagctcgagctgaagtgtaccaatgagaaaaaatccgggttcaccttttcatcctacgagctgcagtgacaggacagatgccctcgacagacaactttctgttagcatatagtgtgtgtactgaactcgtactccctaatgaaaggaatgagtggtcgtttacgtaacagtttgttttctagcaagactaagcaaactgtcactttgtaatctgcagaagcatcctgtcctttctaaaatctaccttttgtatt

SEQ ID NO: 12841 - protein, 260 aa, Zea mays subsp. mays
  peptide (1)..(260): Ceres Seq. ID no. 12358126
MYATRRSMIHLEDEELDDELDHLMLLMMGEYRKRKHKQRKKHRGSVFGHKVYNQNRDEHGQEANTGHPSPPSCSLLSAGRSFAGTQNVSSLQKDEAWKVNVRIHGCDLEQGYLCGTMEALNVPLADTPVVTFWEGEIVDAKNYTFFTGKWEASPDDDIRHWSKFPSFTPLLGQIETDGGKSLDFSNYPYIFMRWKEQYFVNVGVDCGLTIAGFYYVCFSCSDGSINGFYYDPNSSPFQKLELKCTNEKKSGFTFSSYELQ

SEQ ID NO: 12842 - protein, 253 aa, Zea mays subsp. mays
  peptide (1)..(253): Ceres Seq. ID no. 12358127
MIHLEDEELDDELDHLMLLMMGEYRKRKHKQRKKHRGSVFGHKVYNQNRDEHGQEANTGHPSPPSCSLLSAGRSFAGTQNVSSLQKDEAWKVNVRIHGCDLEQGYLCGTMEALNVPLADTPVVTFWEGEIVDAKNYTFFTGKWEASPDDDIRHWSKFPSFTPLLGQIETDGGKSLDFSNYPYIFMRWKEQYFVNVGVDCGLTIAGFYYVCFSCSDGSINGFYYDPNSSPFQKLELKCTNEKKSGFTFSSYELQ

SEQ ID NO: 12843 - protein, 237 aa, Zea mays subsp. mays
  peptide (1)..(237): Ceres Seq. ID no. 12358128
MLLMMGEYRKRKHKQRKKHRGSVFGHKVYNQNRDEHGQEANTGHPSPPSCSLLSAGRSFAGTQNVSSLQKDEAWKVNVRIHGCDLEQGYLCGTMEALNVPLADTPVVTFWEGEIVDAKNYTFFTGKWEASPDDDIRHWSKFPSFTPLLGQIETDGGKSLDFSNYPYIFMRWKEQYFVNVGVDCGLTIAGFYYVCFSCSDGSINGFYYDPNSSPFQKLELKCTNEKKSGFTFSSYELQ

SEQ ID NO: 12844 - DNA, 864 bp, Zea mays subsp. mays
  misc_feature (1)..(864): Ceres Seq. ID no. 12367137
  misc_feature (1)..(864): Ortholog of  Ceres SEQ ID NO 12610341 as cited in SEQ ID NO 56073
gcacgagaccattacctagaacatcctaatcaaaaaacccctcaacgaagcctctggtgcctcggccaccgcagcagcctggccctgccccggcccccgggcgtggtgtcaggtctcaggtgtggtggcgctttctcctctccggcacggtggccgcgtcatcccagctctcccgcgcggcggcggcggccgtttcctctcctgcgctcctcctgccgcacacagccagaaaattgcagctgaagtttgtttgaggataagcgacagctttgcgagtccttcgtgttgaaggagaaattgtagctgaagtgaaaaaacagcagggaacaatggcactatcacgaagtatgagagcatgtttgcacagtggaagacttgcacttcttgccatattggtctctggtggaattgtattgcaaatcttggcttgtgctctctataacaactggtggccaatgctaacagttctcatgtatcttatcctaccaatgcccctcatatttttcctgggttctgatacttcctccatgatgtccaatgggggagacggctgggtgaacttcacgaaattcttgacgggcgcatcaatagtagggagcatcgccattccgtcgatcctgaagcatgcgggcgtcattggatggggagccctgacgatggagctgtcatcctttgtggtctttggcgtggcaatcctgtggttcctccagatgaacggtgaagacgagtacagcggagtgttctaatccaaacctgctggttctcttgccagcgtggcactctgtgctgtgcatggtagttgtgaactgggctgtactgctacaacaggggaagcattgccctgggacctgatttactgacacc

SEQ ID NO: 12845 - protein, 138 aa, Zea mays subsp. mays
  peptide (1)..(138): Ceres Seq. ID no. 12367138
MALSRSMRACLHSGRLALLAILVSGGIVLQILACALYNNWWPMLTVLMYLILPMPLIFFLGSDTSSMMSNGGDGWVNFTKFLTGASIVGSIAIPSILKHAGVIGWGALTMELSSFVVFGVAILWFLQMNGEDEYSGVF

SEQ ID NO: 12846 - protein, 132 aa, Zea mays subsp. mays
  peptide (1)..(132): Ceres Seq. ID no. 12367139
MRACLHSGRLALLAILVSGGIVLQILACALYNNWWPMLTVLMYLILPMPLIFFLGSDTSSMMSNGGDGWVNFTKFLTGASIVGSIAIPSILKHAGVIGWGALTMELSSFVVFGVAILWFLQMNGEDEYSGVF

SEQ ID NO: 12847 - protein, 96 aa, Zea mays subsp. mays
  peptide (1)..(96): Ceres Seq. ID no. 12367140
MLTVLMYLILPMPLIFFLGSDTSSMMSNGGDGWVNFTKFLTGASIVGSIAIPSILKHAGVIGWGALTMELSSFVVFGVAILWFLQMNGEDEYSGVF

SEQ ID NO: 12848 - DNA, 618 bp, Zea mays subsp. mays
  misc_feature (1)..(618): Ceres Seq. ID no. 12414840
  misc_feature (1)..(618): Ortholog of  Ceres SEQ ID NO 14313559 as cited in SEQ ID NO 62852
cttcttattgtttgggagttatctccgttttgtctaccggtggggaagtatcagtgcaaaccatgtgggatttagcaattctgactcatcggagaatcatatgggtccaggccatcagcgaaatatgtctgactgcgacatggatgcaacattttactggatagggatggcatctatagctactattactgtactgttaccgactatcttgggcataactgcattgttcacaaagctaggattaatggtcgctggtggtattgtgctggcatcttttatgacatacgcagcggagcatcttgcaatctcagtcttcaacaagggtcaaaaatacaggaatgcgtcaagaactcgaagcttttgtttttaacgtttaagtaaaaaatccttgttgcattgtaggtagttttgtacacaaaaagaatgatgattcatttttaacacgtggccttcctgcccatggcccctttttttgtagcgctgatgtcacgccaacttgtggtaaataggtttccgacattgtttctgtagcacagttggcatgaagattacagacatgttttgggatcgtgacccgcttttactcgcttatattgatgtttatggtgagattgtcgt

SEQ ID NO: 12849 - protein, 122 aa, Zea mays subsp. mays
  peptide (1)..(122): Ceres Seq. ID no. 12414841
FLLFGSYLRFVYRWGSISANHVGFSNSDSSENHMGPGHQRNMSDCDMDATFYWIGMASIATITVLLPTILGITALFTKLGLMVAGGIVLASFMTYAAEHLAISVFNKGQKYRNASRTRSFCF

SEQ ID NO: 12850 - protein, 89 aa, Zea mays subsp. mays
  peptide (1)..(89): Ceres Seq. ID no. 12414842
MGPGHQRNMSDCDMDATFYWIGMASIATITVLLPTILGITALFTKLGLMVAGGIVLASFMTYAAEHLAISVFNKGQKYRNASRTRSFCF

SEQ ID NO: 12851 - protein, 81 aa, Zea mays subsp. mays
  peptide (1)..(81): Ceres Seq. ID no. 12414843
MSDCDMDATFYWIGMASIATITVLLPTILGITALFTKLGLMVAGGIVLASFMTYAAEHLAISVFNKGQKYRNASRTRSFCF

SEQ ID NO: 12852 - DNA, 1992 bp, Zea mays subsp. mays
  misc_feature (1)..(1992): Ceres Seq. ID no. 12347466
  misc_feature (1)..(1992): Ortholog of  Ceres SEQ ID NO 15176499 as cited in SEQ ID NO 52857
accacgtccaaaacgtttggagcccttttcctaatcttgctgctaccgctcgctccctctccccggccatttctctcatttcgccctccctccgccggctagggttactgccaccgccttccacccctccccgactgcccgtgggtggaggaggctggttggcgtgcagggtacctcggcggcggagatggagccggacttctcgaccgtgggcgggcccagctttgagttcgctttcaacgaggccaacttctccgaccgggaattgcggatcgaggtcgtcgcgggggattacgaccgccggggtccactggcggcggttccggaggaggtggcctcgccgactgggcgcgccatcggaagcgccgacgcgaggagctcttcaaggagaaagaatctacaacctacatgtcagaccaaactaattttaatgaagtcgaagcagaagagtgtgatgcatatgaagaaaatcaagaggaacctgtagcaatgatggaaggatctccacctgatgttgatcaagatggtgatgatgagcaaggtattgatccatcttgggctgctgtggttacgccggttttacgagtcaagacaatttatatcagttcggcgattcttgctgcgaagagtcctttctttttcaagcttttctcaaacggcatgaaagaatcggaccagagacatgcaacccttagaattactgactcagaggaaattgccctcatggagcttttaagctttatgtatagtggaaagttgacaactactgagcccactcttcttctggatatcttgatggctgccgacaaatttgaggttgtttcatgcatgaggtactgcagccagttgctcacaagcttgcagatgaccacagaatctgcacttctctacctagatctcccttgctcagtttcaatggcagctgcagttcaacctctgacagatgcagctaaggattttctcgctgtaaagtacaaggatttgattaagttccaagatgaagtgatgaacatccctcgtgctggaatcgaagccatcttgtcaagtaatgacctccaggtggcatctgaagataccatctatgacttcttactcagatgggcccgtgcacaatacccgaaatcagaagagagacgtgaggtccttagttctcggctgctccctcttgtgcgattcagtcatatgacgtgtaggaagctgcggaaggtcctagcctgcacagatatagaccacgagcaagcaaccaagtgtgtcaccgaggctcttctgttcaaagctgatgcaccacaccggcaacgagctcttgcagcggacgcaataacctgccggaaattcgccgagcgggcttacaagtacagaccactcaaagttgttgagtttgatcggccctacccacagtgcatagcatacttggatctcaagcgcgacgagtgctctcgactctttcctgcagggcggatatactcgcaagcgttccaccttgcagggcagggtttcttcctctcggctcactgtaacatggagcagcaaagcgcgttctactgcttcgggctcttcctggggatgcaagagaagggctccacgagtgtgacagtggactacgagttcgctgcaaggacgagaccatccggcgagtttgtgagcaagtacaagggtaactacacattcaccggtggaaaggctgttggatacaggaatctctttgcaatcccatggcagaagttcttggccgatgacagcctcttcttcgtggatgggatgctgcatctgagagccgagcttacgataaagcaaccctagagcaatggtctctgtatagtggtagttgttacgacagatgaaaaagatatcggatgggaaacctcacgagttccagttcgctgcaagtttccagatttgccggtatctcactgccaatgagcttgtttgcctccgtaacggcgcagggtgtataatggcttatttattcctagtatatacaaatacaagttg

SEQ ID NO: 12853 - protein, 463 aa, Zea mays subsp. mays
  peptide (1)..(463): Ceres Seq. ID no. 12347467
MSDQTNFNEVEAEECDAYEENQEEPVAMMEGSPPDVDQDGDDEQGIDPSWAAVVTPVLRVKTIYISSAILAAKSPFFFKLFSNGMKESDQRHATLRITDSEEIALMELLSFMYSGKLTTTEPTLLLDILMAADKFEVVSCMRYCSQLLTSLQMTTESALLYLDLPCSVSMAAAVQPLTDAAKDFLAVKYKDLIKFQDEVMNIPRAGIEAILSSNDLQVASEDTIYDFLLRWARAQYPKSEERREVLSSRLLPLVRFSHMTCRKLRKVLACTDIDHEQATKCVTEALLFKADAPHRQRALAADAITCRKFAERAYKYRPLKVVEFDRPYPQCIAYLDLKRDECSRLFPAGRIYSQAFHLAGQGFFLSAHCNMEQQSAFYCFGLFLGMQEKGSTSVTVDYEFAARTRPSGEFVSKYKGNYTFTGGKAVGYRNLFAIPWQKFLADDSLFFVDGMLHLRAELTIKQP

SEQ ID NO: 12854 - protein, 436 aa, Zea mays subsp. mays
  peptide (1)..(436): Ceres Seq. ID no. 12347468
MMEGSPPDVDQDGDDEQGIDPSWAAVVTPVLRVKTIYISSAILAAKSPFFFKLFSNGMKESDQRHATLRITDSEEIALMELLSFMYSGKLTTTEPTLLLDILMAADKFEVVSCMRYCSQLLTSLQMTTESALLYLDLPCSVSMAAAVQPLTDAAKDFLAVKYKDLIKFQDEVMNIPRAGIEAILSSNDLQVASEDTIYDFLLRWARAQYPKSEERREVLSSRLLPLVRFSHMTCRKLRKVLACTDIDHEQATKCVTEALLFKADAPHRQRALAADAITCRKFAERAYKYRPLKVVEFDRPYPQCIAYLDLKRDECSRLFPAGRIYSQAFHLAGQGFFLSAHCNMEQQSAFYCFGLFLGMQEKGSTSVTVDYEFAARTRPSGEFVSKYKGNYTFTGGKAVGYRNLFAIPWQKFLADDSLFFVDGMLHLRAELTIKQP

SEQ ID NO: 12855 - protein, 435 aa, Zea mays subsp. mays
  peptide (1)..(435): Ceres Seq. ID no. 12347469
MEGSPPDVDQDGDDEQGIDPSWAAVVTPVLRVKTIYISSAILAAKSPFFFKLFSNGMKESDQRHATLRITDSEEIALMELLSFMYSGKLTTTEPTLLLDILMAADKFEVVSCMRYCSQLLTSLQMTTESALLYLDLPCSVSMAAAVQPLTDAAKDFLAVKYKDLIKFQDEVMNIPRAGIEAILSSNDLQVASEDTIYDFLLRWARAQYPKSEERREVLSSRLLPLVRFSHMTCRKLRKVLACTDIDHEQATKCVTEALLFKADAPHRQRALAADAITCRKFAERAYKYRPLKVVEFDRPYPQCIAYLDLKRDECSRLFPAGRIYSQAFHLAGQGFFLSAHCNMEQQSAFYCFGLFLGMQEKGSTSVTVDYEFAARTRPSGEFVSKYKGNYTFTGGKAVGYRNLFAIPWQKFLADDSLFFVDGMLHLRAELTIKQP

SEQ ID NO: 12856 - DNA, 1115 bp, Zea mays subsp. mays
  misc_feature (1)..(1115): Ceres Seq. ID no. 12414625
  misc_feature (1)..(1115): Ortholog of  Ceres SEQ ID NO 14311568 as cited in SEQ ID NO 51732
  misc_feature (1)..(1115): Ortholog of  Ceres SEQ ID NO 14303877 as cited in SEQ ID NO 53500
  misc_feature (1)..(1115): Ortholog of  Ceres SEQ ID NO 15169781 as cited in SEQ ID NO 54829
  misc_feature (1)..(1115): Ortholog of  Ceres SEQ ID NO 13597743 as cited in SEQ ID NO 65452
  misc_feature (1)..(1115): Ortholog of  Ceres SEQ ID NO 13654231 as cited in SEQ ID NO 68285
aaatccttatcggcgactcggcgtcggaggctcggagcccacgaccacgaccgcttccacgccctcgaccccgaacccccaatcccggacgcgaccgctgaaccctagcatactccggccatctgccgccggccccggcgatcccccgccatggcctcccccgagggcacaacgtgggtcttcgactgtccccttatggacgacctcgcggtcgccgccgacttcgcggcagcccccgcgggaggatttttctgggcagcgccgccgtcgctgcagccgcaggcgccagtgcagtctgtcgttgccgcgtcggctcccaacccatgtatggaaatcagtagctctgtggactgtggtcaggaaaaagaacagccaacaaataaacgtccaaggtcagaaagtactacagaatcaagcacaaaagcatccagggagaaaattagaagggacaagctgaacgagagattcttggaattgggtgccattttggagccagggaaaactcctaaaatggacaaaacagctatattgagtgatgctattcgtgtagtaggtgaattgcgtagtgaagcaaaaagctcaaggattcaaatgagaatctccaagagaagattaaagagctgaaggccgagaagaatgagctgcgagacgagaagcaaaggctgaaggccgagaaggagagcctggagcagcagatcaagttcctgaatgcccggccaagcctcgtaccacaccacccagtgatcccagcctctgcgttccctgctccccaggggccagcagccgccgccaggcacaagctgatgatgcctgtgattggctaccctggattcccgatgtggcagttcatgccgccttcagatgttgacacctctgatgaccctaggtcttgtcctcctgtggcgtagaagccgtgcgaaatcctgttggaaagaggcgatgctgccttccattgattcaaatcttgatcggtccgcagtgttgctggtgtagttgattccagaactgaaggggatgttacatgtgtcggacggtgacatggggtgatctgatgacccctttgtatattatatatggtatggtataaataaattccgtgaccagaagctaatgtc

SEQ ID NO: 12857 - protein, 157 aa, Zea mays subsp. mays
  peptide (1)..(157): Ceres Seq. ID no. 12414626
MASPEGTTWVFDCPLMDDLAVAADFAAAPAGGFFWAAPPSLQPQAPVQSVVAASAPNPCMEISSSVDCGQEKEQPTNKRPRSESTTESSTKASREKIRRDKLNERFLELGAILEPGKTPKMDKTAILSDAIRVVGELRSEAKSSRIQMRISKRRLKS

SEQ ID NO: 12858 - protein, 151 aa, Zea mays subsp. mays
  peptide (1)..(151): Ceres Seq. ID no. 12414627
NPYRRLGVGGSEPTTTTASTPSTPNPQSRTRPLNPSILRPSAAGPGDPPPWPPPRAQRGSSTVPLWTTSRSPPTSRQPPREDFSGQRRRRCSRRRQCSLSLPRRLPTHVWKSVALWTVVRKKNSQQINVQGQKVLQNQAQKHPGRKLEGTS

SEQ ID NO: 12859 - protein, 142 aa, Zea mays subsp. mays
  peptide (1)..(142): Ceres Seq. ID no. 12414628
MDDLAVAADFAAAPAGGFFWAAPPSLQPQAPVQSVVAASAPNPCMEISSSVDCGQEKEQPTNKRPRSESTTESSTKASREKIRRDKLNERFLELGAILEPGKTPKMDKTAILSDAIRVVGELRSEAKSSRIQMRISKRRLKS

SEQ ID NO: 12860 - DNA, 1056 bp, Zea mays subsp. mays
  misc_feature (1)..(1056): Ceres Seq. ID no. 12347077
  misc_feature (1)..(1056): Ortholog of  Ceres SEQ ID NO 13597476 as cited in SEQ ID NO 65132
aaccatacctccgaggctccgaccaaaacaccagggtcccagtgctcttggctctaagatggcggcgccggaaccggaggccaagctggaagccgtaaccccatctcggtcccacgagctgccaccggagtccgaatccgacgcccctgcctccaccggcacccaggagctaaagccgtgggagcagcacgccgcggtgatcaacctcccgcgctacgactaccgcgcatcagggtccctcctcctccgttcgcattccggcttcctcatcacgtgccccatcaagcgtgaaaaaagtgcaaccaaggaagccattcccatccttgaagagtaccatgcaaattgctgtgtttctgaacatgcagaaccatgtgatgtgaaaaatgcaattaagaaaagaaaactgtgctcggaggcatcaggaagtttagaagaggcagtaacgaatgggaatagtagcagtgtttcagaatcaattggaagcaccggaaacacaagctcaccccagtccaaggtgaatgacaatgttgacagggcttcaaatctctcactggttaagctatcaagaagtggcttgctcttctttaaatttcctagtggaggcgttcatgtagttgagatgcttactgaaatacttcattcactcagatccgggaaactcaaatctccacaatggtgccaccgcatattcccaattcaagaaacttgcattctatcagaagaagacctgcatgccactgtgtcaaagttattccttgacttctcgaggagcaagacaaacgaagacaagcctataaagtttgcggttgcctataatagaaggggcattgatgagacagagaagaacagtaatgaaggttcaaaccagcagactttgatggatagggagcaatgtttcaaagtggtagctgctgctgtcaaatccgttgctgagaactcagtggttgatcttagatcgcctgaggtaaccttacccgacaattgtcaacagcttgcatagttactcgctactggttggatgacaaacaacatcgtacttgttaagatccaaattgg

SEQ ID NO: 12861 - protein, 332 aa, Zea mays subsp. mays
  peptide (1)..(332): Ceres Seq. ID no. 12347078
TIPPRLRPKHQGPSALGSKMAAPEPEAKLEAVTPSRSHELPPESESDAPASTGTQELKPWEQHAAVINLPRYDYRASGSLLLRSHSGFLITCPIKREKSATKEAIPILEEYHANCCVSEHAEPCDVKNAIKKRKLCSEASGSLEEAVTNGNSSSVSESIGSTGNTSSPQSKVNDNVDRASNLSLVKLSRSGLLFFKFPSGGVHVVEMLTEILHSLRSGKLKSPQWCHRIFPIQETCILSEEDLHATVSKLFLDFSRSKTNEDKPIKFAVAYNRRGIDETEKNSNEGSNQQTLMDREQCFKVVAAAVKSVAENSVVDLRSPEVTLPDNCQQLA

SEQ ID NO: 12862 - protein, 313 aa, Zea mays subsp. mays
  peptide (1)..(313): Ceres Seq. ID no. 12347079
MAAPEPEAKLEAVTPSRSHELPPESESDAPASTGTQELKPWEQHAAVINLPRYDYRASGSLLLRSHSGFLITCPIKREKSATKEAIPILEEYHANCCVSEHAEPCDVKNAIKKRKLCSEASGSLEEAVTNGNSSSVSESIGSTGNTSSPQSKVNDNVDRASNLSLVKLSRSGLLFFKFPSGGVHVVEMLTEILHSLRSGKLKSPQWCHRIFPIQETCILSEEDLHATVSKLFLDFSRSKTNEDKPIKFAVAYNRRGIDETEKNSNEGSNQQTLMDREQCFKVVAAAVKSVAENSVVDLRSPEVTLPDNCQQLA

SEQ ID NO: 12863 - DNA, 1437 bp, Zea mays subsp. mays
  misc_feature (1)..(1437): Ceres Seq. ID no. 12347187
  misc_feature (1)..(1437): Ortholog of  Ceres SEQ ID NO 13579556 as cited in SEQ ID NO 53743
aatctgccatcttcgtctatccctttcgtctcagttttgcagtttctactgctgtctttgctctgaaatccaaccgaaatctcagaggaaagtaggaaacctcgttcgggaacctgctttagtgagactccaatccttgggcgccattgccgcctgttttttgtgctaggaaaggcgctgtctgattcctgtatatttattttggcattgctttcagctgcaacaaaactaaccatggatggcactagctttgatctgacagagcacgaaggttcaaatctgtctccgtttctactcaaactttttaatgagtgggatgatcgcaagacaaggggcttgtttcaccatgacatcagttcctgtgaaacaaaggtgctacctggagtacataattttgtggcaacattaattgaaggacgtgaccaaaagaagcggccaactgagttcacaatgaaccaagttctccagccatttgttagtgagaagttcaatttcacaaaagtcagcccgttggaggtgatctttagattcaatgacactgagaaagaccctgcacaatattttgatggtgttcctgatactgtttcagcttcttctagtgccatcttgattaatgtgagcccaattggctactgccatgtgctattgactcccaagatccaggactgtttgccgcaaaggattgatcaagagagcttcttaatagccatgtatgttgcaagagaagcaaggactcccttcttcagagttggttataacagcctgggcggctttgcaactatcaaccaccttcacttccaggcatactacctgaaagtacagtatccagttgaaaaggcaatcacggagaagctcaagaccctagggaatagcgtgagcatttttcacctggtggattacccagtcaatggctttgtgttcgaaggtggtgcgagcctggaagatttgtcagatgtggtctccaaagtctgcatcttcctgcaagagaacaacagacctttcaatgtcctcatctctgaatctggcaagagaattttccttctaccacagtgctatgcggagaagcagcttctcggaaaggcgagccaagagttcctcgacatgagaatcaatccagcaatctgggagctcagtggtcatctggtactgaagcggaggaaggactacgaggaggcctctgaagcaaacatacgcaggtttttggttgaagcagctctttctgaaacagaatttcaggagctgaaccgatgcgtgctcgacttcctgaccagctctcttggttgaaactcggatgtaggttcctatagacagtaacagttctgaggttccagttaaaacagttgtgctggtactgttaccttatgatggtatatcatgtagtagtatttctgatttgactcgtcagctctgcgatgaaataatgtcttctccggcttc

SEQ ID NO: 12864 - protein, 349 aa, Zea mays subsp. mays
  peptide (1)..(349): Ceres Seq. ID no. 12347188
MDGTSFDLTEHEGSNLSPFLLKLFNEWDDRKTRGLFHHDISSCETKVLPGVHNFVATLIEGRDQKKRPTEFTMNQVLQPFVSEKFNFTKVSPLEVIFRFNDTEKDPAQYFDGVPDTVSASSSAILINVSPIGYCHVLLTPKIQDCLPQRIDQESFLIAMYVAREARTPFFRVGYNSLGGFATINHLHFQAYYLKVQYPVEKAITEKLKTLGNSVSIFHLVDYPVNGFVFEGGASLEDLSDVVSKVCIFLQENNRPFNVLISESGKRIFLLPQCYAEKQLLGKASQEFLDMRINPAIWELSGHLVLKRRKDYEEASEANIRRFLVEAALSETEFQELNRCVLDFLTSSLG

SEQ ID NO: 12865 - protein, 277 aa, Zea mays subsp. mays
  peptide (1)..(277): Ceres Seq. ID no. 12347189
MNQVLQPFVSEKFNFTKVSPLEVIFRFNDTEKDPAQYFDGVPDTVSASSSAILINVSPIGYCHVLLTPKIQDCLPQRIDQESFLIAMYVAREARTPFFRVGYNSLGGFATINHLHFQAYYLKVQYPVEKAITEKLKTLGNSVSIFHLVDYPVNGFVFEGGASLEDLSDVVSKVCIFLQENNRPFNVLISESGKRIFLLPQCYAEKQLLGKASQEFLDMRINPAIWELSGHLVLKRRKDYEEASEANIRRFLVEAALSETEFQELNRCVLDFLTSSLG

SEQ ID NO: 12866 - protein, 191 aa, Zea mays subsp. mays
  peptide (1)..(191): Ceres Seq. ID no. 12347190
MYVAREARTPFFRVGYNSLGGFATINHLHFQAYYLKVQYPVEKAITEKLKTLGNSVSIFHLVDYPVNGFVFEGGASLEDLSDVVSKVCIFLQENNRPFNVLISESGKRIFLLPQCYAEKQLLGKASQEFLDMRINPAIWELSGHLVLKRRKDYEEASEANIRRFLVEAALSETEFQELNRCVLDFLTSSLG

SEQ ID NO: 12867 - DNA, 1318 bp, Zea mays subsp. mays
  misc_feature (1)..(1318): Ceres Seq. ID no. 12374566
  misc_feature (1)..(1318): Ortholog of  Ceres SEQ ID NO 13598499 as cited in SEQ ID NO 64013
acacacacgaacccacgaacgcaggctcccgagaacgcagcccccattggatttggaagcttctccatgggacaccgagcctcgtagacgaagcagaggggaccagagaaaccgaggagcaagaagcagggagccatggcgttcctcctgcccaagctcacaacgccgtcctgcaagttgcccccgagccccctcctcaagccccagctcgtcccgccgggccacggcggcggcaagatccaaggctcctccgtctccggctctggcgcggcgcaggtcgcggccccgggccacctcagcctcctgctcctgctcagcgcctcgcagcaggcggccggccccgcggccaagtcgacggcgaccaagaaccggggcaagggcggcggggatccgcaaaggtcggatttttacctcaacctcggcaccgcggtgcgcacgctgcgggacgacctgcccgacgtcttcgtccgggaatccaactacgatatctaccgtgaagacatcacatttgtcgacccactaaacactttccacggcattgacaactacaagaccatcttctgggcactcagatttcacgggcgcctgctgttcagagaaatcgggctcgatgtatcacgcatctggcagctgacagagaactcgatcgttgtccggtgggagctgtggggcactccccgtgtcccatgggagtcatacggctgcttcagcgggacgtcgaggtacaaggtcgacaggaacgggaaaatctacgagcacagagtcgacaacttggcgctggacttcccacgatcagtagccagagtgggcagcatcgctgacatggtagtcgccacgccgagccccaatttgacgttttggaatgcggttgtgacaggcgatggttgctcgtggacaaagctttatgaagccgtggtggaagctgtggaacgggaagagcatagttccactggcattggccctgttggctgcagcttcggttgcggctgtggctgcagtttttgaaatgcaaactgctgtagcttgagctgcttgttcataggatggaacgagctccagggctagttgtttggttgttcctaggggaaatgtatagatcaatatatatgggcacacaaatcacggtatactgatatctctttgtatactgtagctataggacagcaaatttagataaaacacgtactagatggctatatttgattacccttgtgaccttgtgttatacagggccacaggggtagtgctttcactgctttctttcatatgcgatacacagatcttttgggtgtggtttgcccaatattagacacagttt

SEQ ID NO: 12868 - protein, 289 aa, Zea mays subsp. mays
  peptide (1)..(289): Ceres Seq. ID no. 12374567
MAFLLPKLTTPSCKLPPSPLLKPQLVPPGHGGGKIQGSSVSGSGAAQVAAPGHLSLLLLLSASQQAAGPAAKSTATKNRGKGGGDPQRSDFYLNLGTAVRTLRDDLPDVFVRESNYDIYREDITFVDPLNTFHGIDNYKTIFWALRFHGRLLFREIGLDVSRIWQLTENSIVVRWELWGTPRVPWESYGCFSGTSRYKVDRNGKIYEHRVDNLALDFPRSVARVGSIADMVVATPSPNLTFWNAVVTGDGCSWTKLYEAVVEAVEREEHSSTGIGPVGCSFGCGCGCSF

SEQ ID NO: 12869 - protein, 173 aa, Zea mays subsp. mays
  peptide (1)..(173): Ceres Seq. ID no. 12374568
HTRTHERRLPRTQPPLDLEASPWDTEPRRRSRGDQRNRGARSREPWRSSCPSSQRRPASCPRAPSSSPSSSRRATAAARSKAPPSPALARRRSRPRATSASCSCSAPRSRRPAPRPSRRRPRTGARAAGIRKGRIFTSTSAPRCARCGTTCPTSSSGNPTTISTVKTSHLSTH

SEQ ID NO: 12870 - protein, 164 aa, Zea mays subsp. mays
  peptide (1)..(164): Ceres Seq. ID no. 12374569
THEPTNAGSRERSPHWIWKLLHGTPSLVDEAEGTRETEEQEAGSHGVPPAQAHNAVLQVAPEPPPQAPARPAGPRRRQDPRLLRLRLWRGAGRGPGPPQPPAPAQRLAAGGRPRGQVDGDQEPGQGRRGSAKVGFLPQPRHRGAHAAGRPARRLRPGIQLRYLP

SEQ ID NO: 12871 - DNA, 1081 bp, Zea mays subsp. mays
  misc_feature (1)..(1081): Ceres Seq. ID no. 12341888
  misc_feature (1)..(1081): Ortholog of  Ceres SEQ ID NO 12781104 as cited in SEQ ID NO 60925
gcatgcatatgatgatgacaaatggtcaagtctgtatgaagattttgacgacggtgtcggcgaagaatcaattcttcctctggaatctgattcaactggtgattttgtggacattgactctgcatcacctacctttcctagtgacgatgcaatggaatcatcaattaccaattcatttgctcggaattgttcaattaatggcactccaagtttagtttctgccatgaaaggaacacgtgtgaagaagggaatcacgacaaagttgagcgtttcttgggcccctgatgtatacgaccctcctattacttctgactcgcacacggtgaaagggcaccatacgagttcaactaagagtaactacaaatacaagacctccaagagcagcaatatcactagaaggaaaaaggacaagaagcattctaggcacagtagtagcaatgggggtggcagcaaaagagacaagaagcattcttaccgcaggtagtgccagcagcagcagcagagctattaccagtggttctctatattgtgacgcgtacagtggtggtggcatcagcagcagaactgttcctgaatctgccaagatatctccattggtggtagctgaaaatgtcacaccgcaagagatggttcctatactgaagacactggaaccaatcaaatgtactaccagctgcggcaaagagaagccatttgccttgctgtcgcgccagttttcccctgcaaggtacaaggggatgttcaccttttggaaccaaaaccaactgacttcttgacaatttgctatgcggaagctcacctgaaagttcccttgccaagggctgttcggatcccctccaaactttagagcttcaaaaaatttagagcattttagctcacttttgagctctaatctaaggttgaccaaagtttagatctaactgagctttacctctaaagtttagagaaggaaatctaaacatgccctaatttgattttatcaaagattgttgctattgttctcttcgttaccatgtttgtttcgcctgtctgaaacttcagagatcatgttttggaaaattgcttggcaaagtgcttgtgt

SEQ ID NO: 12872 - protein, 160 aa, Zea mays subsp. mays
  peptide (1)..(160): Ceres Seq. ID no. 12341889
HAYDDDKWSSLYEDFDDGVGEESILPLESDSTGDFVDIDSASPTFPSDDAMESSITNSFARNCSINGTPSLVSAMKGTRVKKGITTKLSVSWAPDVYDPPITSDSHTVKGHHTSSTKSNYKYKTSKSSNITRRKKDKKHSRHSSSNGGGSKRDKKHSYRR

SEQ ID NO: 12873 - protein, 112 aa, Zea mays subsp. mays
  peptide (1)..(112): Ceres Seq. ID no. 12341890
MGVAAKETRSILTAGSASSSSRAITSGSLYCDAYSGGGISSRTVPESAKISPLVVAENVTPQEMVPILKTLEPIKCTTSCGKEKPFALLSRQFSPARYKGMFTFWNQNQLTS

SEQ ID NO: 12874 - protein, 110 aa, Zea mays subsp. mays
  peptide (1)..(110): Ceres Seq. ID no. 12341891
MESSITNSFARNCSINGTPSLVSAMKGTRVKKGITTKLSVSWAPDVYDPPITSDSHTVKGHHTSSTKSNYKYKTSKSSNITRRKKDKKHSRHSSSNGGGSKRDKKHSYRR

SEQ ID NO: 12875 - DNA, 1016 bp, Zea mays subsp. mays
  misc_feature (1)..(1016): Ceres Seq. ID no. 12367141
  misc_feature (1)..(1016): Ortholog of  Ceres SEQ ID NO 13594412 as cited in SEQ ID NO 58236
aaccttttgccgtcttgcggcggccttctgctccgccgctcgttctcatctcttgcagcggcctggggaaaaagaggaggagagatcggagatgaaggcgtgtgcgaaggctgcgggggagaggctgccgctggtctgtgctccgtcaactaggcagcctctagctcggagctttgttaaggtaagaagattaccctctcaacatgagacgaagtcacaagtatcctgctcagttagggtgtcagaaaacacagctcacagaatagatgccacagcagaaaacattttcccagcaatgaaagatcatgtcttgaaagcaactgatgcaatcaacagaggagaagtgattgcggtgcctactgataccatatacgggtttgcatgtgatgcatgctctgcaggagcagttaatcgtatttatgagatcaaaggacgcatacaaacacggcctctggcaatttgtgttggtgatgtctcagacatatcacggtttgctttagtggaccacttgccacatggcttgcttgatagtctacttcctgggcctgtcactattgttctaaaacgaggtgaaaacagcatattagagagatcacttaatcctggcttggatagcattggagttcgtgtgccggatctggatttcatacgttccattgttcgtggtactggaagtgcacttgcacttaccagcgccaacttaagcggacagcctagtagtgtctgtgtcaaagatttcgagggtttatggccacattgttcatatgtctttgatggtggagtacttccttctgggcgtgctggttcaacaatcgttgatctaataacaccaggagtttacaagatattgagggacggaagctcaaggaaggaaacagcagcagtgctcggcaagttcggctttgttgaagcgttgtaactactcggcactttaagaaagttagcacgatcaaagagtggctgtcttatccacagtatatcttgtttaattagtgatacattagagcttttgttgc

SEQ ID NO: 12876 - protein, 305 aa, Zea mays subsp. mays
  peptide (1)..(305): Ceres Seq. ID no. 12367142
TFCRLAAAFCSAARSHLLQRPGEKEEERSEMKACAKAAGERLPLVCAPSTRQPLARSFVKVRRLPSQHETKSQVSCSVRVSENTAHRIDATAENIFPAMKDHVLKATDAINRGEVIAVPTDTIYGFACDACSAGAVNRIYEIKGRIQTRPLAICVGDVSDISRFALVDHLPHGLLDSLLPGPVTIVLKRGENSILERSLNPGLDSIGVRVPDLDFIRSIVRGTGSALALTSANLSGQPSSVCVKDFEGLWPHCSYVFDGGVLPSGRAGSTIVDLITPGVYKILRDGSSRKETAAVLGKFGFVEAL

SEQ ID NO: 12877 - protein, 275 aa, Zea mays subsp. mays
  peptide (1)..(275): Ceres Seq. ID no. 12367143
MKACAKAAGERLPLVCAPSTRQPLARSFVKVRRLPSQHETKSQVSCSVRVSENTAHRIDATAENIFPAMKDHVLKATDAINRGEVIAVPTDTIYGFACDACSAGAVNRIYEIKGRIQTRPLAICVGDVSDISRFALVDHLPHGLLDSLLPGPVTIVLKRGENSILERSLNPGLDSIGVRVPDLDFIRSIVRGTGSALALTSANLSGQPSSVCVKDFEGLWPHCSYVFDGGVLPSGRAGSTIVDLITPGVYKILRDGSSRKETAAVLGKFGFVEAL

SEQ ID NO: 12878 - protein, 207 aa, Zea mays subsp. mays
  peptide (1)..(207): Ceres Seq. ID no. 12367144
MKDHVLKATDAINRGEVIAVPTDTIYGFACDACSAGAVNRIYEIKGRIQTRPLAICVGDVSDISRFALVDHLPHGLLDSLLPGPVTIVLKRGENSILERSLNPGLDSIGVRVPDLDFIRSIVRGTGSALALTSANLSGQPSSVCVKDFEGLWPHCSYVFDGGVLPSGRAGSTIVDLITPGVYKILRDGSSRKETAAVLGKFGFVEAL

SEQ ID NO: 12879 - DNA, 594 bp, Zea mays subsp. mays
  misc_feature (1)..(594): Ceres Seq. ID no. 13564163
  misc_feature (1)..(594): Ortholog of  Ceres SEQ ID NO 15176499 as cited in SEQ ID NO 52857
cagaccactcaaggtcgttgagtttgatcggccctatccacagtgcatagcatacttggatctcaagcgcgaggagtgctctcgactctttcctgcaggccggatatactcgcaagcgttccacctcgcagggcagggcttcttcctctcagctcactgtaacatggaacagcaaagcaccttctactgctttggcctgttcctggggatgcaagagaagggctcaacgagcgtgaccgtggactatgagtttgctgcaagaacgagaccatccggcgagtttgtgagcaagtataagggtaactacacatttaccggtgggaaggcagttgggtacaggaatctctttggaatcccgtggcaggcgttcatggccgatgacagcctcttcttcatcgacgggatgctgcatctgagagctgagcttacgataaagcaacctacgtagatgtgctgccgtcggattaagtgtgtccagtcatgggtgatgtggaaaatgctgtgtgctgcagatatcctttttvtttttwwccttttgttcacgcaccttaatccttacattaatagacagtttggtgatgacaaaatataaag

SEQ ID NO: 12880 - protein, 148 aa, Zea mays subsp. mays
  peptide (1)..(148): Ceres Seq. ID no. 13564164
RPLKVVEFDRPYPQCIAYLDLKREECSRLFPAGRIYSQAFHLAGQGFFLSAHCNMEQQSTFYCFGLFLGMQEKGSTSVTVDYEFAARTRPSGEFVSKYKGNYTFTGGKAVGYRNLFGIPWQAFMADDSLFFIDGMLHLRAELTIKQPT

SEQ ID NO: 12881 - protein, 94 aa, Zea mays subsp. mays
  peptide (1)..(94): Ceres Seq. ID no. 13564165
MEQQSTFYCFGLFLGMQEKGSTSVTVDYEFAARTRPSGEFVSKYKGNYTFTGGKAVGYRNLFGIPWQAFMADDSLFFIDGMLHLRAELTIKQPT

SEQ ID NO: 12882 - protein, 79 aa, Zea mays subsp. mays
  peptide (1)..(79): Ceres Seq. ID no. 13564166
MQEKGSTSVTVDYEFAARTRPSGEFVSKYKGNYTFTGGKAVGYRNLFGIPWQAFMADDSLFFIDGMLHLRAELTIKQPT

SEQ ID NO: 12883 - DNA, 1144 bp, Zea mays subsp. mays
  misc_feature (1)..(1144): Ceres Seq. ID no. 12340675
  misc_feature (1)..(1144): Ortholog of  Ceres SEQ ID NO 15179153 as cited in SEQ ID NO 1066
  misc_feature (1)..(1144): Ortholog of  Ceres SEQ ID NO 15176047 as cited in SEQ ID NO 55988
  misc_feature (1)..(1144): Ortholog of  Ceres SEQ ID NO 13582167 as cited in SEQ ID NO 56203
  misc_feature (1)..(1144): Ortholog of  Ceres SEQ ID NO 13658295 as cited in SEQ ID NO 66515
acgaccttctagttctagatgattctcaaacccacttccgggctgccgccgaggttatctacaacaccgagcagcgagaaggggttggtgtccagcacgaattgaatcgtcgccagaagtcatggcggattcggccacttcccgtccaaccgttctcgtcaccggcgccggcggccgcacaggccaaattgtctacaacaaactgaaagagaggtctgagcagttcgtggcaagagggctagtcaggacagaggagagcaagcagaagattggggcagccggtgatgtttacgttgctgacataagagacgcggatcgtctagcacctgctgtacaaggtgtggatgcgctcataatcctcaccagtgctgccccgaaaatgaaaccgggtttcgaccctagcaaaggtggacggcccgagttctactacgaagacggaatgtaccctgaacaggtggattggcttggccaaaagaatcagatcgatgctgctaaagctgctggagtgaagcatattgtgctggtgggatctatgggaggaacaaatcctaaccatccgctgaacagcatgggtaatggcaatatactggtatggaagcgcaaagcagaacagtatttggcagacagtggaatcccttatacaatcataaggccaggaggtctacaagacaaggacggaggagtgagagagctacttgtggggaaagacgatgaacttctccagactgacacaaagtcgattcctagagccgatgtggctgaggtttgtgtccaggctctgcagtacgaagaggccaagttcaaggcatttgatttggcctcaaagcctgaaggtgtgggcacgccaacaaaggactttagggcactgttctcccagatcactgctcggttttgagcgagctgctgggaagcctactcgagttctagattttatggtgtcacaatccattttatcgtgggcttgtcctggagatacaaccaggtagcttgttggagctgcggtttggtgcaattgcaaccaggtagcttgtatcaatccattttatggtgcattgtttgcttgtacactgctgaatgtcgtctggttgccaattgtgtgaactgttgacagccattaaaacaagttatttggaaccctgtttgc

SEQ ID NO: 12884 - protein, 257 aa, Zea mays subsp. mays
  peptide (1)..(257): Ceres Seq. ID no. 12340676
MADSATSRPTVLVTGAGGRTGQIVYNKLKERSEQFVARGLVRTEESKQKIGAAGDVYVADIRDADRLAPAVQGVDALIILTSAAPKMKPGFDPSKGGRPEFYYEDGMYPEQVDWLGQKNQIDAAKAAGVKHIVLVGSMGGTNPNHPLNSMGNGNILVWKRKAEQYLADSGIPYTIIRPGGLQDKDGGVRELLVGKDDELLQTDTKSIPRADVAEVCVQALQYEEAKFKAFDLASKPEGVGTPTKDFRALFSQITARF

SEQ ID NO: 12885 - protein, 171 aa, Zea mays subsp. mays
  peptide (1)..(171): Ceres Seq. ID no. 12340677
MKPGFDPSKGGRPEFYYEDGMYPEQVDWLGQKNQIDAAKAAGVKHIVLVGSMGGTNPNHPLNSMGNGNILVWKRKAEQYLADSGIPYTIIRPGGLQDKDGGVRELLVGKDDELLQTDTKSIPRADVAEVCVQALQYEEAKFKAFDLASKPEGVGTPTKDFRALFSQITARF

SEQ ID NO: 12886 - protein, 151 aa, Zea mays subsp. mays
  peptide (1)..(151): Ceres Seq. ID no. 12340678
MYPEQVDWLGQKNQIDAAKAAGVKHIVLVGSMGGTNPNHPLNSMGNGNILVWKRKAEQYLADSGIPYTIIRPGGLQDKDGGVRELLVGKDDELLQTDTKSIPRADVAEVCVQALQYEEAKFKAFDLASKPEGVGTPTKDFRALFSQITARF

SEQ ID NO: 12887 - DNA, 1683 bp, Zea mays subsp. mays
  misc_feature (1)..(1683): Ceres Seq. ID no. 12435135
  misc_feature (1)..(1683): Ortholog of  Ceres SEQ ID NO 13662391 as cited in SEQ ID NO 68631
aagttccagagccctccagagcaaaaaaaatatattatcgaatactaaagcattttcctcatcgatagaatatagaattttaaaaagggagcgaaataggtttttcctttttgcagctccgtcgtccaccaacctcctccgatccggccgccgcagcgtagccgaattgtcccctcgctagcttctccggccggctagaggctgtttcaggcggcctcgatctcctccgcgcggctgaggaaggagatcacgcggttgctcaggggctggggcgtgcatgatgggattttggttgattccgatggagactccgggcgaggcttctgtggaagcacgagcttcttccgccacaagatcgccgccatgctcgcctcctcctcctgcttcttatagatcccaccccctcgccgtcgtcgtcggcacggcagctagctcgctagcttctgtacataggtcgacgcgccatatagatactagtctcggattaagcgataattaaggcaaagaatctccaagtttgcttcgttcttgcattgaaccatggagtctggacggctcatcttcaacgcgccgggctctggcgccgggcagatgctcttcctcgactgcggcgcaggcggcggtcccggcggcggcttgttccatcgaggcgggagaccgatgcttggccttgaagaagggcgcggcgtaaaacggcccttcttcacctcgcccgacgagctcctcgaggaagagtactacgacgagcagctgccggagaagaagcgccgcctcaccccagagcaggtgcttctgctggagaggagcttcgaggaggagaacaagctggagccggagcgcaagacggagctggcgcgcaagctgggcctgcagcctcgccaggtggccgtctggttccagaaccgccgcgcccggtggaagaccaagcagctcgagcgcgacttcgaccgcctcaaggcctccttcgacgctctccgagcggaccagcgacgccctcctccaggacaacaaccgcctccgctcacaggttgtgtcgttgaccgagaagctgcaagagaaggaggatgcgacggagggcggcgccaccgctgacaccgccgcgccggcggtggacgtcgaggcttccctggccgacgacgtcgaggagccagcagagcctgcggcgacgttcgaggtgctgcaggaggtgaagtccgaggacaggctgagcaccggcagcggcgggagcgcggtggtggacgcggacgcgctgctgtacggcaggtttgccgcggcagttgatagcagcgtggagtcgtacttccccggcggcgaggaccactaccacgactgcgggacgatgggccccgtgaaccatggcgccggaggaggcatccagtcggacgacgacggcgccggcagcgacgaggggtgcagctactacgccgacgaagccgccgccgccgccgccgccgcgttcttcgccggacacgccacccaccaccacgcggacgaggacgaggacgccggccagatcagctggtggatgtggaactagacgttcgatcttcccacgccgatcgatcgaccgtcttcgaatcctgtgtcaacaagaagaaaaaagaatcgtgccgtgatttttctttgcgcaacgctgctgtaagcctgtaatggtgaatttctagctatggttatgccgttatg

SEQ ID NO: 12888 - protein, 183 aa, Zea mays subsp. mays
  peptide (1)..(183): Ceres Seq. ID no. 12435136
MESGRLIFNAPGSGAGQMLFLDCGAGGGPGGGLFHRGGRPMLGLEEGRGVKRPFFTSPDELLEEEYYDEQLPEKKRRLTPEQVLLLERSFEEENKLEPERKTELARKLGLQPRQVAVWFQNRRARWKTKQLERDFDRLKASFDALRADQRRPPPGQQPPPLTGCVVDREAAREGGCDGGRRHR

SEQ ID NO: 12889 - protein, 166 aa, Zea mays subsp. mays
  peptide (1)..(166): Ceres Seq. ID no. 12435137
MLFLDCGAGGGPGGGLFHRGGRPMLGLEEGRGVKRPFFTSPDELLEEEYYDEQLPEKKRRLTPEQVLLLERSFEEENKLEPERKTELARKLGLQPRQVAVWFQNRRARWKTKQLERDFDRLKASFDALRADQRRPPPGQQPPPLTGCVVDREAAREGGCDGGRRHR

SEQ ID NO: 12890 - protein, 143 aa, Zea mays subsp. mays
  peptide (1)..(143): Ceres Seq. ID no. 12435138
MLGLEEGRGVKRPFFTSPDELLEEEYYDEQLPEKKRRLTPEQVLLLERSFEEENKLEPERKTELARKLGLQPRQVAVWFQNRRARWKTKQLERDFDRLKASFDALRADQRRPPPGQQPPPLTGCVVDREAAREGGCDGGRRHR

SEQ ID NO: 12891 - DNA, 1961 bp, Zea mays subsp. mays
  misc_feature (1)..(1961): Ceres Seq. ID no. 12367287
  misc_feature (1)..(1961): Ortholog of  Ceres SEQ ID NO 13656047 as cited in SEQ ID NO 64721
gcatccgcatctctctctctcgcgcgcgccgcccttcccagcgccgtcggctgccgctcctcccctccaccgccgcctctgctccgcccgtcctcgcgccgtcgcgaccgctgcggcttcgtctctccccattgtctgtcccctctcaacgcactctacgacggaccgatgacttgacggatctgggggtttgtctagggtgggtgaacggaaggggatggagttcacggagtcgttcaagcagacgggcccgtgctccttctcccccgactcgcgcttccttgctattgccgtagactaccgtctcgtcgtccgcgacgtactctcactgaaggtggtacaattattttcatgcgtggacaagataagctctgtagaatgggcaccagattcagaatacattttatgtggactttacaagcgacccatggtgcaagcttggtcactgagtcaacctgattggacctgcaagattgatgaaggtccagcagggattgcatatgctcgctggagtcctgacagtcgtcatatattaactacatctgagtttcagctccgtctcactgtgtggtctctcgtaaatacagcatgcgtacatgtccagtggccaaaacatggttctaaaggtgtttctttcaccaaagacgggaaatttgctgcaatctgtaccagacgtgattgcaaggattacattaatttactatcatgtcactcttgggaaataatgactgtctttgctattgacacggtagacttagctggtgttgaatggtcaccatatgatagtgctattgttgtttgggattcacttcttgaatataaggttctgatatattcgccagacggaaggtgcttgttcaagtatctagcttatgaaagtgggttgggtgtgaaaactgttgcttggtcaccatgtggacagtttttagcagtgggcagctatgatcaagcagtacggactttgaatcacttgacgtggaaaacttttgcggagttctcacatgcagggtatattcgtagtccttgcaatgctgctatatataaggaagtggatgacccatggcaacttgatatgtcagaattatgtctaagtgaaggcctctctcgaaacatgccagacaatggtgcagaaaatggcaccgagggaggaggctctagagttaaatatgctgtgatggatgttcccatcaccttaccttcgttgaaaccagcttttgacaagcctaaccccaaacaaggcattggtatgctgtcatggagcagcgacagccactatttcttcaccaggaatgacaacatgccaactgttctctggatatgggatatatgccgccttgagcttgccgctgtgctcgtgcagaaagatccaattcgtgctgcagcatgggaccctacctgcacacgccttgttttatgcacagagagccctcacttgtacatgtggacgccatccggtgcctgctgtgtcaacatcccctttctgaacttccgaatcgttgatttgaagtggagctcgaatgggagctgtctcctcctgaaggagcgcgaatctttctgctgtgccacaatcatatctgccctgcctgaggaagaacctgatcattctgatgatacttctgaagatgaatgagtggcctcatggtatgtctagcagcttatgcgaatggaactgggaactaacagtacaaatgatcttgtgatggtgaatgagtgacactgactgactacttagctacttgtagaatccagagtggattgcgataccatgaatcgataaggtcatttcgctgcttagatggcaaatgctctatcaccaggcactacagaatggacagagaactgtgtggttctatttgttgtattcttgctcttgtttgtctgttgtagtttctccaaggttgtactgcttgaccttacttgttggatcttaatcttacatatccagtcaccagggtattttc

SEQ ID NO: 12892 - protein, 470 aa, Zea mays subsp. mays
  peptide (1)..(470): Ceres Seq. ID no. 12367288
MEFTESFKQTGPCSFSPDSRFLAIAVDYRLVVRDVLSLKVVQLFSCVDKISSVEWAPDSEYILCGLYKRPMVQAWSLSQPDWTCKIDEGPAGIAYARWSPDSRHILTTSEFQLRLTVWSLVNTACVHVQWPKHGSKGVSFTKDGKFAAICTRRDCKDYINLLSCHSWEIMTVFAIDTVDLAGVEWSPYDSAIVVWDSLLEYKVLIYSPDGRCLFKYLAYESGLGVKTVAWSPCGQFLAVGSYDQAVRTLNHLTWKTFAEFSHAGYIRSPCNAAIYKEVDDPWQLDMSELCLSEGLSRNMPDNGAENGTEGGGSRVKYAVMDVPITLPSLKPAFDKPNPKQGIGMLSWSSDSHYFFTRNDNMPTVLWIWDICRLELAAVLVQKDPIRAAAWDPTCTRLVLCTESPHLYMWTPSGACCVNIPFLNFRIVDLKWSSNGSCLLLKERESFCCATIISALPEEEPDHSDDTSEDE

SEQ ID NO: 12893 - protein, 400 aa, Zea mays subsp. mays
  peptide (1)..(400): Ceres Seq. ID no. 12367289
MVQAWSLSQPDWTCKIDEGPAGIAYARWSPDSRHILTTSEFQLRLTVWSLVNTACVHVQWPKHGSKGVSFTKDGKFAAICTRRDCKDYINLLSCHSWEIMTVFAIDTVDLAGVEWSPYDSAIVVWDSLLEYKVLIYSPDGRCLFKYLAYESGLGVKTVAWSPCGQFLAVGSYDQAVRTLNHLTWKTFAEFSHAGYIRSPCNAAIYKEVDDPWQLDMSELCLSEGLSRNMPDNGAENGTEGGGSRVKYAVMDVPITLPSLKPAFDKPNPKQGIGMLSWSSDSHYFFTRNDNMPTVLWIWDICRLELAAVLVQKDPIRAAAWDPTCTRLVLCTESPHLYMWTPSGACCVNIPFLNFRIVDLKWSSNGSCLLLKERESFCCATIISALPEEEPDHSDDTSEDE

SEQ ID NO: 12894 - protein, 301 aa, Zea mays subsp. mays
  peptide (1)..(301): Ceres Seq. ID no. 12367290
MTVFAIDTVDLAGVEWSPYDSAIVVWDSLLEYKVLIYSPDGRCLFKYLAYESGLGVKTVAWSPCGQFLAVGSYDQAVRTLNHLTWKTFAEFSHAGYIRSPCNAAIYKEVDDPWQLDMSELCLSEGLSRNMPDNGAENGTEGGGSRVKYAVMDVPITLPSLKPAFDKPNPKQGIGMLSWSSDSHYFFTRNDNMPTVLWIWDICRLELAAVLVQKDPIRAAAWDPTCTRLVLCTESPHLYMWTPSGACCVNIPFLNFRIVDLKWSSNGSCLLLKERESFCCATIISALPEEEPDHSDDTSEDE

SEQ ID NO: 12895 - DNA, 2560 bp, Zea mays subsp. mays
  misc_feature (1)..(2560): Ceres Seq. ID no. 12414504
  misc_feature (1)..(2560): Ortholog of  Ceres SEQ ID NO 15174591 as cited in SEQ ID NO 53383
  misc_feature (1)..(2560): Ortholog of  Ceres SEQ ID NO 14310784 as cited in SEQ ID NO 58503
  misc_feature (1)..(2560): Ortholog of  Ceres SEQ ID NO 14312180 as cited in SEQ ID NO 59480
  misc_feature (2078)..(2078): n is a, c, t, g, unknown, or other
  misc_feature (2091)..(2091): n is a, c, t, g, unknown, or other
  misc_feature (2164)..(2164): n is a, c, t, g, unknown, or other
  misc_feature (2256)..(2256): n is a, c, t, g, unknown, or other
  misc_feature (2261)..(2261): n is a, c, t, g, unknown, or other
  misc_feature (2327)..(2327): n is a, c, t, g, unknown, or other
  misc_feature (2344)..(2344): n is a, c, t, g, unknown, or other
  misc_feature (2352)..(2352): n is a, c, t, g, unknown, or other
  misc_feature (2353)..(2353): n is a, c, t, g, unknown, or other
  misc_feature (2354)..(2354): n is a, c, t, g, unknown, or other
  misc_feature (2357)..(2357): n is a, c, t, g, unknown, or other
  misc_feature (2358)..(2358): n is a, c, t, g, unknown, or other
  misc_feature (2359)..(2359): n is a, c, t, g, unknown, or other
  misc_feature (2361)..(2361): n is a, c, t, g, unknown, or other
  misc_feature (2362)..(2362): n is a, c, t, g, unknown, or other
gttcggcattactccacttcactccctccctccctcacctctggctcatcagtgcctgcctcactaacctcaccattactgaaatgcagagctcgcataaataggcaggacccgtggtgctactctcctgtccccttccggccttttccccccttctggagcttggggggaggcactctgcaccttcgtcttcgtcttggcgtcctccagcgctctgccttcctgagctggcttcttgtccgcagatccatggcgaaggactacccagcttctccgaaagctcagcagctccaggaatccaagaagcagcgcctgacatacatcctcgtcgtaagcgcgctctgcatcgccttctacgtccttggcgcatggcagaacaccacgcttccaaagcccataggcaactcggcgatcacccgggttggctgcgatcccactgccgccacggcacagtcctctggctctgtgccgtcgtttgggccaggctccggcgaggtgcttgacttcgacgcacaccaccggctcaccatcaacaacacggacggcgatggggaactgcagcagttcccggcgtgccctctcaacttcagtgagtacacgccgtgtgaggaccgtaggcgcgggcgccggttcgaccgaaacatgctagtgtatcgggagcgccactgtcctggcaaggacgagcaggtccgatgcctcatcccagcaccgcctgggtacaggacccccttcaagtggcctcgtagcagggactacgcctatttcaacaacatcccccacaaggagctcagcattgagaaggcggtgcagaactggatccaggttgagggcgacaagttcaagttccccggtggtggcactatgttcccgcgtggtgctgatgcctacatagatgacatcaataagctcatctcgttatcagatgggaagatcaggacggctgttgacacaggttgcggggttgctagttggggagcttacttgctgaagagaaacatcatcgccatgtcatttgcgccgagagacacgcaccaagctcaggtgcaattcgcgctggaaagaggtgtccctgccatcattggcgtcatggcgaagcagcggttgccttacccatctagggcgttcgatatggcacattgctcgcgctgtctgattccttgggatgaacacgatggactgtaccttgctgaagtcgataggattctgaggccaggaggatactggatcctctcgggacctccgatcaattggaagacacaccacagggggtgggagaggacgaaggacgacctcaagcgggagcaggacaagatcgaggatgttgcgaggagcctttgctggaacaaggtggttgagaagggggatctgtccatctggcagaagcccaagaatcaccttgagtgtgccaacattaagaagacatataagacaccccatatctgcaagagtgacaatcctgatgctgcctggtacacacagatggaagcctgtgttactccactgcctgaagtgagcaaccagggagaagtggctgggggagcggtggagaaatggccagagagggcgttcttggttccccccaggatcaaaaggggcatgattccaggactggacgccaagaagtttgacgaggacaagaagctttgggagaagagggtggcctactacaagcgcaccataccaattgcagagaacaggtacagaaatgtgatggacatgaacgccaacatgggtgggttcgctgcttctctagtgaagtaccccgtgtgggtgatgaatgtcgtccctgttaactccgaccgggacaccctcggggcaatatacgagcgagggttcatcggcacgtaccaggactggtgcgaagctttctcgacgtatccaagaacatatgacctcctgcatgctgacaatctgtttagcatctaccaagacaggtgcgatataactggcatcctcttggagatggacagaatattaaggcccgagggcacagctatcatccgcgacacagtcgacgtgctcacgaaggtccaggcaataaccaagcggatgcggtgggagagccgcatcatggaccncgaggacggcccnttcaacccggagaaggtcctcatggcggtcaagacgtactggaccgccgaagccgaggaggagcactagcacncgagtgacaccgagctcacttgaaagcgtgaaccaagcctgttctacacttctactaccggtcgagagggatggcgtcagcgttttgcgtcncagtntagtatgtatgtcccttttcaccttttctctagttctttgtagctagctacaatcagatgggaagntaagggagagttttganacgggggnnnggnnngnntggttggtcctctagttgagatacaggaagcggttttgtagcaggggaaggtttcgctggtcttgcgtaggttcctggccctgtttcacgaggggttgaactaggttttagtttgtaatgcgatggcaccgggcaggcattgttaatcgtatattggggtgaccataatagtaacaggtatttatttagttttcatct

SEQ ID NO: 12896 - protein, 719 aa, Zea mays subsp. mays
  peptide (1)..(719): Ceres Seq. ID no. 12414505
  misc_feature (693)..(693): Xaa is any aa, unknown or other
  misc_feature (697)..(697): Xaa is any aa, unknown or other
VRHYSTSLPPSLTSGSSVPASLTSPLLKCRARINRQDPWCYSPVPFRPFPPFWSLGGGTLHLRLRLGVLQRSAFLSWLLVRRSMAKDYPASPKAQQLQESKKQRLTYILVVSALCIAFYVLGAWQNTTLPKPIGNSAITRVGCDPTAATAQSSGSVPSFGPGSGEVLDFDAHHRLTINNTDGDGELQQFPACPLNFSEYTPCEDRRRGRRFDRNMLVYRERHCPGKDEQVRCLIPAPPGYRTPFKWPRSRDYAYFNNIPHKELSIEKAVQNWIQVEGDKFKFPGGGTMFPRGADAYIDDINKLISLSDGKIRTAVDTGCGVASWGAYLLKRNIIAMSFAPRDTHQAQVQFALERGVPAIIGVMAKQRLPYPSRAFDMAHCSRCLIPWDEHDGLYLAEVDRILRPGGYWILSGPPINWKTHHRGWERTKDDLKREQDKIEDVARSLCWNKVVEKGDLSIWQKPKNHLECANIKKTYKTPHICKSDNPDAAWYTQMEACVTPLPEVSNQGEVAGGAVEKWPERAFLVPPRIKRGMIPGLDAKKFDEDKKLWEKRVAYYKRTIPIAENRYRNVMDMNANMGGFAASLVKYPVWVMNVVPVNSDRDTLGAIYERGFIGTYQDWCEAFSTYPRTYDLLHADNLFSIYQDRCDITGILLEMDRILRPEGTAIIRDTVDVLTKVQAITKRMRWESRIMDXEDGXFNPEKVLMAVKTYWTAEAEEEH

SEQ ID NO: 12897 - protein, 636 aa, Zea mays subsp. mays
  peptide (1)..(636): Ceres Seq. ID no. 12414506
  misc_feature (610)..(610): Xaa is any aa, unknown or other
  misc_feature (614)..(614): Xaa is any aa, unknown or other
MAKDYPASPKAQQLQESKKQRLTYILVVSALCIAFYVLGAWQNTTLPKPIGNSAITRVGCDPTAATAQSSGSVPSFGPGSGEVLDFDAHHRLTINNTDGDGELQQFPACPLNFSEYTPCEDRRRGRRFDRNMLVYRERHCPGKDEQVRCLIPAPPGYRTPFKWPRSRDYAYFNNIPHKELSIEKAVQNWIQVEGDKFKFPGGGTMFPRGADAYIDDINKLISLSDGKIRTAVDTGCGVASWGAYLLKRNIIAMSFAPRDTHQAQVQFALERGVPAIIGVMAKQRLPYPSRAFDMAHCSRCLIPWDEHDGLYLAEVDRILRPGGYWILSGPPINWKTHHRGWERTKDDLKREQDKIEDVARSLCWNKVVEKGDLSIWQKPKNHLECANIKKTYKTPHICKSDNPDAAWYTQMEACVTPLPEVSNQGEVAGGAVEKWPERAFLVPPRIKRGMIPGLDAKKFDEDKKLWEKRVAYYKRTIPIAENRYRNVMDMNANMGGFAASLVKYPVWVMNVVPVNSDRDTLGAIYERGFIGTYQDWCEAFSTYPRTYDLLHADNLFSIYQDRCDITGILLEMDRILRPEGTAIIRDTVDVLTKVQAITKRMRWESRIMDXEDGXFNPEKVLMAVKTYWTAEAEEEH

SEQ ID NO: 12898 - protein, 505 aa, Zea mays subsp. mays
  peptide (1)..(505): Ceres Seq. ID no. 12414507
  misc_feature (479)..(479): Xaa is any aa, unknown or other
  misc_feature (483)..(483): Xaa is any aa, unknown or other
MLVYRERHCPGKDEQVRCLIPAPPGYRTPFKWPRSRDYAYFNNIPHKELSIEKAVQNWIQVEGDKFKFPGGGTMFPRGADAYIDDINKLISLSDGKIRTAVDTGCGVASWGAYLLKRNIIAMSFAPRDTHQAQVQFALERGVPAIIGVMAKQRLPYPSRAFDMAHCSRCLIPWDEHDGLYLAEVDRILRPGGYWILSGPPINWKTHHRGWERTKDDLKREQDKIEDVARSLCWNKVVEKGDLSIWQKPKNHLECANIKKTYKTPHICKSDNPDAAWYTQMEACVTPLPEVSNQGEVAGGAVEKWPERAFLVPPRIKRGMIPGLDAKKFDEDKKLWEKRVAYYKRTIPIAENRYRNVMDMNANMGGFAASLVKYPVWVMNVVPVNSDRDTLGAIYERGFIGTYQDWCEAFSTYPRTYDLLHADNLFSIYQDRCDITGILLEMDRILRPEGTAIIRDTVDVLTKVQAITKRMRWESRIMDXEDGXFNPEKVLMAVKTYWTAEAEEEH

SEQ ID NO: 12899 - DNA, 1668 bp, Zea mays subsp. mays
  misc_feature (1)..(1668): Ceres Seq. ID no. 12355794
  misc_feature (1)..(1668): Ortholog of  Ceres SEQ ID NO 13597796 as cited in SEQ ID NO 64283
  misc_feature (1)..(1668): Ortholog of  Ceres SEQ ID NO 14303249 as cited in SEQ ID NO 0
  misc_feature (1)..(1668): Ortholog of  Ceres SEQ ID NO 14309629 as cited in SEQ ID NO 0
atttatgaaacggaccattgaatgtgctcaagtcttctttcctccagaatcccccatctgagcaagggcgccgccgccgtcggctagcgccgcagcattgacgtggacgccgaccctctccggcagccgcttgcagcgcgtcccttccccgctcccgcggcatggactgcgcaaagaggagggcggtggcggacctccacgacgagctgatggtggagatcttctcgcgcgtgcccgtcaaagacctccgccgttgcacgtgcgtgtgcaaatcttggtgcaacatcatcaccgaccccctcaacggcaagaagctgccccagaccctggaaggcttcttccaaggcgtcgtcggagggcctcacaactacggccaattcaccagcctgtcggggagcggagaacgcgtgcctccggtcgacccttccttctccttcatcacggcaatgctgcctggcgtggagcattggtcctcttggattcttgcaacgggctcctgctctttgggtgcacccgggaggacaagttcgggtacatcgtgacaaaccctgcgactgaggaattgatgactgtgcccaccagctcctgctcttgtcctcctccaccttcggttggtggggaaagatatgcgcacacctttctgatgtttaaccctgctgtctcctcgcacttccacttggtccagatctgggaggataatgcggtgaaggaggtggaaacggtacactcttactcgtctgaaaccaaggcatggagtgacaggtcaagcaagtgggggcgaggtgaagagggcggtgaatggaagctgtggggtgaatccgtgattggattgacgcgtggctgggctttggtcgatggtctgctgcattttcttgtcttcgatcttcagaaacaagagaatgtgataattgcagtggatggggaagggaaaacttgtaggatcatcggctggcatggtaaggatgtgagaacaattgcttttattggtcaatcccaaaaccatctacactgcatcggtgtgaatttgcaattacatcaaggctcccaagtgcgcttcacgcaaatgtcgatctgggttcttgaggactatgatacagaagcatggatcctaaagcacaatgtgagctcttcgcagttctttgaattactgagtcacccaatcaaagacttccatattgtggccattcatccagatcacaattcgttcatccttgttcagcactggaaccagaaactggtatcatataacatggatactcaggaactgcatggtctctgcactcttggaaagggctatgtgattattaccccatatgttccctgtttcttggagtcatcggttcttgccaccaaacactgaggttgttgtttctggggacttctctgcatgttcaacaagagcctgatcatccaagtgtggggcaaggtgatctagtctgatggtgctttaatgtccttttgtaatgctttgagaaagctgtttacaggacaacatggttagttctatgatatatcagtgagaaagctgtttacaggacagtattgttagttctatgatatatcaaattagatcacacttaattgctggccaatataggtattagcttcggttttttgttgtgattattcaatattgaatgcgcacctgcgcacctatggtattgcccg

SEQ ID NO: 12900 - protein, 264 aa, Zea mays subsp. mays
  peptide (1)..(264): Ceres Seq. ID no. 12355795
MTVPTSSCSCPPPPSVGGERYAHTFLMFNPAVSSHFHLVQIWEDNAVKEVETVHSYSSETKAWSDRSSKWGRGEEGGEWKLWGESVIGLTRGWALVDGLLHFLVFDLQKQENVIIAVDGEGKTCRIIGWHGKDVRTIAFIGQSQNHLHCIGVNLQLHQGSQVRFTQMSIWVLEDYDTEAWILKHNVSSSQFFELLSHPIKDFHIVAIHPDHNSFILVQHWNQKLVSYNMDTQELHGLCTLGKGYVIITPYVPCFLESSVLATKH

SEQ ID NO: 12901 - protein, 238 aa, Zea mays subsp. mays
  peptide (1)..(238): Ceres Seq. ID no. 12355796
MFNPAVSSHFHLVQIWEDNAVKEVETVHSYSSETKAWSDRSSKWGRGEEGGEWKLWGESVIGLTRGWALVDGLLHFLVFDLQKQENVIIAVDGEGKTCRIIGWHGKDVRTIAFIGQSQNHLHCIGVNLQLHQGSQVRFTQMSIWVLEDYDTEAWILKHNVSSSQFFELLSHPIKDFHIVAIHPDHNSFILVQHWNQKLVSYNMDTQELHGLCTLGKGYVIITPYVPCFLESSVLATKH

SEQ ID NO: 12902 - DNA, 1621 bp, Zea mays subsp. mays
  misc_feature (1)..(1621): Ceres Seq. ID no. 12374562
  misc_feature (1)..(1621): Ortholog of  Ceres SEQ ID NO 12608620 as cited in SEQ ID NO 60192
  misc_feature (1)..(1621): Ortholog of  Ceres SEQ ID NO 13662898 as cited in SEQ ID NO 66199
  misc_feature (1)..(1621): Ortholog of  Ceres SEQ ID NO 14313358 as cited in SEQ ID NO 67347
acacacaaacacatcagcattcagcaatagctaatcgagcatcgtcgccttagctcctctcctctcctcttctctccgtcgtcgtggaacttctctccgccggctgccatataaaggaggaagaagagaacagcaacgctagctagccggccggcctccgtcgtcgccggcgtcgtcgactagctagctaactctcgatctccagttcctgcccccgccccacgcccggccgtcgtcgatcgtcagcaatataatggcaggaggcctcttctccatggctcacccggccgtcaccctctccggcatcgcaggaaacatcatctccttcctggtgttccttgcaccagtggcgacgttcctgcaggtgtaccggaagaagtcgacgggcgggttcagctcggtgccgtacgtggtggcgctcttcagctcggtgctgtggatcttctacgcgctggtgaagaccaactcgaggccgctgctgaccatcaacgccttcggctgcggcgtggaggcggcctacatagtcctctacctggcgtacgcgccgcggcgggcgcgcctgcggactctggcctacttcttcctgctggacgtggcggccttcgcgctcgtcgtcgccgtcacgctcttcgccgtccgcgagccccaccgcgtcaagttcctcggcagcgtctgcctcgccttctccatggccgtcttcgtcgcgccgctcagcatcatcgtcaaggtggtcaagaccaagagcgtcgagttcctgcccatcagcctctccttctgcctcacgctcagcgccgtcgcctggttctgctacggcctcttcaccaaggacccctttgtcatgtaccccaacgtcggcggcttcttcttcagctgcgtccagatgggcctctacttctggtaccgcaagccccgcccggcggccaagaacaacgccgtgctgccgacgaccacggacggcggcaacgcggtgcaggtgcaggggcaggtcatcgagctggcgcccaacacggtggccatcctgtcggtgagccccatccccatcgtgggcgtgcacaagatcgaggtggtggagcagcagcacaaggaggccgccgtggccgccgagacccgccggatggccgccgcaaacccggacggcgccatgccggaggtcatcgagatcgtccccgccgccgccgcggtgtgacccaacgccaatcaccatgcaccgtacacaccctgctagcttcttattagctagctcggatgacgtacgacagtttggtggcaagtggctggcagctcaagcatgcagatgcaggcatcgtcgtctgctatagttggtcgtttagttggttaattgttggattattattgcgtatctctctcgtgtgcgtcgtagccttgtctcagttcagttcagtgtcgaatcaagtagtagtagctgttgtttgcattggatctgacaatgcatgcatgctaataattatggtggtgtgatggtcttggtcgatctggtgtatgtaatgtacgtacgcgcgcggtacgtacgtagtcgtctacgtacgccgtgtcaacgtcgtagatctctacgggaagatgataagactgtaacatgcagggcatgcatctatttatactt

SEQ ID NO: 12903 - protein, 310 aa, Zea mays subsp. mays
  peptide (1)..(310): Ceres Seq. ID no. 12374563
MAGGLFSMAHPAVTLSGIAGNIISFLVFLAPVATFLQVYRKKSTGGFSSVPYVVALFSSVLWIFYALVKTNSRPLLTINAFGCGVEAAYIVLYLAYAPRRARLRTLAYFFLLDVAAFALVVAVTLFAVREPHRVKFLGSVCLAFSMAVFVAPLSIIVKVVKTKSVEFLPISLSFCLTLSAVAWFCYGLFTKDPFVMYPNVGGFFFSCVQMGLYFWYRKPRPAAKNNAVLPTTTDGGNAVQVQGQVIELAPNTVAILSVSPIPIVGVHKIEVVEQQHKEAAVAAETRRMAAANPDGAMPEVIEIVPAAAAV

SEQ ID NO: 12904 - protein, 303 aa, Zea mays subsp. mays
  peptide (1)..(303): Ceres Seq. ID no. 12374564
MAHPAVTLSGIAGNIISFLVFLAPVATFLQVYRKKSTGGFSSVPYVVALFSSVLWIFYALVKTNSRPLLTINAFGCGVEAAYIVLYLAYAPRRARLRTLAYFFLLDVAAFALVVAVTLFAVREPHRVKFLGSVCLAFSMAVFVAPLSIIVKVVKTKSVEFLPISLSFCLTLSAVAWFCYGLFTKDPFVMYPNVGGFFFSCVQMGLYFWYRKPRPAAKNNAVLPTTTDGGNAVQVQGQVIELAPNTVAILSVSPIPIVGVHKIEVVEQQHKEAAVAAETRRMAAANPDGAMPEVIEIVPAAAAV

SEQ ID NO: 12905 - protein, 165 aa, Zea mays subsp. mays
  peptide (1)..(165): Ceres Seq. ID no. 12374565
MAVFVAPLSIIVKVVKTKSVEFLPISLSFCLTLSAVAWFCYGLFTKDPFVMYPNVGGFFFSCVQMGLYFWYRKPRPAAKNNAVLPTTTDGGNAVQVQGQVIELAPNTVAILSVSPIPIVGVHKIEVVEQQHKEAAVAAETRRMAAANPDGAMPEVIEIVPAAAAV

SEQ ID NO: 12906 - DNA, 1091 bp, Zea mays subsp. mays
  misc_feature (1)..(1091): Ceres Seq. ID no. 12365120
  misc_feature (1)..(1091): Ortholog of  Ceres SEQ ID NO 13595900 as cited in SEQ ID NO 69289
atgattatggatatgctggggcctagtttgtgggattcatggaattcattaggccaatccatgccatcggaaatggtggcttgcattgccatggagtccatttccatcttggaaagcatgcattctaaaggatatgtgcatggagacgtcaaacctgagaactttcttctggggcagccttcaacgcctcatgaaaagaaactttatcttgtggatcttggattagcaacaaagtggagagatactgctaatgggcagcatgttagttatgatcaacgtcctgatgcctttagaggaacagtcagatatgctagtgtccatgcacatttaggaagaaccgctagcaggagagatgatttggagtcacttgcctatacactagtattccttcaccggggcaggttgccatggcagggatatcagggtgataataaatcatttttggtgtgcaagagaaagatgagtacctcacctgaggccctctgcggcatatgtcctcaacctttcaaggagtttcttgaggccgttgtcaacatgaagtttgatgaagagccaaactattccaagttgatttcattgtttgacagtttaattggaccaatcccttccattagaccaatcaatactgatggagcccaaaaggtagggcagaagcgtgccaggttgcttaatgatgacgacgaccatgtaaaaaagaagattcggctgggtgctcctgcaacacagtggatttcagtatacaattcaaggcaacctatgaagcagaggtaccactataatgtggctgatgcaaggttagcgcaacatgtggagaaaggaaatgaggatggtttgttgataagttcaatatcatcatgcgcaaatctttgggcaatcattatggatgcaggaactggcttctcagctcaagtttatgagctatcttcacactttcttcataaggagtggatcatggaacaatgggataaaagtttctacatcagttctgttgctggctccaacaatggaagttctattgtagtgatgtcaaaaggcacaccatatacacagcaatcttataaagtcagtgattcctttccatttaagtggat

SEQ ID NO: 12907 - protein, 363 aa, Zea mays subsp. mays
  peptide (1)..(363): Ceres Seq. ID no. 12365121
MIMDMLGPSLWDSWNSLGQSMPSEMVACIAMESISILESMHSKGYVHGDVKPENFLLGQPSTPHEKKLYLVDLGLATKWRDTANGQHVSYDQRPDAFRGTVRYASVHAHLGRTASRRDDLESLAYTLVFLHRGRLPWQGYQGDNKSFLVCKRKMSTSPEALCGICPQPFKEFLEAVVNMKFDEEPNYSKLISLFDSLIGPIPSIRPINTDGAQKVGQKRARLLNDDDDHVKKKIRLGAPATQWISVYNSRQPMKQRYHYNVADARLAQHVEKGNEDGLLISSISSCANLWAIIMDAGTGFSAQVYELSSHFLHKEWIMEQWDKSFYISSVAGSNNGSSIVVMSKGTPYTQQSYKVSDSFPFKW

SEQ ID NO: 12908 - protein, 361 aa, Zea mays subsp. mays
  peptide (1)..(361): Ceres Seq. ID no. 12365122
MDMLGPSLWDSWNSLGQSMPSEMVACIAMESISILESMHSKGYVHGDVKPENFLLGQPSTPHEKKLYLVDLGLATKWRDTANGQHVSYDQRPDAFRGTVRYASVHAHLGRTASRRDDLESLAYTLVFLHRGRLPWQGYQGDNKSFLVCKRKMSTSPEALCGICPQPFKEFLEAVVNMKFDEEPNYSKLISLFDSLIGPIPSIRPINTDGAQKVGQKRARLLNDDDDHVKKKIRLGAPATQWISVYNSRQPMKQRYHYNVADARLAQHVEKGNEDGLLISSISSCANLWAIIMDAGTGFSAQVYELSSHFLHKEWIMEQWDKSFYISSVAGSNNGSSIVVMSKGTPYTQQSYKVSDSFPFKW

SEQ ID NO: 12909 - protein, 359 aa, Zea mays subsp. mays
  peptide (1)..(359): Ceres Seq. ID no. 12365123
MLGPSLWDSWNSLGQSMPSEMVACIAMESISILESMHSKGYVHGDVKPENFLLGQPSTPHEKKLYLVDLGLATKWRDTANGQHVSYDQRPDAFRGTVRYASVHAHLGRTASRRDDLESLAYTLVFLHRGRLPWQGYQGDNKSFLVCKRKMSTSPEALCGICPQPFKEFLEAVVNMKFDEEPNYSKLISLFDSLIGPIPSIRPINTDGAQKVGQKRARLLNDDDDHVKKKIRLGAPATQWISVYNSRQPMKQRYHYNVADARLAQHVEKGNEDGLLISSISSCANLWAIIMDAGTGFSAQVYELSSHFLHKEWIMEQWDKSFYISSVAGSNNGSSIVVMSKGTPYTQQSYKVSDSFPFKW

SEQ ID NO: 12910 - DNA, 1705 bp, Zea mays subsp. mays
  misc_feature (1)..(1705): Ceres Seq. ID no. 12374558
  misc_feature (1)..(1705): Ortholog of  Ceres SEQ ID NO 14304359 as cited in SEQ ID NO 52581
gtacggttaaagttgtggcaggaggagtgggggcgcgggagagatgataaggatggcggcagcgtctcagccgccatcgtcagccttgcggatgcacgggtgcggcggcgcggcttctgcgtcgtccgcgcccgtgcgcctcttcacggagtcgcggggtagagtcgtggcgtcgattgggaggggcaggaggcggaggcgcgccatctcgtgctgctcgtctccagacgcagatggccctcgccccgccgcgccaccgacctccgcagcgccttccgacgggtcgatacagctctattcccagatcgagagggtaatcacggaggcggcaaagcagtcccgggaaggctggggttcgactggagattggaccgaagtcgagggatcatgggtgttgagaccgaagtccttggagccatcatttgttgtccactttgttggaggaatttttgttggagccgctccccagatcacataccgcttcttcctcgagtgtctcgcgaacaggggagctttggtgattgctacgccttatgcgagcggctttgaccatttcttcattgcagatgaagttcaatttaagtttgacaggtgtttgagaaacttggatgagcctgtaaatgatctcccaacgtttggtgttggacattcattgggatctgttatccacatgttgattggatcaagatatgctgtgcagcgaagtggaaatgtactgatgtcctttaacaacaaggaggcaagctctgcgatcccactattttcacctgtaattgttcctatgtcacagagttttggccctatattctcccaattggcatcgtatccaacaatccggtttggggcagaagcagctattaagcagcttgagaatctaagcccacctgttgttaagcaacttctacctttacttcaacaacttcctccgttgtatatggacctaataaaagggcgggaggacttcattccaaaaccagaagagacacgccgcctgataaaatcctactatggaatttctcggaatctcttaataaagtttaaagatgatcaaattgatgaaacctctacccttgcacaagtactaagctctgaagcagctattagctcattgcttgatatgtcaattcgatcacttcctggggatcatgggttaccattacaacaggttcttcctgatgttccaccagcaatggctgatgcagtgaaccgcggaggtgaacttctgacaaatctgacaacaggcacaccatgggaggctgttgctaaggaggttggcaccactttgggtactgactcaggcattctacgagcacagatctcaaaagacgttgaaactcttgttgatgtaattgcttcatggacatcttcaaattctggtccaagactacttcgcccatgatcacccagctgtctgcgtacagaaatgttagtaacagtgaagagcaacatgatttaatgatgcattgtgagtaacaaaaagttagattgcacttcagtgcggctgtcttagtattttagatccatactatagttcagaaaaaagtgaagatatgtatttatatggtgtatttttgaaccaagatattttgatagaaggaaactttataaggaatagaaatagaatgatagattctggatacggtaaagctgctaagctgtatgaaaggagtcttggcaattcaataattggcaattcagcatttcg

SEQ ID NO: 12911 - protein, 451 aa, Zea mays subsp. mays
  peptide (1)..(451): Ceres Seq. ID no. 12374559
MIRMAAASQPPSSALRMHGCGGAASASSAPVRLFTESRGRVVASIGRGRRRRRAISCCSSPDADGPRPAAPPTSAAPSDGSIQLYSQIERVITEAAKQSREGWGSTGDWTEVEGSWVLRPKSLEPSFVVHFVGGIFVGAAPQITYRFFLECLANRGALVIATPYASGFDHFFIADEVQFKFDRCLRNLDEPVNDLPTFGVGHSLGSVIHMLIGSRYAVQRSGNVLMSFNNKEASSAIPLFSPVIVPMSQSFGPIFSQLASYPTIRFGAEAAIKQLENLSPPVVKQLLPLLQQLPPLYMDLIKGREDFIPKPEETRRLIKSYYGISRNLLIKFKDDQIDETSTLAQVLSSEAAISSLLDMSIRSLPGDHGLPLQQVLPDVPPAMADAVNRGGELLTNLTTGTPWEAVAKEVGTTLGTDSGILRAQISKDVETLVDVIASWTSSNSGPRLLRP

SEQ ID NO: 12912 - protein, 448 aa, Zea mays subsp. mays
  peptide (1)..(448): Ceres Seq. ID no. 12374560
MAAASQPPSSALRMHGCGGAASASSAPVRLFTESRGRVVASIGRGRRRRRAISCCSSPDADGPRPAAPPTSAAPSDGSIQLYSQIERVITEAAKQSREGWGSTGDWTEVEGSWVLRPKSLEPSFVVHFVGGIFVGAAPQITYRFFLECLANRGALVIATPYASGFDHFFIADEVQFKFDRCLRNLDEPVNDLPTFGVGHSLGSVIHMLIGSRYAVQRSGNVLMSFNNKEASSAIPLFSPVIVPMSQSFGPIFSQLASYPTIRFGAEAAIKQLENLSPPVVKQLLPLLQQLPPLYMDLIKGREDFIPKPEETRRLIKSYYGISRNLLIKFKDDQIDETSTLAQVLSSEAAISSLLDMSIRSLPGDHGLPLQQVLPDVPPAMADAVNRGGELLTNLTTGTPWEAVAKEVGTTLGTDSGILRAQISKDVETLVDVIASWTSSNSGPRLLRP

SEQ ID NO: 12913 - protein, 435 aa, Zea mays subsp. mays
  peptide (1)..(435): Ceres Seq. ID no. 12374561
MHGCGGAASASSAPVRLFTESRGRVVASIGRGRRRRRAISCCSSPDADGPRPAAPPTSAAPSDGSIQLYSQIERVITEAAKQSREGWGSTGDWTEVEGSWVLRPKSLEPSFVVHFVGGIFVGAAPQITYRFFLECLANRGALVIATPYASGFDHFFIADEVQFKFDRCLRNLDEPVNDLPTFGVGHSLGSVIHMLIGSRYAVQRSGNVLMSFNNKEASSAIPLFSPVIVPMSQSFGPIFSQLASYPTIRFGAEAAIKQLENLSPPVVKQLLPLLQQLPPLYMDLIKGREDFIPKPEETRRLIKSYYGISRNLLIKFKDDQIDETSTLAQVLSSEAAISSLLDMSIRSLPGDHGLPLQQVLPDVPPAMADAVNRGGELLTNLTTGTPWEAVAKEVGTTLGTDSGILRAQISKDVETLVDVIASWTSSNSGPRLLRP

SEQ ID NO: 12914 - DNA, 902 bp, Zea mays subsp. mays
  misc_feature (1)..(902): Ceres Seq. ID no. 12414821
  misc_feature (1)..(902): Ortholog of  Ceres SEQ ID NO 15168573 as cited in SEQ ID NO 57822
  misc_feature (1)..(902): Ortholog of  Ceres SEQ ID NO 12592883 as cited in SEQ ID NO 67862
agacacggaggtacaggagcgagggggaaagtgggatggtagtgggggcatcatcggtgtccggcgccgcggcttccggaggtacctctggtacggctccgccgcggaaggggaagtcgtgcaagggctgcctttactactcgtcagtgctcaagtcccgcggctacaacccaatctgcgttgggatcccccgttccatcccccaagttcctaactacgtggtggatgagcctaaggaggacgcgacagcgcaggggcatgatctcaggcggttcaggtacgggtgcgcgggttactccatattcgtgaacagggacggccaaggtggtgagggcgagggcaagacgttgttgccgtattgcaggggcctcgagttattggtggacagcagattggtcgagagaaaaccatccgcagctgaacaagctccagcacatgttacaaaggatgcagctaccacccgctctcaccaacaaggacaacagagacctgcgaacttgtcgaggcaggaattcttggagaggtttaagaagagtgctggactggtcgcttcaggggtcgcgaagaatctaaacaaaacggccaattatatcaaggaaaatattcatgacatattgtaccacgatcgtcgcccaccaaagtagtagccatgccgacttgctgagtcccagaacgaagcacagcagccccagctccgtcactgattatgcaaatggagccttccaggattccaacttcactcgctttacttgcataatcttgtaatttagggctgcatatgtacatgcaatttaacttgctgcttgtttgaagcggaaaatcagatttcgtttggtgtaatcggaagacgatgatattggttgaattttgactgaaaattcgagaaacagcatttctcgatg

SEQ ID NO: 12915 - protein, 213 aa, Zea mays subsp. mays
  peptide (1)..(213): Ceres Seq. ID no. 12414822
TRRYRSEGESGMVVGASSVSGAAASGGTSGTAPPRKGKSCKGCLYYSSVLKSRGYNPICVGIPRSIPQVPNYVVDEPKEDATAQGHDLRRFRYGCAGYSIFVNRDGQGGEGEGKTLLPYCRGLELLVDSRLVERKPSAAEQAPAHVTKDAATTRSHQQGQQRPANLSRQEFLERFKKSAGLVASGVAKNLNKTANYIKENIHDILYHDRRPPK

SEQ ID NO: 12916 - protein, 202 aa, Zea mays subsp. mays
  peptide (1)..(202): Ceres Seq. ID no. 12414823
MVVGASSVSGAAASGGTSGTAPPRKGKSCKGCLYYSSVLKSRGYNPICVGIPRSIPQVPNYVVDEPKEDATAQGHDLRRFRYGCAGYSIFVNRDGQGGEGEGKTLLPYCRGLELLVDSRLVERKPSAAEQAPAHVTKDAATTRSHQQGQQRPANLSRQEFLERFKKSAGLVASGVAKNLNKTANYIKENIHDILYHDRRPPK

SEQ ID NO: 12917 - DNA, 2305 bp, Zea mays subsp. mays
  misc_feature (1)..(2305): Ceres Seq. ID no. 12374507
  misc_feature (1)..(2305): Ortholog of  Ceres SEQ ID NO 13596857 as cited in SEQ ID NO 62924
acacgacatctcgtgtctctgttgggagcttcttcaacatctcgtctctctcatcctccgacgccatccgctcccgccccggccgagccgcgcgttgtgtatggattccaaaagcaatcatacaggggctatggcgaggccttacaaacctaagaatatcctcattacaggagctgctggttttatcgcctcccatgtcgcaatccgcattaccaagaagtaccccgattacaagattatcgtccttgacaaacttgactactgctctaatctgaagaacctgcttcctgtgagctcatcaccaaacttcaagtttgtgaagggtgatattgcaagtgttgatcttgtcaacttccttcttgtcacagagaacattgataccataatgcacttcgcggcccagacacatgtcgacaattcatttgggaattctttcgaatttaccaagaacaatatttatggtacacatgtacttcttgaggcctgcaggattagtggccagatcaagaggttcatccatgtcagcactgatgaggtctatggggagactgacgaggatgcagttgttggcaaccatgaagcatcacagctgcttcctacaaacccatatgcagccaccaaagcgggagcggagatgcttgtaatggcatatgggagatcctatggactgccagttatcactactcggggaaacaatgtctatggcccaaatcagttccctgagaagcttatcccaaagttcattctcttggccatgagaggggagcccctccctatccatggtgatggagtcaatgttcgtagctacctctattgtgaggatgttgcggaggcatttgaggtcattcttcatcatggagaagttggacatgtttataatattggaacaaaaagggagaggacagtgcttgatgtggcaaaagatgtttgcagactcttcaatcttgaacctgacaaagtcatcatgtttgtcgagaacagacctttcaatgaccagaggtatttcttggacgatgagaagctcaagagccttggatgggctgagcgcaccccatgggaagaaggcttaaaaaaggcaatggagtggtatgtagcaaaatctgattattggggtgatgtttctggggccttactgcctcatccaaggacattgatgatgccagggtgcgagggctcagaggagattaaaggaatactcagccggtttaataacattcaaacaaaggtcggttcaacatcagataatgctccagaaccgcatgccttcaagttcttgatatatggcaggacaggatggatcggcggacttcttgggaaaatatgtgagaagaaaggaattccgtatgaatatggaaatggccgcttgcaagagcgttcttcactagtcctagacatccaaactattaagccaacacatgtcttcaatgccgctggtgtgactggaaggcccaatgttgactggtgtgaatcgcacaagccggacaccatccgtaccaatgttgtgggcaccttgaatctagcagatgtatgtaggaagcatggcttattgatgatgaactatgccactgggtgcatatttgaatacgatgcacatcatcctgaagggtcaggtatcggcttcaaagaggaagatacaccaaattttactggttcgttctactcgaagacgaaggcaatggtcgaggaattattgaaggagtatgagaacgtctgcactctgcgagttcggatgccgatatcctctgacctcagcaacccgcggaacttcgtgacaaagatcagccgttacaacaaggtggtgaacatccccaacagcatgacgatattggacgaactcctgcccatctcagtggagatggcgaagaggaacctgcggggcatctataacttcaccaaccccggcgtcgtcagccacaacgagatcctagagatgtacaagcagtacatcgaccctagcttcaagtggacaaacttcaccctcgaggagcaggcgaaggtcatcgttgctccgcgaagcaacaacgagatggacgcaaccaagctgaagaacgagttccccgagctgctgtcgatcaaggactctttgatcaagtacgtctttgagcccaacagaaaggtgcccacagactgaagtccgaagggctggcacagctgataccgtacaacacagcaaccattagtgttagactatgtgtgtgggccagcactactttacttttgggctgtcggtctattagggttagagtcctgtgagtctatatattgtacctcatctcttatacaatacatttttgggctgcgagcc

SEQ ID NO: 12918 - protein, 709 aa, Zea mays subsp. mays
  peptide (1)..(709): Ceres Seq. ID no. 12374508
HDISCLCWELLQHLVSLILRRHPLPPRPSRALCMDSKSNHTGAMARPYKPKNILITGAAGFIASHVAIRITKKYPDYKIIVLDKLDYCSNLKNLLPVSSSPNFKFVKGDIASVDLVNFLLVTENIDTIMHFAAQTHVDNSFGNSFEFTKNNIYGTHVLLEACRISGQIKRFIHVSTDEVYGETDEDAVVGNHEASQLLPTNPYAATKAGAEMLVMAYGRSYGLPVITTRGNNVYGPNQFPEKLIPKFILLAMRGEPLPIHGDGVNVRSYLYCEDVAEAFEVILHHGEVGHVYNIGTKRERTVLDVAKDVCRLFNLEPDKVIMFVENRPFNDQRYFLDDEKLKSLGWAERTPWEEGLKKAMEWYVAKSDYWGDVSGALLPHPRTLMMPGCEGSEEIKGILSRFNNIQTKVGSTSDNAPEPHAFKFLIYGRTGWIGGLLGKICEKKGIPYEYGNGRLQERSSLVLDIQTIKPTHVFNAAGVTGRPNVDWCESHKPDTIRTNVVGTLNLADVCRKHGLLMMNYATGCIFEYDAHHPEGSGIGFKEEDTPNFTGSFYSKTKAMVEELLKEYENVCTLRVRMPISSDLSNPRNFVTKISRYNKVVNIPNSMTILDELLPISVEMAKRNLRGIYNFTNPGVVSHNEILEMYKQYIDPSFKWTNFTLEEQAKVIVAPRSNNEMDATKLKNEFPELLSIKDSLIKYVFEPNRKVPTD

SEQ ID NO: 12919 - protein, 676 aa, Zea mays subsp. mays
  peptide (1)..(676): Ceres Seq. ID no. 12374509
MDSKSNHTGAMARPYKPKNILITGAAGFIASHVAIRITKKYPDYKIIVLDKLDYCSNLKNLLPVSSSPNFKFVKGDIASVDLVNFLLVTENIDTIMHFAAQTHVDNSFGNSFEFTKNNIYGTHVLLEACRISGQIKRFIHVSTDEVYGETDEDAVVGNHEASQLLPTNPYAATKAGAEMLVMAYGRSYGLPVITTRGNNVYGPNQFPEKLIPKFILLAMRGEPLPIHGDGVNVRSYLYCEDVAEAFEVILHHGEVGHVYNIGTKRERTVLDVAKDVCRLFNLEPDKVIMFVENRPFNDQRYFLDDEKLKSLGWAERTPWEEGLKKAMEWYVAKSDYWGDVSGALLPHPRTLMMPGCEGSEEIKGILSRFNNIQTKVGSTSDNAPEPHAFKFLIYGRTGWIGGLLGKICEKKGIPYEYGNGRLQERSSLVLDIQTIKPTHVFNAAGVTGRPNVDWCESHKPDTIRTNVVGTLNLADVCRKHGLLMMNYATGCIFEYDAHHPEGSGIGFKEEDTPNFTGSFYSKTKAMVEELLKEYENVCTLRVRMPISSDLSNPRNFVTKISRYNKVVNIPNSMTILDELLPISVEMAKRNLRGIYNFTNPGVVSHNEILEMYKQYIDPSFKWTNFTLEEQAKVIVAPRSNNEMDATKLKNEFPELLSIKDSLIKYVFEPNRKVPTD

SEQ ID NO: 12920 - protein, 666 aa, Zea mays subsp. mays
  peptide (1)..(666): Ceres Seq. ID no. 12374510
MARPYKPKNILITGAAGFIASHVAIRITKKYPDYKIIVLDKLDYCSNLKNLLPVSSSPNFKFVKGDIASVDLVNFLLVTENIDTIMHFAAQTHVDNSFGNSFEFTKNNIYGTHVLLEACRISGQIKRFIHVSTDEVYGETDEDAVVGNHEASQLLPTNPYAATKAGAEMLVMAYGRSYGLPVITTRGNNVYGPNQFPEKLIPKFILLAMRGEPLPIHGDGVNVRSYLYCEDVAEAFEVILHHGEVGHVYNIGTKRERTVLDVAKDVCRLFNLEPDKVIMFVENRPFNDQRYFLDDEKLKSLGWAERTPWEEGLKKAMEWYVAKSDYWGDVSGALLPHPRTLMMPGCEGSEEIKGILSRFNNIQTKVGSTSDNAPEPHAFKFLIYGRTGWIGGLLGKICEKKGIPYEYGNGRLQERSSLVLDIQTIKPTHVFNAAGVTGRPNVDWCESHKPDTIRTNVVGTLNLADVCRKHGLLMMNYATGCIFEYDAHHPEGSGIGFKEEDTPNFTGSFYSKTKAMVEELLKEYENVCTLRVRMPISSDLSNPRNFVTKISRYNKVVNIPNSMTILDELLPISVEMAKRNLRGIYNFTNPGVVSHNEILEMYKQYIDPSFKWTNFTLEEQAKVIVAPRSNNEMDATKLKNEFPELLSIKDSLIKYVFEPNRKVPTD

SEQ ID NO: 12921 - DNA, 812 bp, Zea mays subsp. mays
  misc_feature (1)..(812): Ceres Seq. ID no. 13499119
  misc_feature (1)..(812): Ortholog of  Ceres SEQ ID NO 12610243 as cited in SEQ ID NO 56206
  misc_feature (1)..(812): Ortholog of  Ceres SEQ ID NO 13661089 as cited in SEQ ID NO 61053
  misc_feature (1)..(812): Ortholog of  Ceres SEQ ID NO 15173496 as cited in SEQ ID NO 68918
ccagcctcgccgccccaccaccccagcattgccttaccttgccttgccttgccctgccctccattccacctccacctcgccgcccaaatccccccacccaacaatcccccatggggtcgcaggccatcgaggcgcaccgcgcgggcgcggaggtgtaccgcggcgcggcgctgtgcgcggagaagtcgacggagctgctggcagaggcgcacctcccgctgggcctgctgccgctggccgacatggaggaggtcggctacaaccgcgccacgggcttcgtgtggctgcgccagaggaagtcgctcacgcacacgttccgcccgatcgcgcgccaggtctcgtacgccgccgaggtcaccgccttcgtggaggaccggcggatgaggcgcatgaccggggtcaagaccaaggagctcctcatctgggtcaccctctccgacatgttcgtcgacagggacgacccctccaagatcaccttcaagacgcccaccgggctcggcaggacctaccccgtctccgccttcgctaaggaaggcgccggtgacgacggcgcggcggccaagcacaaggatgatgcccccgccccgaccgccgccggtaaggctgctgccagcaagtgaggtgcgcggcgtccggagctttttaccttgccgtagtcgccatacttgcctccccaataatggcgtttgtaccccctctacctgcttcaaattagtgtgttttatgaatggaaacgaccatccaactttccatccgtccttgcaatgtgtcacggcgggatgtttttactacacatcagctttaccagttcc

SEQ ID NO: 12922 - protein, 205 aa, Zea mays subsp. mays
  peptide (1)..(205): Ceres Seq. ID no. 13499120
SLAAPPPQHCLTLPCLALPSIPPPPRRPNPPTQQSPMGSQAIEAHRAGAEVYRGAALCAEKSTELLAEAHLPLGLLPLADMEEVGYNRATGFVWLRQRKSLTHTFRPIARQVSYAAEVTAFVEDRRMRRMTGVKTKELLIWVTLSDMFVDRDDPSKITFKTPTGLGRTYPVSAFAKEGAGDDGAAAKHKDDAPAPTAAGKAAASK

SEQ ID NO: 12923 - protein, 175 aa, Zea mays subsp. mays
  peptide (1)..(175): Ceres Seq. ID no. 13499121
QPRRPTTPALPYLALPCPALHSTSTSPPKSPHPTIPHGVAGHRGAPRGRGGVPRRGAVRGEVDGAAGRGAPPAGPAAAGRHGGGRLQPRHGLRVAAPEEVAHAHVPPDRAPGLVRRRGHRLRGGPADEAHDRGQDQGAPHLGHPLRHVRRQGRPLQDHLQDAHRARQDLPRLRLR

SEQ ID NO: 12924 - protein, 169 aa, Zea mays subsp. mays
  peptide (1)..(169): Ceres Seq. ID no. 13499122
MGSQAIEAHRAGAEVYRGAALCAEKSTELLAEAHLPLGLLPLADMEEVGYNRATGFVWLRQRKSLTHTFRPIARQVSYAAEVTAFVEDRRMRRMTGVKTKELLIWVTLSDMFVDRDDPSKITFKTPTGLGRTYPVSAFAKEGAGDDGAAAKHKDDAPAPTAAGKAAASK

SEQ ID NO: 12925 - DNA, 2006 bp, Zea mays subsp. mays
  misc_feature (1)..(2006): Ceres Seq. ID no. 13499123
  misc_feature (1)..(2006): Ortholog of  Ceres SEQ ID NO 13638331 as cited in SEQ ID NO 58047
  misc_feature (1)..(2006): Ortholog of  Ceres SEQ ID NO 15225845 as cited in SEQ ID NO 65125
accgatcgcggggccgatcgagtctgctgaagcctcgcctcgcctcgcagaagaagcagcgtgagtaaaaaacccgcagggtgcagacgaaaacctcgtccgtttccgtcgtcttcctcctccctccgtctcccttcacccggcctcggtgggtccgctccccagccacgcgccgctctcttatttaaccccggccccggcctccgctccgccactcgcgcacccatcacaccccctaaccactccacctccctcagcagccctcacggccactacccactgcggctgtaccacctgtacggctgcactgtccgtcgatcggctttgcaccacacgtccgcgcgctcgctccgtcggtgtcggtagccatggcgctggcggggacgggggtgttcgcggagatcctggacagcgaggtgtacaggtactacgccgacggggagtggcgcagctccgcctccggcaagtccgtcgccatcgtcaaccccaccacccgcaagacgcagtacagggtgcaagcatgcacgcaggaggaggtgaacaaggcgatggacgcggccaaggtcgcgcagaaggcatgggcccggacgccgctgtggaagcgtgcggagctcctccacaaggcggccgcgatcctcaaggagcacaaggcccccatcgccgagtgccttgtcaaggagatagccaagccggccaaggatgccgtttctgaggttgtccggtctggggatttggtgtcgtacacagctgaggagggtgtgcggatactcggggagggcaagctgcttgtttcggatagcttccctggtaatgaacgaaacaagtactgtctgagctccaagataccccttggagtagttttggcaatcccgccgttcaactatcctgtcaacttagcagtttctaagattggcccagcactaattgcaggcaatgctcttgtgctaaagcctccaactcagggcgctgtggctgcacttcatatggtacactgcttccacctggctggtttcccgaaaggtttgatcagttgtgtgactgggaagggttctgaaataggagattttcttacaatgcatcctggagtcaactgcataagttttactggtggcgatactggtatagccatttcaaagaaggctggaatggtccctcttcagatggagcttgggggaaaagatgcttgcattgtgctagaggatgcagatctggatttggtttccgcaaatatagtaaagggtggcttctcatacagtggccagaggtgcactgctgtcaaagtagtgctgatcatggaatcgattgctgatgctgtggtacagaaggttaatgccaagttggcgaaactgaaagttggcccacctgaggacgactctgatatcaccccggttgtaacagaatcctcagccaacttcatcgagggtctggtgatggatgcaaaggagaaaggagcaactttctgccaggagtacaggagagaaggcaaccttatctggccgttgctgctggatcatgtccgccctgacatgaggatcgcatgggaggagccttttgggcctgtcttgcctgtgattaggattaactcagttgaggaaggcatccaccattgcaatgccagtaatttcggcctacagggatgcatttttacaagagacatcaacaaggcaatcctgatcagtgatgcaatggagactggaactgtgcagatcaactctgcaccggctcgtgggcctgatcatttccccttccagggactgaaagacagtggcattgggtcccaggggataacaaacagcattaacatgatgaccaaggtgaagagcactgtcataaacctgccgtcaccatcctacaccatgggctgagatattcttgttaagtgttctatagctccatgagcaatgtagagagttaaatgtttcatagccacgtgagatttggacgctatttacacctcagttcttcctgcagaagatcttttgcagtttaaagaataaagtgcgttg

SEQ ID NO: 12926 - protein, 498 aa, Zea mays subsp. mays
  peptide (1)..(498): Ceres Seq. ID no. 13499124
MALAGTGVFAEILDSEVYRYYADGEWRSSASGKSVAIVNPTTRKTQYRVQACTQEEVNKAMDAAKVAQKAWARTPLWKRAELLHKAAAILKEHKAPIAECLVKEIAKPAKDAVSEVVRSGDLVSYTAEEGVRILGEGKLLVSDSFPGNERNKYCLSSKIPLGVVLAIPPFNYPVNLAVSKIGPALIAGNALVLKPPTQGAVAALHMVHCFHLAGFPKGLISCVTGKGSEIGDFLTMHPGVNCISFTGGDTGIAISKKAGMVPLQMELGGKDACIVLEDADLDLVSANIVKGGFSYSGQRCTAVKVVLIMESIADAVVQKVNAKLAKLKVGPPEDDSDITPVVTESSANFIEGLVMDAKEKGATFCQEYRREGNLIWPLLLDHVRPDMRIAWEEPFGPVLPVIRINSVEEGIHHCNASNFGLQGCIFTRDINKAILISDAMETGTVQINSAPARGPDHFPFQGLKDSGIGSQGITNSINMMTKVKSTVINLPSPSYTMG

SEQ ID NO: 12927 - protein, 438 aa, Zea mays subsp. mays
  peptide (1)..(438): Ceres Seq. ID no. 13499125
MDAAKVAQKAWARTPLWKRAELLHKAAAILKEHKAPIAECLVKEIAKPAKDAVSEVVRSGDLVSYTAEEGVRILGEGKLLVSDSFPGNERNKYCLSSKIPLGVVLAIPPFNYPVNLAVSKIGPALIAGNALVLKPPTQGAVAALHMVHCFHLAGFPKGLISCVTGKGSEIGDFLTMHPGVNCISFTGGDTGIAISKKAGMVPLQMELGGKDACIVLEDADLDLVSANIVKGGFSYSGQRCTAVKVVLIMESIADAVVQKVNAKLAKLKVGPPEDDSDITPVVTESSANFIEGLVMDAKEKGATFCQEYRREGNLIWPLLLDHVRPDMRIAWEEPFGPVLPVIRINSVEEGIHHCNASNFGLQGCIFTRDINKAILISDAMETGTVQINSAPARGPDHFPFQGLKDSGIGSQGITNSINMMTKVKSTVINLPSPSYTMG

SEQ ID NO: 12928 - protein, 293 aa, Zea mays subsp. mays
  peptide (1)..(293): Ceres Seq. ID no. 13499126
MVHCFHLAGFPKGLISCVTGKGSEIGDFLTMHPGVNCISFTGGDTGIAISKKAGMVPLQMELGGKDACIVLEDADLDLVSANIVKGGFSYSGQRCTAVKVVLIMESIADAVVQKVNAKLAKLKVGPPEDDSDITPVVTESSANFIEGLVMDAKEKGATFCQEYRREGNLIWPLLLDHVRPDMRIAWEEPFGPVLPVIRINSVEEGIHHCNASNFGLQGCIFTRDINKAILISDAMETGTVQINSAPARGPDHFPFQGLKDSGIGSQGITNSINMMTKVKSTVINLPSPSYTMG

SEQ ID NO: 12929 - DNA, 841 bp, Zea mays subsp. mays
  misc_feature (1)..(841): Ceres Seq. ID no. 12347087
  misc_feature (1)..(841): Ortholog of  Ceres SEQ ID NO 15168856 as cited in SEQ ID NO 56354
  misc_feature (1)..(841): Ortholog of  Ceres SEQ ID NO 13583591 as cited in SEQ ID NO 63084
atctctctactcactcttcctgtctcctcgtcttgctggagccagtattaacagatccgggttcgagcgtccagtctcgccggacctccgactggcggtcgctgctatctctctggtaccgcggtctcttgcgcgcttctctccattcgctcccactcaccggcttgggggaatgaaggatgtggtagggagcccggggacctggagtggcatggcgctgcggttgtcgcaatgcgtgtccgctggcgcatccatgggcgctatggccacagcgtacggcttctccaactacactgctttctgctacttgattgcttcaatgggcctacaacttctttggagttttggccttgcttgtcttgatgtctactctttgaagactaaaagagatcttcacaaccctgtgcttgtaagcctttttgttgttggggactgggtcactgcaattctgtcgtttgctgccgcgtcggcgtccgcgggcgtgaccatcctgttcgagagggacgtccacttctgcaggatgtacccgcagttgtcgtgcggccggtacgcgctctcggtggtgctggcgttcatcacctggtccttcatcgcaacttctgctgtctccatgttctggttgctgccgtcgctctgatgtggcacggaaggagcctgccgtgtcgtcctgtttagatccgtttgcttcagcagctggttgatgccctgggtcgctctgggttgtgtgcttaagtaactatcaggatcctgatcttaaccggatgtactctgctggagacgagaaattatctagtgtatttgttaaaacaatgaggtggtttatcttcttatttcttttttt

SEQ ID NO: 12930 - protein, 211 aa, Zea mays subsp. mays
  peptide (1)..(211): Ceres Seq. ID no. 12347088
SLYSLFLSPRLAGASINRSGFERPVSPDLRLAVAAISLVPRSLARFSPFAPTHRLGGMKDVVGSPGTWSGMALRLSQCVSAGASMGAMATAYGFSNYTAFCYLIASMGLQLLWSFGLACLDVYSLKTKRDLHNPVLVSLFVVGDWVTAILSFAAASASAGVTILFERDVHFCRMYPQLSCGRYALSVVLAFITWSFIATSAVSMFWLLPSL

SEQ ID NO: 12931 - protein, 154 aa, Zea mays subsp. mays
  peptide (1)..(154): Ceres Seq. ID no. 12347089
MKDVVGSPGTWSGMALRLSQCVSAGASMGAMATAYGFSNYTAFCYLIASMGLQLLWSFGLACLDVYSLKTKRDLHNPVLVSLFVVGDWVTAILSFAAASASAGVTILFERDVHFCRMYPQLSCGRYALSVVLAFITWSFIATSAVSMFWLLPSL

SEQ ID NO: 12932 - protein, 141 aa, Zea mays subsp. mays
  peptide (1)..(141): Ceres Seq. ID no. 12347090
MALRLSQCVSAGASMGAMATAYGFSNYTAFCYLIASMGLQLLWSFGLACLDVYSLKTKRDLHNPVLVSLFVVGDWVTAILSFAAASASAGVTILFERDVHFCRMYPQLSCGRYALSVVLAFITWSFIATSAVSMFWLLPSL

SEQ ID NO: 12933 - DNA, 1227 bp, Zea mays subsp. mays
  misc_feature (1)..(1227): Ceres Seq. ID no. 12347785
  misc_feature (1)..(1227): Ortholog of  Ceres SEQ ID NO 12474685 as cited in SEQ ID NO 88
  misc_feature (1)..(1227): Ortholog of  Ceres SEQ ID NO 13638574 as cited in SEQ ID NO 51223
  misc_feature (1)..(1227): Ortholog of  Ceres SEQ ID NO 14311531 as cited in SEQ ID NO 51466
  misc_feature (1)..(1227): Ortholog of  Ceres SEQ ID NO 15170465 as cited in SEQ ID NO 52798
  misc_feature (1)..(1227): Ortholog of  Ceres SEQ ID NO 15177112 as cited in SEQ ID NO 55956
  misc_feature (1)..(1227): Ortholog of  Ceres SEQ ID NO 12610790 as cited in SEQ ID NO 56123
  misc_feature (1)..(1227): Ortholog of  Ceres SEQ ID NO 14315399 as cited in SEQ ID NO 57112
  misc_feature (1)..(1227): Ortholog of  Ceres SEQ ID NO 13655636 as cited in SEQ ID NO 63519
  misc_feature (1)..(1227): Ortholog of  Ceres SEQ ID NO 13655896 as cited in SEQ ID NO 64970
gcaagccacaaacccgcaccacggcaccagcgggcagcggccaccctagtcagccagtcggaacgaagccgcgcctcgcgccctcccctcgcgaccaccactgcttccagttctggtgcagtgtggaagagcgcccagtgggagagattcagagagaggcggcgatggcgcggcatttcgtgctgaacaccggcgccaaggtcccctatgttgggctcggcacatggcagtctgaccccggcgtcgtcggcaacgccgtctacgccgccgtcaaggcgggttaccgacacatcgattgtgccagagtttacggaaatgagaaggagattggtttggcgctgaagaagctatttgaagagggtgtagtgaagcgagaagatatgtttatcacctctaagttgtggaatgatcatcatgctcctgaagatgtgcctgaggcactaaatcacagcctgaatgatttgcagcttgagtacctggatctttatcttatccattggccatttagagtcaagaagggagcaaataccagtcctgaaaatttcgttacacctgacatccctgctacttggggggcaatggaaaagttatatgatgctggcaaagctcgtgccattggtgtgagtaacttttcctcaaagaaattgggtgacttgcttgctgtagctcgtgtacctccagccgttgatcaggtggaatgtcatcctggttggcagcaaactaagctccatagcttttgtcagtcaactggtgttcaactgcttactcaccactaggttcacctggtacaacttggatgaatggtaatgtccttaaagaaccaataatcatctcaatagctgagaaactcggaaaaactcctgcacaagtggctctgcgctggaacattcagatgggtcacagtgttcttccaaaaagcacgaatgaagaaaggataaagcaaaaccttgatgtttatgattggtcgattccagatgacttgctcgcaaagttctctgagattaagcaggataggctacttagaggcaacttcattgttaatcctgagagcgcttacaagacccatgaggagctctgggacggtgaactctaggaaggacaccgttgttttatcgtgagcagggagcagcgttccattagggtctgccatatcattttatctcctaatttgcgctttatctgaaatgaaggttcagtgctcggaagctctgatgccatcctttatcg

SEQ ID NO: 12934 - protein, 257 aa, Zea mays subsp. mays
  peptide (1)..(257): Ceres Seq. ID no. 12347786
KPQTRTTAPAGSGHPSQPVGTKPRLAPSPRDHHCFQFWCSVEERPVGEIQREAAMARHFVLNTGAKVPYVGLGTWQSDPGVVGNAVYAAVKAGYRHIDCARVYGNEKEIGLALKKLFEEGVVKREDMFITSKLWNDHHAPEDVPEALNHSLNDLQLEYLDLYLIHWPFRVKKGANTSPENFVTPDIPATWGAMEKLYDAGKARAIGVSNFSSKKLGDLLAVARVPPAVDQVECHPGWQQTKLHSFCQSTGVQLLTHH

SEQ ID NO: 12935 - protein, 203 aa, Zea mays subsp. mays
  peptide (1)..(203): Ceres Seq. ID no. 12347787
MARHFVLNTGAKVPYVGLGTWQSDPGVVGNAVYAAVKAGYRHIDCARVYGNEKEIGLALKKLFEEGVVKREDMFITSKLWNDHHAPEDVPEALNHSLNDLQLEYLDLYLIHWPFRVKKGANTSPENFVTPDIPATWGAMEKLYDAGKARAIGVSNFSSKKLGDLLAVARVPPAVDQVECHPGWQQTKLHSFCQSTGVQLLTHH

SEQ ID NO: 12936 - protein, 131 aa, Zea mays subsp. mays
  peptide (1)..(131): Ceres Seq. ID no. 12347788
MFITSKLWNDHHAPEDVPEALNHSLNDLQLEYLDLYLIHWPFRVKKGANTSPENFVTPDIPATWGAMEKLYDAGKARAIGVSNFSSKKLGDLLAVARVPPAVDQVECHPGWQQTKLHSFCQSTGVQLLTHH

SEQ ID NO: 12937 - DNA, 2180 bp, Zea mays subsp. mays
  misc_feature (1)..(2180): Ceres Seq. ID no. 12342411
  misc_feature (1)..(2180): Ortholog of  Ceres SEQ ID NO 13594317 as cited in SEQ ID NO 57796
agtcagttcctcctactcccgatccattcgcagagggcagcagccacctcctctccccgcggccgagctcgcgcctcgcccgccgcctgaactcgtcttgcctgcggccgatctcccccctccgttcttcgccgcaacccggagaggagaccgcgctcggtcgagcaccccctggggcagcgtcctcgcgaccagctccggcgcggcgtccgccctcagcagcccgggtgtccccgggaacgtctccggctcggccggcacacagctcgacaggcttttcagttcagtgcagtgtaccaagattctctgttaatttgtgtatgagatcagttaactgataaagacatgtgaagaaccagtgatcagtaatctgtacgcttcagattgtagtatccttgagatggatggaagagaatcaggcttatggtaaatcctggtgaatattcatgggaggtcagcaagttctggcctgactaagactagtaaaaatacggtgcttcatctcagatcatcaatggtgagaatgaggttcccgaaacgttatataatagtattgttgacattcatctgcacaaatgtttgctacattgagcgtgtgggtttctcaattacctatactgttgcagctgatgccatcggtgtgaatcaagccaacaagggcatgatactctctatgttctattatggttatgttttatcacagattcctggtggatgggcagcacagagaataggaggtagacgtgtcctgctactgtcatttgtattgtggtcaatgatatgtggtttaattccacttgatcccaacagagtaaccattctggtcctttctcgcctattcgttggtgtagcacaaggtttcatatttcctgccattcacactgtcctggcacaatgggtgccgccgcaggagcgctctcgctcagtatctcttactacctcagggatgtatcttggtgcagcctgtggcatgcttttcttccctagtctggtgaagcacatgggaccccagtcagttttttttgttgaagcagtgttgggagcagcatggtctgtaatatggctgaaattttccagtgacccaccccgtactgatcttccaaaggtatcaatgccaaaagtgccatctcgagacatgattaaggcacaagcaggaggggttgtggcacctcgcacggtaaagatcccgtggcgaaggataatattcagcctacctgtttgggcaatagttgtgaacaacttcacgttccactatgccctgtatgttcttatgaactggctccctacctattttgagctaggccttaagcttagcctccaggatatgggttcctcaaagatgcttccctatttcaacatgttcattttctccaatatcggcggtgtggttgctgatcacttgattacaaggaggattctatctgttaccaagacaaggaagcttctgaacaccatcgggttcatcgtctcagcgtttgcactcatggcccttcctttgttcagcacaccgtcaggcactgtaatgtgttcagcgatatccctcggttttcttgctctaggaagagcagggtttgccgtgaaccatatggatgttgctccgaagtttgcagggatagtgatgggagtctcaaacacggcggggacactggccggaatcgtcggtgtcggcctcacgggcaatattctggaggcggcaaaggcttctaacaaggatctaacggactcggaaacctggaaaacagtcttcttcgttccagcatatctttgtattttcagttccgtcatttttttgatcttttcgacaggcgaaaagatctttgaataaagggtggttattactttttttgccaattcttttcttacgatgaggcaggattgtgaaatggaaatcttacatgtatctgtagcatttgttacaaaattttcagatttcagactgcatcacatacacacgatcagaggctatgtcaggagatcttgcattttcgttatgatgaagactcggttcattggcagtcacactcacactccaatgcagctaacagaatttgcttgtctcccaggttaactccttggttttggtacatagtctcaccacaaagtttgtcaagttcccttacctttgccctgcaatgtaaacatatatggtgccaatgagaataaacggcattgtcatttgc

SEQ ID NO: 12938 - protein, 436 aa, Zea mays subsp. mays
  peptide (1)..(436): Ceres Seq. ID no. 12342412
MVRMRFPKRYIIVLLTFICTNVCYIERVGFSITYTVAADAIGVNQANKGMILSMFYYGYVLSQIPGGWAAQRIGGRRVLLLSFVLWSMICGLIPLDPNRVTILVLSRLFVGVAQGFIFPAIHTVLAQWVPPQERSRSVSLTTSGMYLGAACGMLFFPSLVKHMGPQSVFFVEAVLGAAWSVIWLKFSSDPPRTDLPKVSMPKVPSRDMIKAQAGGVVAPRTVKIPWRRIIFSLPVWAIVVNNFTFHYALYVLMNWLPTYFELGLKLSLQDMGSSKMLPYFNMFIFSNIGGVVADHLITRRILSVTKTRKLLNTIGFIVSAFALMALPLFSTPSGTVMCSAISLGFLALGRAGFAVNHMDVAPKFAGIVMGVSNTAGTLAGIVGVGLTGNILEAAKASNKDLTDSETWKTVFFVPAYLCIFSSVIFLIFSTGEKIFE

SEQ ID NO: 12939 - protein, 433 aa, Zea mays subsp. mays
  peptide (1)..(433): Ceres Seq. ID no. 12342413
MRFPKRYIIVLLTFICTNVCYIERVGFSITYTVAADAIGVNQANKGMILSMFYYGYVLSQIPGGWAAQRIGGRRVLLLSFVLWSMICGLIPLDPNRVTILVLSRLFVGVAQGFIFPAIHTVLAQWVPPQERSRSVSLTTSGMYLGAACGMLFFPSLVKHMGPQSVFFVEAVLGAAWSVIWLKFSSDPPRTDLPKVSMPKVPSRDMIKAQAGGVVAPRTVKIPWRRIIFSLPVWAIVVNNFTFHYALYVLMNWLPTYFELGLKLSLQDMGSSKMLPYFNMFIFSNIGGVVADHLITRRILSVTKTRKLLNTIGFIVSAFALMALPLFSTPSGTVMCSAISLGFLALGRAGFAVNHMDVAPKFAGIVMGVSNTAGTLAGIVGVGLTGNILEAAKASNKDLTDSETWKTVFFVPAYLCIFSSVIFLIFSTGEKIFE

SEQ ID NO: 12940 - protein, 387 aa, Zea mays subsp. mays
  peptide (1)..(387): Ceres Seq. ID no. 12342414
MILSMFYYGYVLSQIPGGWAAQRIGGRRVLLLSFVLWSMICGLIPLDPNRVTILVLSRLFVGVAQGFIFPAIHTVLAQWVPPQERSRSVSLTTSGMYLGAACGMLFFPSLVKHMGPQSVFFVEAVLGAAWSVIWLKFSSDPPRTDLPKVSMPKVPSRDMIKAQAGGVVAPRTVKIPWRRIIFSLPVWAIVVNNFTFHYALYVLMNWLPTYFELGLKLSLQDMGSSKMLPYFNMFIFSNIGGVVADHLITRRILSVTKTRKLLNTIGFIVSAFALMALPLFSTPSGTVMCSAISLGFLALGRAGFAVNHMDVAPKFAGIVMGVSNTAGTLAGIVGVGLTGNILEAAKASNKDLTDSETWKTVFFVPAYLCIFSSVIFLIFSTGEKIFE

SEQ ID NO: 12941 - DNA, 1298 bp, Zea mays subsp. mays
  misc_feature (1)..(1298): Ceres Seq. ID no. 12347470
  misc_feature (1)..(1298): Ortholog of  Ceres SEQ ID NO 14304148 as cited in SEQ ID NO 57313
  misc_feature (1)..(1298): Ortholog of  Ceres SEQ ID NO 13598513 as cited in SEQ ID NO 64102
  misc_feature (1)..(1298): Ortholog of  Ceres SEQ ID NO 14302224 as cited in SEQ ID NO 64268
aattaaccatattggccagtgtacgtgggaacgatggccctcatgcaggagagtagtagccaggatttgctccaagctcacgacgagctcttgcaccattccctgtgcttcgccaaatcgctcgcgctcgccgtggcgctagacctccgcatccccgacgcgatccaccaccacggggccggcggcgccacccttctccagatcctcgccgagactgcgctccacccaagcaagcttcgcgcccttcgccgcctcatgcgcgtgctcaccgtcacgggcatcttcagcgtcgtcgagcaaccaccagcaggtggtggtgatgattcaaccgtccacacgtcggacgacgaagctgtcgtcgtctacaggttgacggcagcctcccgcttcctcgtcagcgacgacgtgagcacggcgaccttggctccctttgtgagtctggcgctccagcctatcgctgcctgtccgcacgccctgggtatctccgcgtggttccggcaggagcagcacgagccgtccccgtatggcctggcgttccgccagaccccaacgatctgggaacatgctgacgacgtaaacgccttgctgaacaaaggcatggccgcggacagccgcttcctcatgccaattgtgctgagggagtgcggcgagacgtttcgtgggatcgactcgttggttgacgtcggtggtggccatggtggcgccgccgccaccatcgccgccgccttcccccacctcaagtgcagcgtgcttgacctcccgcacgttgtcgccggtgctccgtctgatggcaacgtgcagttcgtcgcaggcaatatgtttgagagtattccacctgcaaccgctgttttcctcaagaaaactctacatgactggggtgacgatgagtctgtcaagatattgaagaattgcaagcaagccatatctccacgggatgcaggtgggaaggtaataatcttggatgtggtagttggatataaacagtcaaacataaagcatcaagagacacaagttatgtttgatttgtatatgatggcggttaacggagttgagcgtgacgagcaagagtggaagaagatcttcactgaagctggattcaaagactacaaaattctacccgtcattggtgatgtatcggtcatcatcgaggtctatccttgaatgctttgtgaacaaaggcctccataataaactgaagaccaagaaggtgttgatagtatattatgaattgttatttgtcctgtacacttgattctttgcgtatttgtaatgacaagttgagtaattgtgtttttgtc

SEQ ID NO: 12942 - protein, 375 aa, Zea mays subsp. mays
  peptide (1)..(375): Ceres Seq. ID no. 12347471
MALMQESSSQDLLQAHDELLHHSLCFAKSLALAVALDLRIPDAIHHHGAGGATLLQILAETALHPSKLRALRRLMRVLTVTGIFSVVEQPPAGGGDDSTVHTSDDEAVVVYRLTAASRFLVSDDVSTATLAPFVSLALQPIAACPHALGISAWFRQEQHEPSPYGLAFRQTPTIWEHADDVNALLNKGMAADSRFLMPIVLRECGETFRGIDSLVDVGGGHGGAAATIAAAFPHLKCSVLDLPHVVAGAPSDGNVQFVAGNMFESIPPATAVFLKKTLHDWGDDESVKILKNCKQAISPRDAGGKVIILDVVVGYKQSNIKHQETQVMFDLYMMAVNGVERDEQEWKKIFTEAGFKDYKILPVIGDVSVIIEVYP

SEQ ID NO: 12943 - protein, 372 aa, Zea mays subsp. mays
  peptide (1)..(372): Ceres Seq. ID no. 12347472
MQESSSQDLLQAHDELLHHSLCFAKSLALAVALDLRIPDAIHHHGAGGATLLQILAETALHPSKLRALRRLMRVLTVTGIFSVVEQPPAGGGDDSTVHTSDDEAVVVYRLTAASRFLVSDDVSTATLAPFVSLALQPIAACPHALGISAWFRQEQHEPSPYGLAFRQTPTIWEHADDVNALLNKGMAADSRFLMPIVLRECGETFRGIDSLVDVGGGHGGAAATIAAAFPHLKCSVLDLPHVVAGAPSDGNVQFVAGNMFESIPPATAVFLKKTLHDWGDDESVKILKNCKQAISPRDAGGKVIILDVVVGYKQSNIKHQETQVMFDLYMMAVNGVERDEQEWKKIFTEAGFKDYKILPVIGDVSVIIEVYP

SEQ ID NO: 12944 - protein, 301 aa, Zea mays subsp. mays
  peptide (1)..(301): Ceres Seq. ID no. 12347473
MRVLTVTGIFSVVEQPPAGGGDDSTVHTSDDEAVVVYRLTAASRFLVSDDVSTATLAPFVSLALQPIAACPHALGISAWFRQEQHEPSPYGLAFRQTPTIWEHADDVNALLNKGMAADSRFLMPIVLRECGETFRGIDSLVDVGGGHGGAAATIAAAFPHLKCSVLDLPHVVAGAPSDGNVQFVAGNMFESIPPATAVFLKKTLHDWGDDESVKILKNCKQAISPRDAGGKVIILDVVVGYKQSNIKHQETQVMFDLYMMAVNGVERDEQEWKKIFTEAGFKDYKILPVIGDVSVIIEVYP

SEQ ID NO: 12945 - DNA, 1307 bp, Zea mays subsp. mays
  misc_feature (1)..(1307): Ceres Seq. ID no. 12414595
  misc_feature (1)..(1307): Ortholog of  Ceres SEQ ID NO 14301534 as cited in SEQ ID NO 68265
atagagtagattagtgggggaactggacgtaaccgtaatattcactctgcgccccaccctcttgttctccggttccccgcgacatactctttcctgctctctctctcggttctgccgtgtccctcgcgtgcgctctgtctccggtggcgccgcctccgccgcctccgtcgccctgcgccagatcagattcgtggatatggctgataatgagaaagaagcgggggagggaaccaccccccgaggggcggactgggaagttgtgactctcacagcatctgcctatgaagcggcgccaggacctgtcggaacagaagtaaagcctgttaatgaaaatcaagagcatagttcatccaatgcactgctcatgtctgaccactttgtgtttccgccgagtgagcacgagaacctgccaatacaaaccagtttcgatgagatacagcctgagaaggatgtgcagaaacctagtaccactgtggaggattatagtaataagaatgttgttgggtctgagagagttcagtttgatgatgaagggaaagacctcttagatgatgatgtggagatgagagatgacacacctgggtacggttcatcccacgctgaagatgatgcacatggttttgttgttcacgatgatggtgttgagtccggtgaagattttgatgaaaaatcaggccacccttcagatcctgcagacagcaggagctgtgatactggcgcctcatgcaaatgttggttgaagaagcatatgacatgcttgtataaccaagcaaaggaaacaaatgctatctggtctgtggtggttgcagctgcactagttggtattgtgattttgggacgttggcacaaagataaattgcaccttaaccagcttaagtggcgctctggctcagcagtgagaggatgatcaacaagtcgtttgtgctgctctgatgaatcaattcaattcaagccataaccaagacggtttccgcaatgttattgtgatgatgacgaaaaggggtatgttcaatgcaataatatgatgttcgactggaatttcacttaccgccctacaatgagtgcctcgtgggcttctaagatgtcaaatccacttctgccatacacattatcttacagctttacttgcgacctggcacatgatttttggttcctgctacttttgctgtggtatatcatatatgttgactaaatggctgtagaacgtagcattgtatactgcgaagtctgctaaaaatcttggtggttctgcgagagcaactcacatgcaattgtgaaaatggagaacaaggaaaatttgtttggct

SEQ ID NO: 12946 - protein, 236 aa, Zea mays subsp. mays
  peptide (1)..(236): Ceres Seq. ID no. 12414596
MADNEKEAGEGTTPRGADWEVVTLTASAYEAAPGPVGTEVKPVNENQEHSSSNALLMSDHFVFPPSEHENLPIQTSFDEIQPEKDVQKPSTTVEDYSNKNVVGSERVQFDDEGKDLLDDDVEMRDDTPGYGSSHAEDDAHGFVVHDDGVESGEDFDEKSGHPSDPADSRSCDTGASCKCWLKKHMTCLYNQAKETNAIWSVVVAAALVGIVILGRWHKDKLHLNQLKWRSGSAVRG

SEQ ID NO: 12947 - protein, 180 aa, Zea mays subsp. mays
  peptide (1)..(180): Ceres Seq. ID no. 12414597
MSDHFVFPPSEHENLPIQTSFDEIQPEKDVQKPSTTVEDYSNKNVVGSERVQFDDEGKDLLDDDVEMRDDTPGYGSSHAEDDAHGFVVHDDGVESGEDFDEKSGHPSDPADSRSCDTGASCKCWLKKHMTCLYNQAKETNAIWSVVVAAALVGIVILGRWHKDKLHLNQLKWRSGSAVRG

SEQ ID NO: 12948 - DNA, 937 bp, Zea mays subsp. mays
  misc_feature (1)..(937): Ceres Seq. ID no. 12369109
  misc_feature (1)..(937): Ortholog of  Ceres SEQ ID NO 13623192 as cited in SEQ ID NO 1286
  misc_feature (1)..(937): Ortholog of  Ceres SEQ ID NO 13594171 as cited in SEQ ID NO 60359
  misc_feature (1)..(937): Ortholog of  Ceres SEQ ID NO 14301866 as cited in SEQ ID NO 60955
  misc_feature (1)..(937): Ortholog of  Ceres SEQ ID NO 13590645 as cited in SEQ ID NO 62109
acaagtttgggtatacaccagataatctcatatacaagagtcttgactttggtgttgatcttgactctagaatcgcattggttggtcccaacggggcagggaagagcactcttctgaagcttatgactggtgaccttgttccattagatggcatggttcggcgccacaatcacctgcgcattgcgcagtaccatcagcatctggcggagaagctggatctggacatgtcagccctggcttacatgatgaaggaataccctgggactgaagaagaaaagatgcgagccgctgttggcaggttcggcctgtcaggaaaggcgcaggtgatgccgatgaagaatctttctgatgggcaaaggagccgcgtcatctttgcatggctggcatataggcagccgcaactgctactgcttgatgagccgacaaaccatctggatatcgagaccattgactcactggcagaggcgctgaatgagtgggatggtggtttggtcttggtgagccacgatttcaggctgatcaaccaggtcgctcaggagatctgggtgtgtgagaatcaagaggtgacaaggtgggaaggcgatatcatggatttcaaggcacacttgaagagcaaggctggtttatctgattagaatgcttgtctagtaaccatgaactttttaactctgtatgatgaagtccctgttttccagtagcgaactatcaaatatactgttagggatagtttgggaaacacaaatccggagtggattggaggggctagaatcccctttttattcaattttgaatcagaagggtattctatcccttccggttttctccggttttctggctcccaaactagcccttaatgtgtccgactccttaagacttccctcgcaaccatactaccttatactacctggaatttttatttatatatatttgaaatgtt

SEQ ID NO: 12949 - protein, 210 aa, Zea mays subsp. mays
  peptide (1)..(210): Ceres Seq. ID no. 12369110
KFGYTPDNLIYKSLDFGVDLDSRIALVGPNGAGKSTLLKLMTGDLVPLDGMVRRHNHLRIAQYHQHLAEKLDLDMSALAYMMKEYPGTEEEKMRAAVGRFGLSGKAQVMPMKNLSDGQRSRVIFAWLAYRQPQLLLLDEPTNHLDIETIDSLAEALNEWDGGLVLVSHDFRLINQVAQEIWVCENQEVTRWEGDIMDFKAHLKSKAGLSD

SEQ ID NO: 12950 - protein, 170 aa, Zea mays subsp. mays
  peptide (1)..(170): Ceres Seq. ID no. 12369111
MTGDLVPLDGMVRRHNHLRIAQYHQHLAEKLDLDMSALAYMMKEYPGTEEEKMRAAVGRFGLSGKAQVMPMKNLSDGQRSRVIFAWLAYRQPQLLLLDEPTNHLDIETIDSLAEALNEWDGGLVLVSHDFRLINQVAQEIWVCENQEVTRWEGDIMDFKAHLKSKAGLSD

SEQ ID NO: 12951 - protein, 160 aa, Zea mays subsp. mays
  peptide (1)..(160): Ceres Seq. ID no. 12369112
MVRRHNHLRIAQYHQHLAEKLDLDMSALAYMMKEYPGTEEEKMRAAVGRFGLSGKAQVMPMKNLSDGQRSRVIFAWLAYRQPQLLLLDEPTNHLDIETIDSLAEALNEWDGGLVLVSHDFRLINQVAQEIWVCENQEVTRWEGDIMDFKAHLKSKAGLSD

SEQ ID NO: 12952 - DNA, 1747 bp, Zea mays subsp. mays
  misc_feature (1)..(1747): Ceres Seq. ID no. 13637284
  misc_feature (1)..(1747): Ortholog of  Ceres SEQ ID NO 14315418 as cited in SEQ ID NO 57506
ggattgggctttcccctccgcctccctcccctcacaaaaaggcggcagcacagcgccacccctcctgtcccgccgagttcggagcgcagcgcaaggcggggggaggagcaagaagccgccggcctccctcctccggctcaccaccaggcttactccgcaccgcgctgccacgggtaggagcggcgtcaaattcgggattcccaagcggcttcagcccggaggttgagccaaagctattttctaagaaaaatggcggcaatgatggtggcgatgactgcgaggagcaagaacagcatattaaccgtggagaagaagcagggctggtctattcagctaccagagctccggttcccttgggattcacatgaagacaagggtttctctctaagtctgcaaggctctggaccttctcatggcggcctgtttgctagtgtgggtcttaaagtgtcgacaggtgcgccagcagtggcgcccggaccggggtgacaaggatattaagattccattcactgatcattgtatgaagtacgtgtccgaggcagttgggtaccaggttattagcactgaagctgagccagtggaggaggtggtggatgctaaggcaaagaaggcagccaagaaacgtgggctgcagctgaaaattaagattgggaacccacatttgaggaggctggttagtggagctattgcaggtgctgtttccaggacttgtgtggcaccactggagacgatcaggactcacttgatggttgggagcaacggtgactccatgacagaggtgttccagtcaatcatgaacactgaggggtggactgggcttttccgtgggaattttgtcaatgttatccgagttgcgccaagcaaagcaattgagctttttgcttttgatactgccaagaaattcttgactccaaaggctgatgagtctccaaagaccttcctacctccatcacttattgctggagcacttgcaggagtcagctcaaccctgtgcacatatcctttggagttgattaagaccagattgacgatagagaaagatgtctataacaacttcctccatgctttcgtcaagattttacgagaagaaggtccatcagagctctaccgtggtctgacaccaagtctgataggagtggtgccatatgccgcgactaattactacgcctatgacaccctaaagaagctctataggaagacgttcaagcaggaggagatcagcaacatcgcaactctcctaattggttcagccgctggcgccatctccagcactgccacattccctctcgaggtggcccgcaagcaaatgcaggtaggagcagtaggagggaggcaggtctacaagaatgtgttccatgcgctctactgcataatggagaaggaaggggttggcggcctgtacaaggggctcggaccgagctgcatcaagttgatgcctgcagcaggcatctcgttcatgtgctacgaggcctgtaagaagatcctggtcgaagacaatgaggatagtgagtgaagctgaagcatgtatgcccctgaggaggggtatgactgatgtgccaggctagaagaggtttgggttgggttgggttggggagtataccctagtattatcaactgatgaaaatgtagatccaagatatttgaacgccctttagatcataatttggttcagttttgtgctgaaatccataaacaatacactcacttgatggtgcatgttgcaaaggggcaattttgtcatgtggcc

SEQ ID NO: 12953 - protein, 366 aa, Zea mays subsp. mays
  peptide (1)..(366): Ceres Seq. ID no. 13637285
MAACLLVWVLKCRQVRQQWRPDRGDKDIKIPFTDHCMKYVSEAVGYQVISTEAEPVEEVVDAKAKKAAKKRGLQLKIKIGNPHLRRLVSGAIAGAVSRTCVAPLETIRTHLMVGSNGDSMTEVFQSIMNTEGWTGLFRGNFVNVIRVAPSKAIELFAFDTAKKFLTPKADESPKTFLPPSLIAGALAGVSSTLCTYPLELIKTRLTIEKDVYNNFLHAFVKILREEGPSELYRGLTPSLIGVVPYAATNYYAYDTLKKLYRKTFKQEEISNIATLLIGSAAGAISSTATFPLEVARKQMQVGAVGGRQVYKNVFHALYCIMEKEGVGGLYKGLGPSCIKLMPAAGISFMCYEACKKILVEDNEDSE

SEQ ID NO: 12954 - protein, 330 aa, Zea mays subsp. mays
  peptide (1)..(330): Ceres Seq. ID no. 13637286
MKYVSEAVGYQVISTEAEPVEEVVDAKAKKAAKKRGLQLKIKIGNPHLRRLVSGAIAGAVSRTCVAPLETIRTHLMVGSNGDSMTEVFQSIMNTEGWTGLFRGNFVNVIRVAPSKAIELFAFDTAKKFLTPKADESPKTFLPPSLIAGALAGVSSTLCTYPLELIKTRLTIEKDVYNNFLHAFVKILREEGPSELYRGLTPSLIGVVPYAATNYYAYDTLKKLYRKTFKQEEISNIATLLIGSAAGAISSTATFPLEVARKQMQVGAVGGRQVYKNVFHALYCIMEKEGVGGLYKGLGPSCIKLMPAAGISFMCYEACKKILVEDNEDSE

SEQ ID NO: 12955 - protein, 255 aa, Zea mays subsp. mays
  peptide (1)..(255): Ceres Seq. ID no. 13637287
MVGSNGDSMTEVFQSIMNTEGWTGLFRGNFVNVIRVAPSKAIELFAFDTAKKFLTPKADESPKTFLPPSLIAGALAGVSSTLCTYPLELIKTRLTIEKDVYNNFLHAFVKILREEGPSELYRGLTPSLIGVVPYAATNYYAYDTLKKLYRKTFKQEEISNIATLLIGSAAGAISSTATFPLEVARKQMQVGAVGGRQVYKNVFHALYCIMEKEGVGGLYKGLGPSCIKLMPAAGISFMCYEACKKILVEDNEDSE

SEQ ID NO: 12956 - DNA, 2245 bp, Zea mays subsp. mays
  misc_feature (1)..(2245): Ceres Seq. ID no. 12358579
  misc_feature (1)..(2245): Ortholog of  Ceres SEQ ID NO 14308618 as cited in SEQ ID NO 58541
atccaattcctatgccctgcacccgcagacggggagctcgcgtcttccttcggatggtggatgcatgcatgcatggtagacacgccggcccaaccagaattgacaagtggaagcgtatgggtattaccagcaacgacgcggcccctcgtgccgtcctcctccgcttcttgtttctgctctgcataggctgcaaatgcctggcatcagaggtagaggccacccagacggcgaccctcgcggtggacgcctcgccgcagcttgctcggaagatccctgatacactgttcgggatcttctttgaggagatcaaccatgcaggggctggtggcatatgggctgaacttgttagtaacagagggtttgaagctggaggcctccatactccatcaaacattgacccatggtccatcattggagacgactcctctgtatttgtggagaccgatcgcacatcatgtttcagtcgaaacatcgttgctctcaggatggaggtcctttgcgataactgtcctactggtggtgttggtgtttacaacccagggttctggggcatgaacatagaagaaggaaaggtctacaatcttgttatgtttgttaagtcaccagaaacaactgacttgacagtttcactaacaagctctaacgggttgcaaaatctggcttcagctacagtaacagtttccggcgaatcaaactggataaaagtggagcaaaagttggttgctaaaggaaccaatagaacctcaaggcttcaaataacaactaacaagaaaggagttgtctggtttgatcaagtatcactcatgcctgaagacacatacaagggacatggctttcgcacagaacttatatccatgattttggatttaaaaccacgattcttgagatttcctggaggctgctttgtagaaggtggctggttaagaaatgcctttaggtggagagaatctattggtccatgggaagagagacctggacacttcggggatgtttggcattactggactgatgatggccttggatactatgaatttcttcagcttgcggaggacctgggtactgaaccaatctgggtattcaacaatggagtcagccacaatgatgaagttgatactgttgctattgctccttttgtaaaggatgtattggacagtatagaatttgcaagggggagtgcaaattcaacatggggctctgttagggctgcaatgggccaccctgaaccattcccagtgaaatatgttgcaataggaaatgaagattgtgggaaaaaattttaccgcggtaactacctcaagttctacaatgctataagacaggcctatccagacattcaaatgatttcaaactgcgatggttcatctacaccacttgatcatcctgctgatttatacgacttccatgtctataatgattctaagactttgttcaacatgaagagcacatttgacagaacatctcgtagtggacccaaggcttttgtaagtgagtacgctgtttggagaggtgatgcaggtagaggaagtcttcttgcttcattggcagaagctgttttccttactggactggagaagaatagtgacattgtttccatggcaagttacgcgccactattcgtaaacgacaatgaccagacgtggaacccagacgcaatcgtcttcaactcctggcagcattacggcactcccagttactggatgcagacgcttttccgcgagtctagtggtgctatgttccatccaacgacaatcagctccagctactcaggttcacttgcagcgtctgcgattacctggcaggactccgagaacagcttcctaagagtaaaggtcataaacttcgggtcagatgctgtgaccctgacaatctccacaagtgggctccaggccagtatcaacgctctgggatcaaccgccactgttctcacatcagcagatgtgatggatgaaaactccttcagcaacccaaccaaggttgtgccggtaaagagcgatctgagcaatgctgcagagcagatgcaggtcacgctggctcctcgctccttcagctcgttcgatctcgccctggctcagtccaagcttgtagcggagatgtgagctaggctggtacactagtatacaatacaacgtgtgaagtgtggtacacaaataccagcaaccacaggggttgccaagctgttgttagcatcttgaacacatggctttgtattgtgtataatgacatgatgctgatactaatctctatt

SEQ ID NO: 12957 - protein, 697 aa, Zea mays subsp. mays
  peptide (1)..(697): Ceres Seq. ID no. 12358580
PIPMPCTRRRGARVFLRMVDACMHGRHAGPTRIDKWKRMGITSNDAAPRAVLLRFLFLLCIGCKCLASEVEATQTATLAVDASPQLARKIPDTLFGIFFEEINHAGAGGIWAELVSNRGFEAGGLHTPSNIDPWSIIGDDSSVFVETDRTSCFSRNIVALRMEVLCDNCPTGGVGVYNPGFWGMNIEEGKVYNLVMFVKSPETTDLTVSLTSSNGLQNLASATVTVSGESNWIKVEQKLVAKGTNRTSRLQITTNKKGVVWFDQVSLMPEDTYKGHGFRTELISMILDLKPRFLRFPGGCFVEGGWLRNAFRWRESIGPWEERPGHFGDVWHYWTDDGLGYYEFLQLAEDLGTEPIWVFNNGVSHNDEVDTVAIAPFVKDVLDSIEFARGSANSTWGSVRAAMGHPEPFPVKYVAIGNEDCGKKFYRGNYLKFYNAIRQAYPDIQMISNCDGSSTPLDHPADLYDFHVYNDSKTLFNMKSTFDRTSRSGPKAFVSEYAVWRGDAGRGSLLASLAEAVFLTGLEKNSDIVSMASYAPLFVNDNDQTWNPDAIVFNSWQHYGTPSYWMQTLFRESSGAMFHPTTISSSYSGSLAASAITWQDSENSFLRVKVINFGSDAVTLTISTSGLQASINALGSTATVLTSADVMDENSFSNPTKVVPVKSDLSNAAEQMQVTLAPRSFSSFDLALAQSKLVAEM

SEQ ID NO: 12958 - protein, 694 aa, Zea mays subsp. mays
  peptide (1)..(694): Ceres Seq. ID no. 12358581
MPCTRRRGARVFLRMVDACMHGRHAGPTRIDKWKRMGITSNDAAPRAVLLRFLFLLCIGCKCLASEVEATQTATLAVDASPQLARKIPDTLFGIFFEEINHAGAGGIWAELVSNRGFEAGGLHTPSNIDPWSIIGDDSSVFVETDRTSCFSRNIVALRMEVLCDNCPTGGVGVYNPGFWGMNIEEGKVYNLVMFVKSPETTDLTVSLTSSNGLQNLASATVTVSGESNWIKVEQKLVAKGTNRTSRLQITTNKKGVVWFDQVSLMPEDTYKGHGFRTELISMILDLKPRFLRFPGGCFVEGGWLRNAFRWRESIGPWEERPGHFGDVWHYWTDDGLGYYEFLQLAEDLGTEPIWVFNNGVSHNDEVDTVAIAPFVKDVLDSIEFARGSANSTWGSVRAAMGHPEPFPVKYVAIGNEDCGKKFYRGNYLKFYNAIRQAYPDIQMISNCDGSSTPLDHPADLYDFHVYNDSKTLFNMKSTFDRTSRSGPKAFVSEYAVWRGDAGRGSLLASLAEAVFLTGLEKNSDIVSMASYAPLFVNDNDQTWNPDAIVFNSWQHYGTPSYWMQTLFRESSGAMFHPTTISSSYSGSLAASAITWQDSENSFLRVKVINFGSDAVTLTISTSGLQASINALGSTATVLTSADVMDENSFSNPTKVVPVKSDLSNAAEQMQVTLAPRSFSSFDLALAQSKLVAEM

SEQ ID NO: 12959 - protein, 680 aa, Zea mays subsp. mays
  peptide (1)..(680): Ceres Seq. ID no. 12358582
MVDACMHGRHAGPTRIDKWKRMGITSNDAAPRAVLLRFLFLLCIGCKCLASEVEATQTATLAVDASPQLARKIPDTLFGIFFEEINHAGAGGIWAELVSNRGFEAGGLHTPSNIDPWSIIGDDSSVFVETDRTSCFSRNIVALRMEVLCDNCPTGGVGVYNPGFWGMNIEEGKVYNLVMFVKSPETTDLTVSLTSSNGLQNLASATVTVSGESNWIKVEQKLVAKGTNRTSRLQITTNKKGVVWFDQVSLMPEDTYKGHGFRTELISMILDLKPRFLRFPGGCFVEGGWLRNAFRWRESIGPWEERPGHFGDVWHYWTDDGLGYYEFLQLAEDLGTEPIWVFNNGVSHNDEVDTVAIAPFVKDVLDSIEFARGSANSTWGSVRAAMGHPEPFPVKYVAIGNEDCGKKFYRGNYLKFYNAIRQAYPDIQMISNCDGSSTPLDHPADLYDFHVYNDSKTLFNMKSTFDRTSRSGPKAFVSEYAVWRGDAGRGSLLASLAEAVFLTGLEKNSDIVSMASYAPLFVNDNDQTWNPDAIVFNSWQHYGTPSYWMQTLFRESSGAMFHPTTISSSYSGSLAASAITWQDSENSFLRVKVINFGSDAVTLTISTSGLQASINALGSTATVLTSADVMDENSFSNPTKVVPVKSDLSNAAEQMQVTLAPRSFSSFDLALAQSKLVAEM

SEQ ID NO: 12960 - DNA, 1415 bp, Zea mays subsp. mays
  misc_feature (1)..(1415): Ceres Seq. ID no. 12411473
  misc_feature (1)..(1415): Ortholog of  Ceres SEQ ID NO 15177991 as cited in SEQ ID NO 53915
  misc_feature (1)..(1415): Ortholog of  Ceres SEQ ID NO 15174347 as cited in SEQ ID NO 58577
  misc_feature (1)..(1415): Ortholog of  Ceres SEQ ID NO 13596609 as cited in SEQ ID NO 63070
  misc_feature (1)..(1415): Ortholog of  Ceres SEQ ID NO 12616895 as cited in SEQ ID NO 63909
  misc_feature (1)..(1415): Ortholog of  Ceres SEQ ID NO 14302096 as cited in SEQ ID NO 68356
  misc_feature (1)..(1415): Ortholog of  Ceres SEQ ID NO 13598574 as cited in SEQ ID NO 69083
tctctctgtctcctcacccgacgcccaaagaagcagagcaggcaacggcacagttagagagagagagagagaggcgcagagccaaggaagcggagcagagcaacagcagcaggtcgaggaagaggagaagagaaggtccaggagacagcacagcagccaggaagagcaagagcaagatgctgcgcgggggcacgggcatgctgggggtggtgaacttcataaccttcctgatctcgatcccgatccttggcggcggcatctggctggcgtcgcgggccaactccaccgactgcatccgcttcctgcagtggcccatcatcgtggtggggctcgtcctcatggtcgtctccctcatgggcttcgccggcgcctgctaccgccagacttggctgctccgcctctacctcttcgccatgttcttcgtcgtcctcgcgctcctcttcttcgtcgtcttcgccttcgccgtcaccgaccgcggcgccggccaggtcgtcatgagccgccgcttccccgagtaccagctctccgactacggcggatggctccgcgaccgcgtcgccgacccgcagtactgggccaccatcagcgcctgcctccgcgacggccacgcctgcgccggcatgaggcgcctcgcgcgggaccccaacacgggcatgctcgtgccggagacgcccgccatgttctacggccgcaacctctccccgattcagtctggatgctgcaagccaccgacgtcatgcgcattcacctacatgaacgagacgtactgggaacaaaaccccggtgtcccgaccgtgcccaatgaccctgactgcagcaggtggagcaacgaccagcagatgctgtgcttccagtgcgactcgtgcaaggccggcgtcctcgcgggcatcaagaagagctggcgcaaggtggccgtcctgaacatcgtggtgttgatcatccttgtgattgtctatgtcgcgggctgcgccgcgttccgcaacgccaagaggatcgacaacgacgagccggtgggcatggcgcggatgaccaagtcccatccaagcaggttccagttctaggcaggcagctgctgccgtcgcgggttcggaagcttctgccttgtacagatgatgaccagaccagtgggtggtgctaaggcctgggctttgctatatcttactgagatgtggattgtactgcatttgggggtgaaaaggggaagttcagtgtggtttgagttcgtgtttgatttagtgtttagggtaggtatgttatgtggtagggggtacaatatgggatctgcaagaaacaagagaagatcaatcatctaggaactgttctgtattggagatttttttttaaaaaaaaatctgggggatatttgtatgatggtgcttggtgccagccatgatggaatattttctgaatttctc

SEQ ID NO: 12961 - protein, 352 aa, Zea mays subsp. mays
  peptide (1)..(352): Ceres Seq. ID no. 12411474
SLSPHPTPKEAEQATAQLERERERRRAKEAEQSNSSRSRKRRREGPGDSTAARKSKSKMLRGGTGMLGVVNFITFLISIPILGGGIWLASRANSTDCIRFLQWPIIVVGLVLMVVSLMGFAGACYRQTWLLRLYLFAMFFVVLALLFFVVFAFAVTDRGAGQVVMSRRFPEYQLSDYGGWLRDRVADPQYWATISACLRDGHACAGMRRLARDPNTGMLVPETPAMFYGRNLSPIQSGCCKPPTSCAFTYMNETYWEQNPGVPTVPNDPDCSRWSNDQQMLCFQCDSCKAGVLAGIKKSWRKVAVLNIVVLIILVIVYVAGCAAFRNAKRIDNDEPVGMARMTKSHPSRFQF

SEQ ID NO: 12962 - protein, 294 aa, Zea mays subsp. mays
  peptide (1)..(294): Ceres Seq. ID no. 12411475
MLRGGTGMLGVVNFITFLISIPILGGGIWLASRANSTDCIRFLQWPIIVVGLVLMVVSLMGFAGACYRQTWLLRLYLFAMFFVVLALLFFVVFAFAVTDRGAGQVVMSRRFPEYQLSDYGGWLRDRVADPQYWATISACLRDGHACAGMRRLARDPNTGMLVPETPAMFYGRNLSPIQSGCCKPPTSCAFTYMNETYWEQNPGVPTVPNDPDCSRWSNDQQMLCFQCDSCKAGVLAGIKKSWRKVAVLNIVVLIILVIVYVAGCAAFRNAKRIDNDEPVGMARMTKSHPSRFQF

SEQ ID NO: 12963 - protein, 287 aa, Zea mays subsp. mays
  peptide (1)..(287): Ceres Seq. ID no. 12411476
MLGVVNFITFLISIPILGGGIWLASRANSTDCIRFLQWPIIVVGLVLMVVSLMGFAGACYRQTWLLRLYLFAMFFVVLALLFFVVFAFAVTDRGAGQVVMSRRFPEYQLSDYGGWLRDRVADPQYWATISACLRDGHACAGMRRLARDPNTGMLVPETPAMFYGRNLSPIQSGCCKPPTSCAFTYMNETYWEQNPGVPTVPNDPDCSRWSNDQQMLCFQCDSCKAGVLAGIKKSWRKVAVLNIVVLIILVIVYVAGCAAFRNAKRIDNDEPVGMARMTKSHPSRFQF

SEQ ID NO: 12964 - DNA, 470 bp, Zea mays subsp. mays
  misc_feature (1)..(470): Ceres Seq. ID no. 1341899
  misc_feature (1)..(470): Ortholog of  Ceres SEQ ID NO 13597732 as cited in SEQ ID NO 64810
  misc_feature (1)..(470): Ortholog of  Ceres SEQ ID NO 14301912 as cited in SEQ ID NO 67786
atcggttgtcattctcgtgattgtttcagtggaaacacgcgtgcaaattgagtgactgtctgggtgaataatctgaattggggtttttattctgtgtgttcttggtcgcaggtttattgatatggcagagtccttgtgtcagaaacgtgctttgraggctttccgtttagacccggcgaaatggggagtgaatgtgcaacctctatccggttcgcccgccaacttccatgtatacactgcactcttgaagccacatgaaaggatcatggctttggatcttcctcacggtggacatctttctcatggttaccagactgacactaagaagatatctgcaacttcaatattttttgagacaatgccttacagattggatgaaagcactggattgattgattacgatcagttggagaaaagcgctgttctttttaggccaaagttgatcattgctggtgcagtgcatatgctcg

SEQ ID NO: 12965 - protein, 116 aa, Zea mays subsp. mays
  peptide (1)..(116): Ceres Seq. ID no. 1341900
  misc_feature (12)..(12): Xaa is any aa, unknown or other
MAESLCQKRALXAFRLDPAKWGVNVQPLSGSPANFHVYTALLKPHERIMALDLPHGGHLSHGYQTDTKKISATSIFFETMPYRLDESTGLIDYDQLEKSAVLFRPKLIIAGAVHML

SEQ ID NO: 12966 - protein, 68 aa, Zea mays subsp. mays
  peptide (1)..(68): Ceres Seq. ID no. 1341901
MALDLPHGGHLSHGYQTDTKKISATSIFFETMPYRLDESTGLIDYDQLEKSAVLFRPKLIIAGAVHML

SEQ ID NO: 12967 - DNA, 1815 bp, Zea mays subsp. mays
  misc_feature (1)..(1815): Ceres Seq. ID no. 12355748
  misc_feature (1)..(1815): Ortholog of  Ceres SEQ ID NO 14315257 as cited in SEQ ID NO 52552
  misc_feature (1)..(1815): Ortholog of  Ceres SEQ ID NO 14314636 as cited in SEQ ID NO 56924
  misc_feature (1)..(1815): Ortholog of  Ceres SEQ ID NO 13594345 as cited in SEQ ID NO 58043
  misc_feature (1)..(1815): Ortholog of  Ceres SEQ ID NO 15171614 as cited in SEQ ID NO 60106
  misc_feature (1)..(1815): Ortholog of  Ceres SEQ ID NO 15168421 as cited in SEQ ID NO 60131
  misc_feature (1)..(1815): Ortholog of  Ceres SEQ ID NO 13597574 as cited in SEQ ID NO 64677
  misc_feature (1)..(1815): Ortholog of  Ceres SEQ ID NO 13597843 as cited in SEQ ID NO 64850
  misc_feature (1)..(1815): Ortholog of  Ceres SEQ ID NO 13597678 as cited in SEQ ID NO 65375
  misc_feature (1)..(1815): Ortholog of  Ceres SEQ ID NO 15176787 as cited in SEQ ID NO 66468
  misc_feature (1)..(1815): Ortholog of  Ceres SEQ ID NO 13596180 as cited in SEQ ID NO 67941
  misc_feature (1)..(1815): Ortholog of  Ceres SEQ ID NO 13591190 as cited in SEQ ID NO 68044
  misc_feature (1)..(1815): Ortholog of  Ceres SEQ ID NO 13595961 as cited in SEQ ID NO 68223
aaagtcaattcataaactcacaatggcggcaacggcataccccactgtggtgctcatcccactatgcgtcccaggccacctcgcgtccatgatcgaagccggcaagcggctgctcggcagaagccgctgccccatgtccctcaccgtgctcatcacgcagatgaccatgtccgccaacctgatgtccgacgtcgacgacatcatgcggcgggaagccgactccggcctggacatccgcttcgtccacctccccgccgtggagctccccaccgtccaccacggcctcgaggacttcatgatgcgcttcatacagctccacgcgacgcacgtcaaggaggccgtctccggcatgtcgtccccggtcgccgcggtcgtggtggactacttctgcaccaccctgttcgacgtcgcgcgcgagctcgcgctgccggcgtacgcctacatgccgtccggcgcgtcgatggtcgcgctcatgctgcggttaccggcgctggacggggaggtgtccggggacttcgaggcgatggaaggaacggtcgacctgcccgggatgccgccggtgccggctcgtctcatgccgtctccgctgatgaggaaggacccgaacttcgcgtggctggtgtaccatggcaaccgcttcatggaggccgacggcgtcatcgtcaacacggtagccgagctggagccgtccatcctcgcggccatcgccgacggcctctgcgtgtcaagacgccgcgctccggccgtctacccgatcggcccggtcctgcctctcaagccgccgtccgcgcccggcgacggcgagcaggtagtagcacagcggcacgagtgcgtgaggtggctcgacgcgcagcccccagcgtccgtcgtgctgctctgctttgggagcatgggcggcagcttcccgtcgccccaggtccgcgagatcgccgacggcctcgagcgcagcgggcaccgcttcctgtgggtgctccgtggcccgccaccgccggacggttccaagtacccgacggacgccaacgtccacgagctgctcccggaagggttcctggagaggacgaagggccgaggcctcgtgtggcccacgtgggcgccgcagaaggacatcctcgccaaccccgccgtcggcggcttcgtcacccactgcggctggaactccatcctcgagagcctgtggcacggcgtgccgatggtgcccttgccgcagttcgcggagcagcacctgaacgcgttcgagctcgtgtccgtcatgggcgtcgccgttgccatgcaggtggacaggaagcgcggcaacttcgtcgaggcggcggagctggagcgcgcggtccggtgcctgatgggcgggtcggaggaggaggggaggaaggcgcgggagaaggcgacggaggcgaaggccctgagccagaacggcgtggccagcggcgggtcgtcggacgcgtcggtgcagaaactggcgcgagagattttgcacaagcacgacgacaaggggtgtgccaccgcaagcggggagagcatgggcagcgtcgtcgttcccgcatctccggccagaataatatgatcccccgaacacggagaaatcgccgtcgtccacgaataaatcggaggccgccatgcgatccgtctggcactgctcacgttgtttgacattgttcagaatcgccgtgtgcactgtagtttcttatccgcagtagcttttaccattcgaaataatgtagcatagcaagcgctgcttcttcctaagtccgtgcagcgtagcccgcgtgttcgagctagtttgtgttaagttgaatgagttaatggatgctagttgtagtc

SEQ ID NO: 12968 - protein, 526 aa, Zea mays subsp. mays
  peptide (1)..(526): Ceres Seq. ID no. 12355749
MRPRPPRVHDRSRQAAARQKPLPHVPHRAHHADDHVRQPDVRRRRHHAAGSRLRPGHPLRPPPRRGAPHRPPRPRGLHDALHTAPRDARQGGRLRHVVPGRRGRGGLLLHHPVRRRARARAAGVRLHAVRRVDGRAHAAVTGAGRGGVRGLRGDGRNGRPARDAAGAGSSHAVSADEEGPELRVAGVPWQPLHGGRRRHRQHGSRAGAVHPRGHRRRPLRVKTPRSGRLPDRPGPASQAAVRARRRRAGSSTAARVREVARRAAPSVRRAALLWEHGRQLPVAPGPRDRRRPRAQRAPLPVGAPWPATAGRFQVPDGRQRPRAAPGRVPGEDEGPRPRVAHVGAAEGHPRQPRRRRLRHPLRLELHPREPVARRADGALAAVRGAAPERVRARVRHGRRRCHAGGQEARQLRRGGGAGARGPVPDGRVGGGGEEGAGEGDGGEGPEPERRGQRRVVGRVGAETGARDFAQARRQGVCHRKRGEHGQRRRSRISGQNNMIPRTRRNRRRPRINRRPPCDPSGTAHVV

SEQ ID NO: 12969 - protein, 518 aa, Zea mays subsp. mays
  peptide (1)..(518): Ceres Seq. ID no. 12355750
KSIHKLTMAATAYPTVVLIPLCVPGHLASMIEAGKRLLGRSRCPMSLTVLITQMTMSANLMSDVDDIMRREADSGLDIRFVHLPAVELPTVHHGLEDFMMRFIQLHATHVKEAVSGMSSPVAAVVVDYFCTTLFDVARELALPAYAYMPSGASMVALMLRLPALDGEVSGDFEAMEGTVDLPGMPPVPARLMPSPLMRKDPNFAWLVYHGNRFMEADGVIVNTVAELEPSILAAIADGLCVSRRRAPAVYPIGPVLPLKPPSAPGDGEQVVAQRHECVRWLDAQPPASVVLLCFGSMGGSFPSPQVREIADGLERSGHRFLWVLRGPPPPDGSKYPTDANVHELLPEGFLERTKGRGLVWPTWAPQKDILANPAVGGFVTHCGWNSILESLWHGVPMVPLPQFAEQHLNAFELVSVMGVAVAMQVDRKRGNFVEAAELERAVRCLMGGSEEEGRKAREKATEAKALSQNGVASGGSSDASVQKLAREILHKHDDKGCATASGESMGSVVVPASPARII

SEQ ID NO: 12970 - protein, 511 aa, Zea mays subsp. mays
  peptide (1)..(511): Ceres Seq. ID no. 12355751
MAATAYPTVVLIPLCVPGHLASMIEAGKRLLGRSRCPMSLTVLITQMTMSANLMSDVDDIMRREADSGLDIRFVHLPAVELPTVHHGLEDFMMRFIQLHATHVKEAVSGMSSPVAAVVVDYFCTTLFDVARELALPAYAYMPSGASMVALMLRLPALDGEVSGDFEAMEGTVDLPGMPPVPARLMPSPLMRKDPNFAWLVYHGNRFMEADGVIVNTVAELEPSILAAIADGLCVSRRRAPAVYPIGPVLPLKPPSAPGDGEQVVAQRHECVRWLDAQPPASVVLLCFGSMGGSFPSPQVREIADGLERSGHRFLWVLRGPPPPDGSKYPTDANVHELLPEGFLERTKGRGLVWPTWAPQKDILANPAVGGFVTHCGWNSILESLWHGVPMVPLPQFAEQHLNAFELVSVMGVAVAMQVDRKRGNFVEAAELERAVRCLMGGSEEEGRKAREKATEAKALSQNGVASGGSSDASVQKLAREILHKHDDKGCATASGESMGSVVVPASPARII

SEQ ID NO: 12971 - DNA, 1060 bp, Zea mays subsp. mays
  misc_feature (1)..(1060): Ceres Seq. ID no. 12340681
  misc_feature (1)..(1060): Ortholog of  Ceres SEQ ID NO 14311219 as cited in SEQ ID NO 56635
  misc_feature (1)..(1060): Ortholog of  Ceres SEQ ID NO 15169615 as cited in SEQ ID NO 66708
  misc_feature (1)..(1060): Ortholog of  Ceres SEQ ID NO 15169619 as cited in SEQ ID NO 67512
agagaagatgttcgacgagatgcacgctctgttccacgagctgaagagcgggcatgcgcctgtccagcgtgctcttcccctacgcccccacgccgacgaaccgccggcgcgacagggcgcgcgccaagctgttaaagatattcagcgaggtcgtgcggtcccggaggaggcggggcgaggaggagaaggagaaggaggaggacgtgctgcagagcctgatcgattccaggtacaaggacgggcgggccacgaccgaggaggaggtcaccggcatgatcatcctcctggtcttcggcgggatggacacgagcacgctcgccagcacctggaccggcgcgcgcctgctcagcaccccggcggccatggcagccgcggtcgaggagcagaggcggatcctcaccgaccacgggcacggggcaccgcgtcggctacagtgaattcatgcagatgaccaccctccactggagcatcaaggaggcgctgaggatgcaccctccgtcggcggtgttcttccgcaaggcgcggaggagcttcggcgtgcggacgagagacggccgcgagtacgaggtcccgggtgggcatacggtggcgagccccgtgctgttcaacagccacctgcctagcgtgtacaaggaccccgacgtgtacgacccgacccggtttgggcctgggagggaggaggacagggccggcggtaagttcacctacgaggcgtttagctgcgggcggcacagctgcgtcggcgaggcgtacgcgtatctgcagatcaaggtgatgctcagccatttgctgaggaacttccagctcgagctcgtgtcccctttccctcagacagattgggggaagctggtgcctgagcctaaagggaaagtgatggtcaggtacaagaggcagcgcctgctctcagtgcctagctagtagaagatggctagtacaagaagaaactagtgtggacaaagctggggatgtgtgtgtttatcggcctgtactgtagcatgtgtaattatgtttgcctgtttaatctctatggcgatcggcttagaaaacctgttgacacttg

SEQ ID NO: 12972 - protein, 158 aa, Zea mays subsp. mays
  peptide (1)..(158): Ceres Seq. ID no. 12340682
MQMTTLHWSIKEALRMHPPSAVFFRKARRSFGVRTRDGREYEVPGGHTVASPVLFNSHLPSVYKDPDVYDPTRFGPGREEDRAGGKFTYEAFSCGRHSCVGEAYAYLQIKVMLSHLLRNFQLELVSPFPQTDWGKLVPEPKGKVMVRYKRQRLLSVPS

SEQ ID NO: 12973 - protein, 156 aa, Zea mays subsp. mays
  peptide (1)..(156): Ceres Seq. ID no. 12340683
MTTLHWSIKEALRMHPPSAVFFRKARRSFGVRTRDGREYEVPGGHTVASPVLFNSHLPSVYKDPDVYDPTRFGPGREEDRAGGKFTYEAFSCGRHSCVGEAYAYLQIKVMLSHLLRNFQLELVSPFPQTDWGKLVPEPKGKVMVRYKRQRLLSVPS

SEQ ID NO: 12974 - protein, 149 aa, Zea mays subsp. mays
  peptide (1)..(149): Ceres Seq. ID no. 12340684
EKMFDEMHALFHELKSGHAPVQRALPLRPHADEPPARQGARQAVKDIQRGRAVPEEAGRGGEGEGGGRAAEPDRFQVQGRAGHDRGGGHRHDHPPGLRRDGHEHARQHLDRRAPAQHPGGHGSRGRGAEADPHRPRARGTASATVNSCR

SEQ ID NO: 12975 - DNA, 1845 bp, Zea mays subsp. mays
  misc_feature (1)..(1845): Ceres Seq. ID no. 12423896
  misc_feature (1)..(1845): Ortholog of  Ceres SEQ ID NO 15171245 as cited in SEQ ID NO 52264
  misc_feature (1)..(1845): Ortholog of  Ceres SEQ ID NO 14303576 as cited in SEQ ID NO 68428
gagtgtctcgtgctgctgcttccgctgcagtaaaatacggggaagaggaggggagggagacgcggccgctgcctgccgcacatgctttaagtcccactccccacctccccagatctccgccctcctccccaccgcccccattcctcccctcggccgcaaccgtagccgccgcactacggagcaagatcgtcgggtagacggacgggcgggcgggcgggcgcggctctgtatctatctgtcggtgggagaccgcgtgtgtcggttaggcggcgggtggcaaggaagaatggcggcgagcggcagatccgtcgcgtgctgtgccgccgcgctgctcgcggccgcgttgctcctctccgcaccgactgcaacagaggcttatgattcgctggatccaaatggcaacatcaccataaaatgggatatcatgcagtggactcctgatggatatgtcgctgttgtcacaatgtttaattatcaacaatttcggcatatcggcgcacctggttggcagcttgggtggacatgggcaaagaaggaggttatatggtcaatggttggggctcagaccactgaacagggcgactgctcaaagttcaagagcagcccaccccattgctgcaagaaagatccaacaattgtcgatttacttccaggcactccatacaacatgcaaattgccaattgctgcaaggcaggagttgtaaatacctttaaccaggacccagcaaatgctgcttcctccttccagatcagtgttggtcttgctggaactaccaataaaactgttaaggtgcccaggaacttcactcttaagactccaggccctgggtacacatgtgggcgtgccattgttggcaggcctacgaagtttttcaccgcggacgggcgcagggcaacccaagctctaatgacatggaatgtgacctgcacatattcccaatttcttgctcagaagactccatcctgctgtgtatctctatcatcgttttataatgacacaattgtgaactgcccaacatgctcatgtggctgccagaacccaagtgggtcaaactgtgtgaatgaggattcacctaatctacaagctgcaattgatggccctggcaaatgcactggtcagccccttgtacaatgcacttcccacatgtgcccgataagaatccactggcatgtgaagctcaactacaaggattactggagagtgaaaatcactatcacaaacttcaacttccgcatgaattacacgcagtggaacttagtagcccagcatccaaactttgataatatcactcagttgttcagcttcaactacaaaccacttactccatatggtggtggcataaatgatacggcaatgttctggggtgtaaaattctacaatgatctgctgatgcaagccggcaaacttgggaatgtgcaatcagagctgcttctccgcaaggactcccggactttcactttcgaaaagggatgggccttcccacgccgagtttacttcaatggtgataattgtgtcatgccatctcctgaaaattatccatggctgccgaatgcaagccctctaacaaaaccattggcactcccattcttggtattctgggttgccttggctgctctgttggcttatgcatgattagtgggatcaagaggtttagcaagtttcaagttgatgtcagattccatgaggtgcactgcaacaagtcatttgttcattcaattccatggttgcacagaaaagatgaggcgatgccaagaaaaagtcgatatgtctatgtgtttaagttaaagggccaaaatgtatttcttgtttggtatataacagccctacaacactttggtgaactg

SEQ ID NO: 12976 - protein, 543 aa, Zea mays subsp. mays
  peptide (1)..(543): Ceres Seq. ID no. 12423897
SVSCCCFRCSKIRGRGGEGDAAAACRTCFKSHSPPPQISALLPTAPIPPLGRNRSRRTTEQDRRVDGRAGGRARLCIYLSVGDRVCRLGGGWQGRMAASGRSVACCAAALLAAALLLSAPTATEAYDSLDPNGNITIKWDIMQWTPDGYVAVVTMFNYQQFRHIGAPGWQLGWTWAKKEVIWSMVGAQTTEQGDCSKFKSSPPHCCKKDPTIVDLLPGTPYNMQIANCCKAGVVNTFNQDPANAASSFQISVGLAGTTNKTVKVPRNFTLKTPGPGYTCGRAIVGRPTKFFTADGRRATQALMTWNVTCTYSQFLAQKTPSCCVSLSSFYNDTIVNCPTCSCGCQNPSGSNCVNEDSPNLQAAIDGPGKCTGQPLVQCTSHMCPIRIHWHVKLNYKDYWRVKITITNFNFRMNYTQWNLVAQHPNFDNITQLFSFNYKPLTPYGGGINDTAMFWGVKFYNDLLMQAGKLGNVQSELLLRKDSRTFTFEKGWAFPRRVYFNGDNCVMPSPENYPWLPNASPLTKPLALPFLVFWVALAALLAYA

SEQ ID NO: 12977 - protein, 448 aa, Zea mays subsp. mays
  peptide (1)..(448): Ceres Seq. ID no. 12423898
MAASGRSVACCAAALLAAALLLSAPTATEAYDSLDPNGNITIKWDIMQWTPDGYVAVVTMFNYQQFRHIGAPGWQLGWTWAKKEVIWSMVGAQTTEQGDCSKFKSSPPHCCKKDPTIVDLLPGTPYNMQIANCCKAGVVNTFNQDPANAASSFQISVGLAGTTNKTVKVPRNFTLKTPGPGYTCGRAIVGRPTKFFTADGRRATQALMTWNVTCTYSQFLAQKTPSCCVSLSSFYNDTIVNCPTCSCGCQNPSGSNCVNEDSPNLQAAIDGPGKCTGQPLVQCTSHMCPIRIHWHVKLNYKDYWRVKITITNFNFRMNYTQWNLVAQHPNFDNITQLFSFNYKPLTPYGGGINDTAMFWGVKFYNDLLMQAGKLGNVQSELLLRKDSRTFTFEKGWAFPRRVYFNGDNCVMPSPENYPWLPNASPLTKPLALPFLVFWVALAALLAYA

SEQ ID NO: 12978 - protein, 402 aa, Zea mays subsp. mays
  peptide (1)..(402): Ceres Seq. ID no. 12423899
MQWTPDGYVAVVTMFNYQQFRHIGAPGWQLGWTWAKKEVIWSMVGAQTTEQGDCSKFKSSPPHCCKKDPTIVDLLPGTPYNMQIANCCKAGVVNTFNQDPANAASSFQISVGLAGTTNKTVKVPRNFTLKTPGPGYTCGRAIVGRPTKFFTADGRRATQALMTWNVTCTYSQFLAQKTPSCCVSLSSFYNDTIVNCPTCSCGCQNPSGSNCVNEDSPNLQAAIDGPGKCTGQPLVQCTSHMCPIRIHWHVKLNYKDYWRVKITITNFNFRMNYTQWNLVAQHPNFDNITQLFSFNYKPLTPYGGGINDTAMFWGVKFYNDLLMQAGKLGNVQSELLLRKDSRTFTFEKGWAFPRRVYFNGDNCVMPSPENYPWLPNASPLTKPLALPFLVFWVALAALLAYA

SEQ ID NO: 12979 - DNA, 610 bp, Zea mays subsp. mays
  misc_feature (1)..(610): Ceres Seq. ID no. 12341320
  misc_feature (1)..(610): Ortholog of  Ceres SEQ ID NO 12634455 as cited in SEQ ID NO 0
aatcttgccgctccaaccaattcgtcttggttgccgacacggcacctcgtcggaatcaggtggcgcgacctcctcgccggccggcgcgacaccaccatgggcccggaagcagtgcggaaaagcctggagcccaccgcaaccgccgaggaaatcactggctccacccctgcgcggctccacttctacgaccccttcgtcctcagcggcgtccgtatcgaagccgccgagcacggccgcctcctctgctctttcgtcgtcacccctcgcctcgcgagtcccgtgggatacctccgcagcggtgtcacagcgacgctcgccgaccagctgggatcggctgtgttcttctgcagtgggatccccagcagcggggtctccatcgagatcagcgtctcctttgtcgactcggctgccgtcggggaggaaatagaggttgagggaaagttattgcgtgctggaaaatcagtcggtgtcgtctccgtagatttcaggaagaaaaagacagggaatgaataaggattgggtggattttttaagttgggttatagaggtctatactttgttcgttgtgcaggcatggtgacagaataaaagcatgaaggcattgcactgc

SEQ ID NO: 12980 - protein, 170 aa, Zea mays subsp. mays
  peptide (1)..(170): Ceres Seq. ID no. 12341321
NLAAPTNSSWLPTRHLVGIRWRDLLAGRRDTTMGPEAVRKSLEPTATAEEITGSTPARLHFYDPFVLSGVRIEAAEHGRLLCSFVVTPRLASPVGYLRSGVTATLADQLGSAVFFCSGIPSSGVSIEISVSFVDSAAVGEEIEVEGKLLRAGKSVGVVSVDFRKKKTGNE

SEQ ID NO: 12981 - protein, 143 aa, Zea mays subsp. mays
  peptide (1)..(143): Ceres Seq. ID no. 12341322
SCRSNQFVLVADTAPRRNQVARPPRRPARHHHGPGSSAEKPGAHRNRRGNHWLHPCAAPLLRPLRPQRRPYRSRRARPPPLLFRRHPSPRESRGIPPQRCHSDARRPAGIGCVLLQWDPQQRGLHRDQRLLCRLGCRRGGNRG

SEQ ID NO: 12982 - protein, 141 aa, Zea mays subsp. mays
  peptide (1)..(141): Ceres Seq. ID no. 12341323
ILPLQPIRLGCRHGTSSESGGATSSPAGATPPWARKQCGKAWSPPQPPRKSLAPPLRGSTSTTPSSSAASVSKPPSTAASSALSSSPLASRVPWDTSAAVSQRRSPTSWDRLCSSAVGSPAAGSPSRSASPLSTRLPSGRK

SEQ ID NO: 12983 - protein, 138 aa, Zea mays subsp. mays
  peptide (1)..(138): Ceres Seq. ID no. 12341324
MGPEAVRKSLEPTATAEEITGSTPARLHFYDPFVLSGVRIEAAEHGRLLCSFVVTPRLASPVGYLRSGVTATLADQLGSAVFFCSGIPSSGVSIEISVSFVDSAAVGEEIEVEGKLLRAGKSVGVVSVDFRKKKTGNE

SEQ ID NO: 12984 - DNA, 1918 bp, Zea mays subsp. mays
  misc_feature (1)..(1918): Ceres Seq. ID no. 12345175
  misc_feature (1)..(1918): Ortholog of  Ceres SEQ ID NO 14311870 as cited in SEQ ID NO 51574
  misc_feature (1)..(1918): Ortholog of  Ceres SEQ ID NO 15174583 as cited in SEQ ID NO 53693
  misc_feature (1)..(1918): Ortholog of  Ceres SEQ ID NO 13581563 as cited in SEQ ID NO 58942
  misc_feature (1)..(1918): Ortholog of  Ceres SEQ ID NO 13658707 as cited in SEQ ID NO 66286
  misc_feature (1)..(1918): Ortholog of  Ceres SEQ ID NO 13654528 as cited in SEQ ID NO 68080
gttctatctccttctccactgggccaactccgctctactctccaatcccaggcgaatccctcgtcttcttcgaccgcgtgtcggagcttcatcttctctggcccccctgccctgatttgccgctccgctctcccccccttccgccggaaaggggggaaattgatggcgaggctagtggctctggcatcggcggtggcggttctggtactcggcctcgcctgtgcagaggcggagccacagtgcacgcggcgccgcccgcccgcgccgccgcggccgcacagcgtgacgatcaccgagttcggggccgttggtgacggcgtcaccctcaacaccgtgtccttccagaacgccgtcttctacctgcgctccttcgccgacaagggcggcgcgcagctgtacattcccaggggccggtggctcaccggcagtttcaatctcaccagccaccttaccctcttcctggagagtggcgctgtcatcgttggcacgcaggacgtttcacagtggcctgttgttgaacctttgccatcatatggacgaggaatggaccttccaggttcgaggcatcgaagcttaataaacgggcagaatctaattgatgttgtaattacgggaaacaatggaacaatcgatggccagggttctacatggtggaactggtttcgttcgaataagttgaactatagccgccctcatcttgtggagtttgtggactctgagcaaatcgtcatttcgaacataacatttttaaattcccctgcttggagtatacatccagtgtattgcagcaatgtagtggtccatagtgtcacaattcagacttcattggatgctccacttaatcatggaatcgttccagattcttgctcaaatatgtgcatcgaggacagcagtatcagtgttagccacgacgccatatcactaaaaagcgggtgggacaagcaaggcattgctttcgggaggccaacctcagacatccacataagcagactggatctgcagtcctcactgggcgccgctctcacgttcgggagcgagatgtcgggcgggatctcagacgtccatgcggaccgcctcctcatccactcttcgttcagaggcgtcttcttcaagaccgcgccgggacgcggaggctatatcagagacaccgtgatctcagacgtccagatggaagacgtcgacgtcgccatcgcattcactggtgactggccaagccacccagatgaccagttcgacccgaccgcgctcccggtggtcagccacatcaccctgaagaacatgactggaacaagaatctcggtcgctggcgttttgtcaggaatcgccggcgacccgttcaccgacatctgcctctccaacatcaacttctcactggccgattcggccagtcccacctcccactggtcttgctccaacgtctccggatactccgagctggtcttccctgagccttgcctggatctgcagacccaatcctcagatgcctccatctgctccaccctccctagcttccacgccgccgccattgcagcagcgtaaatgcacagagtacaaagtgtccatcctttttcctgttcccggtcccctgcacacttcagaggatctctcaagccgccttttcctcccccgacaattctttgaagctataggcgcgctcccgtcgttgaagaaaagaatcgttcaccgtttttctccggccgtcggcttcgagggctcagctgcatcgcctttcttgcgggaggcaagcctggcggcggacggtcgacatcgagctgttaatttgcttgtacagttatgatttcttcattcaatctgtaagaaggaatttttgtggtagtagagggttgagtcgagtccagagagttgcttcatacgattgtcgatttggtgaataaaacacatgatggattcatgatcc

SEQ ID NO: 12985 - protein, 512 aa, Zea mays subsp. mays
  peptide (1)..(512): Ceres Seq. ID no. 12345176
VLSPSPLGQLRSTLQSQANPSSSSTACRSFIFSGPPALICRSALPPFRRKGGKLMARLVALASAVAVLVLGLACAEAEPQCTRRRPPAPPRPHSVTITEFGAVGDGVTLNTVSFQNAVFYLRSFADKGGAQLYIPRGRWLTGSFNLTSHLTLFLESGAVIVGTQDVSQWPVVEPLPSYGRGMDLPGSRHRSLINGQNLIDVVITGNNGTIDGQGSTWWNWFRSNKLNYSRPHLVEFVDSEQIVISNITFLNSPAWSIHPVYCSNVVVHSVTIQTSLDAPLNHGIVPDSCSNMCIEDSSISVSHDAISLKSGWDKQGIAFGRPTSDIHISRLDLQSSLGAALTFGSEMSGGISDVHADRLLIHSSFRGVFFKTAPGRGGYIRDTVISDVQMEDVDVAIAFTGDWPSHPDDQFDPTALPVVSHITLKNMTGTRISVAGVLSGIAGDPFTDICLSNINFSLADSASPTSHWSCSNVSGYSELVFPEPCLDLQTQSSDASICSTLPSFHAAAIAAA

SEQ ID NO: 12986 - protein, 458 aa, Zea mays subsp. mays
  peptide (1)..(458): Ceres Seq. ID no. 12345177
MARLVALASAVAVLVLGLACAEAEPQCTRRRPPAPPRPHSVTITEFGAVGDGVTLNTVSFQNAVFYLRSFADKGGAQLYIPRGRWLTGSFNLTSHLTLFLESGAVIVGTQDVSQWPVVEPLPSYGRGMDLPGSRHRSLINGQNLIDVVITGNNGTIDGQGSTWWNWFRSNKLNYSRPHLVEFVDSEQIVISNITFLNSPAWSIHPVYCSNVVVHSVTIQTSLDAPLNHGIVPDSCSNMCIEDSSISVSHDAISLKSGWDKQGIAFGRPTSDIHISRLDLQSSLGAALTFGSEMSGGISDVHADRLLIHSSFRGVFFKTAPGRGGYIRDTVISDVQMEDVDVAIAFTGDWPSHPDDQFDPTALPVVSHITLKNMTGTRISVAGVLSGIAGDPFTDICLSNINFSLADSASPTSHWSCSNVSGYSELVFPEPCLDLQTQSSDASICSTLPSFHAAAIAAA

SEQ ID NO: 12987 - protein, 331 aa, Zea mays subsp. mays
  peptide (1)..(331): Ceres Seq. ID no. 12345178
MDLPGSRHRSLINGQNLIDVVITGNNGTIDGQGSTWWNWFRSNKLNYSRPHLVEFVDSEQIVISNITFLNSPAWSIHPVYCSNVVVHSVTIQTSLDAPLNHGIVPDSCSNMCIEDSSISVSHDAISLKSGWDKQGIAFGRPTSDIHISRLDLQSSLGAALTFGSEMSGGISDVHADRLLIHSSFRGVFFKTAPGRGGYIRDTVISDVQMEDVDVAIAFTGDWPSHPDDQFDPTALPVVSHITLKNMTGTRISVAGVLSGIAGDPFTDICLSNINFSLADSASPTSHWSCSNVSGYSELVFPEPCLDLQTQSSDASICSTLPSFHAAAIAAA

SEQ ID NO: 12988 - DNA, 1534 bp, Zea mays subsp. mays
  misc_feature (1)..(1534): Ceres Seq. ID no. 12411463
  misc_feature (1)..(1534): Ortholog of  Ceres SEQ ID NO 14311981 as cited in SEQ ID NO 55703
  misc_feature (1)..(1534): Ortholog of  Ceres SEQ ID NO 15226227 as cited in SEQ ID NO 63433
  misc_feature (1)..(1534): Ortholog of  Ceres SEQ ID NO 13599003 as cited in SEQ ID NO 0
agacagaatgttcccttccaagaaggccactagtagcgcagccgcagccgttgccgccgtgagctcaaatgatagcaggcagcaggcgatgtgcgtgcaggccgactcggggtcgggcctcgtcctcaccaccaccccaagccccgcctccgctggaccgtcgagctccacgagcgcttcgtcgacgccgtcacgcagctcggtggccccgacaaggcgactcccaagaccatcatgagggtcatgggagtcaaggggcttaccctctaccacctcaagagccatcttcagaaattcaggttagggaagcagccgcacaaggagttcaacgagcactcggttaaggacgcggccgcagcaatggagatgcaacggaacgccgcctcttcttcaggcatgatgggaagaagcatgaacgaccgcagcgtgcacatgaacgaggctatcaggatgcaaatggaagtccagagaaggctacatgaacagctagaggtgcaaaggcatctccagatgaggatcgaagcccagggcaagtacatgcagtccatcctggagaaagcctaccagaccatcgccaccggcgacctggctgcgtgcagcccggtggctgcagggtacaaatccctgctaggtaacccgcaggcgatgctggacgtctgctcgctcaaggacatggccccgtccatgggcttcccttcgctgcaagacctgcacatgtacggcggcggcggcggccactgcctggacctgcagcagcagatggagcggccgatggaggccttcttcgccagctgcgacatcgggtcgctggccaagaagaggcccgtcagcccttacgccgacgacgacggcggcaagagcccgatgctgtggggcgaggacgacgagggcaagggcatcgtcgaccatttccagatggcgccgccgatgatggacgccgccggcatcgacgtcatggactccatcgccgacgtgtacggcgacgccaagcacatgaccatgtccagcgactccacggggagcaagggcggcggcttcgacgtcaggctcgagcggccatcgctgcggcggccgcacatgggcggcagcccgtcggtgctcggcggaggccagacgaggaacctgtcctacgggtaactagctcgtcgctctgatgatgattaaccatccgatccggcgtgcttaattaattaactcgcagtgaaactaaaattaattaaagcaggcgattattattaaccggtgcaaaacggctacaaataaataagtaaagctagcgctgtagcaggcatgcataatataatggcggagatacatatatatatttatagcataagtgtcattaattcatgatcacgagattgatgatcttaccgtggcgcatcacttgctggatgatgctccaagataatctattttgagcgagaggagatgtatgttccatgtaattgtagtgctgttgatgggtgtaaatgcatgtgcaacttattaattggtaattttgcatgctgaggaaacaatctttctttggtct

SEQ ID NO: 12989 - protein, 300 aa, Zea mays subsp. mays
  peptide (1)..(300): Ceres Seq. ID no. 12411464
MRVMGVKGLTLYHLKSHLQKFRLGKQPHKEFNEHSVKDAAAAMEMQRNAASSSGMMGRSMNDRSVHMNEAIRMQMEVQRRLHEQLEVQRHLQMRIEAQGKYMQSILEKAYQTIATGDLAACSPVAAGYKSLLGNPQAMLDVCSLKDMAPSMGFPSLQDLHMYGGGGGHCLDLQQQMERPMEAFFASCDIGSLAKKRPVSPYADDDGGKSPMLWGEDDEGKGIVDHFQMAPPMMDAAGIDVMDSIADVYGDAKHMTMSSDSTGSKGGGFDVRLERPSLRRPHMGGSPSVLGGGQTRNLSYG

SEQ ID NO: 12990 - protein, 297 aa, Zea mays subsp. mays
  peptide (1)..(297): Ceres Seq. ID no. 12411465
MGVKGLTLYHLKSHLQKFRLGKQPHKEFNEHSVKDAAAAMEMQRNAASSSGMMGRSMNDRSVHMNEAIRMQMEVQRRLHEQLEVQRHLQMRIEAQGKYMQSILEKAYQTIATGDLAACSPVAAGYKSLLGNPQAMLDVCSLKDMAPSMGFPSLQDLHMYGGGGGHCLDLQQQMERPMEAFFASCDIGSLAKKRPVSPYADDDGGKSPMLWGEDDEGKGIVDHFQMAPPMMDAAGIDVMDSIADVYGDAKHMTMSSDSTGSKGGGFDVRLERPSLRRPHMGGSPSVLGGGQTRNLSYG

SEQ ID NO: 12991 - protein, 258 aa, Zea mays subsp. mays
  peptide (1)..(258): Ceres Seq. ID no. 12411466
MEMQRNAASSSGMMGRSMNDRSVHMNEAIRMQMEVQRRLHEQLEVQRHLQMRIEAQGKYMQSILEKAYQTIATGDLAACSPVAAGYKSLLGNPQAMLDVCSLKDMAPSMGFPSLQDLHMYGGGGGHCLDLQQQMERPMEAFFASCDIGSLAKKRPVSPYADDDGGKSPMLWGEDDEGKGIVDHFQMAPPMMDAAGIDVMDSIADVYGDAKHMTMSSDSTGSKGGGFDVRLERPSLRRPHMGGSPSVLGGGQTRNLSYG

SEQ ID NO: 12992 - DNA, 1292 bp, Zea mays subsp. mays
  misc_feature (1)..(1292): Ceres Seq. ID no. 12411459
  misc_feature (1)..(1292): Ortholog of  Ceres SEQ ID NO 13590307 as cited in SEQ ID NO 67154
aatctacgcaacacaaggtaggatcaatcaatcaagtccatcatgctgccaagttctctcctccagaggctggcaagttggtgcccgtggttgctgagagatgagccgaagcagcctgttaaggttctcgtcaccggcgctgcggggcagattgggtacgccatagtcgccatgatcgcgaggggtctgatgcttgggccagaccagccggtggttctccacatgctggacctccctaagtcaacggacgccctgagcggcgtcaggatggagctgatcgatgccgcgttgcctcttctcagaggtgtcgtggctacgagtgacgaggccgaagcgttccgaggcgtcagcttcgccgtcctgatcggcggatggccgagaaaagaggggatgcagaggaaagacctcatcgccaagaacgtccccatataccagtcccaggcctctgcgctgcagcagcacgctgccccaaactgcaaggttcttgtcgtggcaaaccctgcgaacacgaacgcgctcgtgctgaaggagttggcgcccgcggtgcccgccaagaacatcacctgcctcacgcgtctcgaccacaaccgcgccctgggccagatctccgagaagctgggcgtgcacatcggcgacgtcaggaacgccatagtgtgggggaaccactcctccacgcagttccccgacgccagccacgccatcgccaggacgcagcacggggagaagcccgtcagggagctcatcgccgacgagaaatggtttaaggaggagttcgtcagcgtcgtgcagcagcgcggcgaggcggtgatcaaggcgcgcaagcagtccagctcgctgtccgccgccagtgcggcctgtgatcacatgagagactggatccttggcaccccgaagggcacgtgggtgtctatgggtgtgtgctctgacgggagctatggcgttcccaagggcatcttctactcatttccggtgacatgcgagaagggagagtggtctatcgtgcagggtgagttcttatcattataccagattagtagcaacagcagcaccaccgttcttgacatgatttgtttattgttcgaggtcttgaggttgatgacttcgcacgatccaagatggagctttcggcgaatgaactcgatgaagagaggtccatggcgtatgagttcgtcgccagctctgaaagccatcagtagatcacttgtgtatacatgagtcatatgtaaacgaaaaaaatgggtgaacaacagacagttgcttcacaacaaccaataaagcagaaatattgcttg

SEQ ID NO: 12993 - protein, 390 aa, Zea mays subsp. mays
  peptide (1)..(390): Ceres Seq. ID no. 12411460
MLPSSLLQRLASWCPWLLRDEPKQPVKVLVTGAAGQIGYAIVAMIARGLMLGPDQPVVLHMLDLPKSTDALSGVRMELIDAALPLLRGVVATSDEAEAFRGVSFAVLIGGWPRKEGMQRKDLIAKNVPIYQSQASALQQHAAPNCKVLVVANPANTNALVLKELAPAVPAKNITCLTRLDHNRALGQISEKLGVHIGDVRNAIVWGNHSSTQFPDASHAIARTQHGEKPVRELIADEKWFKEEFVSVVQQRGEAVIKARKQSSSLSAASAACDHMRDWILGTPKGTWVSMGVCSDGSYGVPKGIFYSFPVTCEKGEWSIVQGEFLSLYQISSNSSTTVLDMICLLFEVLRLMTSHDPRWSFRRMNSMKRGPWRMSSSPALKAISRSLVYT

SEQ ID NO: 12994 - protein, 347 aa, Zea mays subsp. mays
  peptide (1)..(347): Ceres Seq. ID no. 12411461
MIARGLMLGPDQPVVLHMLDLPKSTDALSGVRMELIDAALPLLRGVVATSDEAEAFRGVSFAVLIGGWPRKEGMQRKDLIAKNVPIYQSQASALQQHAAPNCKVLVVANPANTNALVLKELAPAVPAKNITCLTRLDHNRALGQISEKLGVHIGDVRNAIVWGNHSSTQFPDASHAIARTQHGEKPVRELIADEKWFKEEFVSVVQQRGEAVIKARKQSSSLSAASAACDHMRDWILGTPKGTWVSMGVCSDGSYGVPKGIFYSFPVTCEKGEWSIVQGEFLSLYQISSNSSTTVLDMICLLFEVLRLMTSHDPRWSFRRMNSMKRGPWRMSSSPALKAISRSLVYT

SEQ ID NO: 12995 - protein, 341 aa, Zea mays subsp. mays
  peptide (1)..(341): Ceres Seq. ID no. 12411462
MLGPDQPVVLHMLDLPKSTDALSGVRMELIDAALPLLRGVVATSDEAEAFRGVSFAVLIGGWPRKEGMQRKDLIAKNVPIYQSQASALQQHAAPNCKVLVVANPANTNALVLKELAPAVPAKNITCLTRLDHNRALGQISEKLGVHIGDVRNAIVWGNHSSTQFPDASHAIARTQHGEKPVRELIADEKWFKEEFVSVVQQRGEAVIKARKQSSSLSAASAACDHMRDWILGTPKGTWVSMGVCSDGSYGVPKGIFYSFPVTCEKGEWSIVQGEFLSLYQISSNSSTTVLDMICLLFEVLRLMTSHDPRWSFRRMNSMKRGPWRMSSSPALKAISRSLVYT

SEQ ID NO: 12996 - DNA, 1981 bp, Zea mays subsp. mays
  misc_feature (1)..(1981): Ceres Seq. ID no. 12372957
  misc_feature (1)..(1981): Ortholog of  Ceres SEQ ID NO 14311183 as cited in SEQ ID NO 58495
  misc_feature (1)..(1981): Ortholog of  Ceres SEQ ID NO 15169627 as cited in SEQ ID NO 64517
  misc_feature (1)..(1981): Ortholog of  Ceres SEQ ID NO 14307952 as cited in SEQ ID NO 66029
  misc_feature (1)..(1981): Ortholog of  Ceres SEQ ID NO 13502874 as cited in SEQ ID NO 66298
  misc_feature (1)..(1981): Ortholog of  Ceres SEQ ID NO 12614124 as cited in SEQ ID NO 68392
aaccaactcatgctcgacggaccacctcgtcggagcttcgcatttatcgtgccgtccatgtccatgcaacagccgacgaacgccgcaagccaacttcacgccgcgatggaagcgccattgtcgctctcgtcactgcagctcgccttcacggcggtcgcggcgatcgcggcgctggccgtcgcggtggccgtcacgaggtacaaccggagatacatgggcctgaggctgcctccgggcccgcccgggtggcccgtcgtcggcaacctcttccaggtggcgttctccggcaagctcttcatccactacatccgcgagctccgcaaggagtacggccccatcctgacgctgcgcatgggggagcgcacgctcgtgatcatcagcagcgccgagctcgcgcacgaggcgctggtggagaaagggcgggagttcgcgagccggccccgggagaacaccacgcgcaacatcttctcgtccaacaagctcaccgtgaactccgcggtgtacgggcccgagtggcggtcgctcgccggaacatggtgtccgggatgctgagcacgtcgcggctcagggagttccggcacgcccggaggcgcgccatggaccggttcgtgtcgcggatgcgcgccgaggccgcggcgtcgcccgacggcgcgtccgtctgggtgctccgcaacgcgcggttcgccgtgttctgcatcctgctcgacatgaccttcggcctgctggacctccgcgaggagcacatcgtgcgcatcgacgccgtcatgaagcgcgtgctgctcgccgtcggcgtgcgcatggacgactacctcccgttcctccgcccgttcttctggcggcaccagcgccgtgccctcgccgtccgccgcgagcagatcgacaccctgctcccgctcatcaacaggcggcgcgcaatgcttcgcgacatgcagcagaggcagagctcatcgccgctgcccgaccccagcgtcgcagcgcccttctcgtacctcgactccgtgctcgacctccgcatcgagggccgcgacgacggcgcgctcaccgacgacgagctggtgacgctctgcgcggagctgttgaatggcggcaccgacaccacggccaccgcgatcgagtggggcatggcgcgcatcgtggacagcccgtccatccaggcacggctccacgaggaggtcatgcagcaggtcggcgacgcgcggccggtcgacgacaaggacaccgacgccatgccgtacctccaggccttcgtgaaggagctgctccggaagcacccgcccacgtacttctcgctcacccacgccgctgtgcagccgggatgcaagctcgccggctacgacgtgcccgtggacgcgaacctggacatcttcctcccgaccatctccgaggacccaaagctgtgggaccggccgacggagttcgacccggacaggttcgtgtccggcggcgagacggcggacatgacggggtcagcggggatccggatgatcccgttcggcgcggggcggaggatctgccctgggcttgccatggggacgacgcacatcgccctgatggtggcgcggatggtgcaggcgttcgagtggcgcgcgcacccgtcgcagccgcagctggacttcaaggacaaggtggagttcacggtggtgatggatcggccgctgctggccgcagtgaagccgcgaaacctcgcgttctgatcggacgggcggacggacgcgcgcatgcatggctacagtgtgcgcgtgtcagctagcgtggcagtacgacatcgctcgtaccgtcgtacgtgtgctctgcacgcccagctgcaccacgcatcgccgtttggctatgcatgcatgcatgctagccgcccatgagttgtggacgccactactgtcgtgtactcgtgtctgtatgatgtaacatacacggaaatgctagacgtttgcatatgtgtgtggatgtgtacgtactacgtatataagaatgaactcttttgtgc

SEQ ID NO: 12997 - protein, 563 aa, Zea mays subsp. mays
  peptide (1)..(563): Ceres Seq. ID no. 12372958
PTHARRTTSSELRIYRAVHVHATADERRKPTSRRDGSAIVALVTAARLHGGRGDRGAGRRGGRHEVQPEIHGPEAASGPARVARRRQPLPGGVLRQALHPLHPRAPQGVRPHPDAAHGGAHARDHQQRRARARGAGGERAGVREPAPGEHHAQHLLVQQAHRELRGVRARVAVARRNMVSGMLSTSRLREFRHARRRAMDRFVSRMRAEAAASPDGASVWVLRNARFAVFCILLDMTFGLLDLREEHIVRIDAVMKRVLLAVGVRMDDYLPFLRPFFWRHQRRALAVRREQIDTLLPLINRRRAMLRDMQQRQSSSPLPDPSVAAPFSYLDSVLDLRIEGRDDGALTDDELVTLCAELLNGGTDTTATAIEWGMARIVDSPSIQARLHEEVMQQVGDARPVDDKDTDAMPYLQAFVKELLRKHPPTYFSLTHAAVQPGCKLAGYDVPVDANLDIFLPTISEDPKLWDRPTEFDPDRFVSGGETADMTGSAGIRMIPFGAGRRICPGLAMGTTHIALMVARMVQAFEWRAHPSQPQLDFKDKVEFTVVMDRPLLAAVKPRNLAF

SEQ ID NO: 12998 - protein, 386 aa, Zea mays subsp. mays
  peptide (1)..(386): Ceres Seq. ID no. 12372959
MVSGMLSTSRLREFRHARRRAMDRFVSRMRAEAAASPDGASVWVLRNARFAVFCILLDMTFGLLDLREEHIVRIDAVMKRVLLAVGVRMDDYLPFLRPFFWRHQRRALAVRREQIDTLLPLINRRRAMLRDMQQRQSSSPLPDPSVAAPFSYLDSVLDLRIEGRDDGALTDDELVTLCAELLNGGTDTTATAIEWGMARIVDSPSIQARLHEEVMQQVGDARPVDDKDTDAMPYLQAFVKELLRKHPPTYFSLTHAAVQPGCKLAGYDVPVDANLDIFLPTISEDPKLWDRPTEFDPDRFVSGGETADMTGSAGIRMIPFGAGRRICPGLAMGTTHIALMVARMVQAFEWRAHPSQPQLDFKDKVEFTVVMDRPLLAAVKPRNLAF

SEQ ID NO: 12999 - protein, 382 aa, Zea mays subsp. mays
  peptide (1)..(382): Ceres Seq. ID no. 12372960
MLSTSRLREFRHARRRAMDRFVSRMRAEAAASPDGASVWVLRNARFAVFCILLDMTFGLLDLREEHIVRIDAVMKRVLLAVGVRMDDYLPFLRPFFWRHQRRALAVRREQIDTLLPLINRRRAMLRDMQQRQSSSPLPDPSVAAPFSYLDSVLDLRIEGRDDGALTDDELVTLCAELLNGGTDTTATAIEWGMARIVDSPSIQARLHEEVMQQVGDARPVDDKDTDAMPYLQAFVKELLRKHPPTYFSLTHAAVQPGCKLAGYDVPVDANLDIFLPTISEDPKLWDRPTEFDPDRFVSGGETADMTGSAGIRMIPFGAGRRICPGLAMGTTHIALMVARMVQAFEWRAHPSQPQLDFKDKVEFTVVMDRPLLAAVKPRNLAF

SEQ ID NO: 13000 - DNA, 1221 bp, Zea mays subsp. mays
  misc_feature (1)..(1221): Ceres Seq. ID no. 12411455
  misc_feature (1)..(1221): Ortholog of  Ceres SEQ ID NO 12583413 as cited in SEQ ID NO 56816
  misc_feature (1)..(1221): Ortholog of  Ceres SEQ ID NO 15168480 as cited in SEQ ID NO 57927
  misc_feature (1)..(1221): Ortholog of  Ceres SEQ ID NO 15177738 as cited in SEQ ID NO 0
ttcttcggctatccgctggcagccgagcaggcccaagtggtgcgtcctgttcacccacggcgcctgcgtcggccctgcccgaactggcgtgcagagcagtgctccacgacgccgccaccacctgccccagcagcggcacgctccgacaacggcgaccatggcggtgcgggcgcgggggctggggagtgttccctgctagatccagtagatggccgactcatcgaggccctccgtgaatatcatctgcgccggtcgtctgctcggctgcagtggattaggtgagcgggattccggtagaggattgtttagtttgggattctaggttcctcgctcccgtgccagagacggcgctggacgttgaggtcagggccccggcggcgcggcgcgtcgcggagaggaaggcgcggaagcggtccgagcggcgcacctacctggtggccgccatgatgtccaacctcggggtcacgtccatggccgtcgccgccgtgtactatcgcttcagctggcaaatggagggcggcgcggtcccggtgagcgagatgttcggcacgtttgcgctctccgtcggcgaggcggtcgggatggagttctgggcgcggtgggcgcaccgggcgctatggcacgcctccctgtggcacatgcacgagtcgcaccaccggccgcgcgagggcccattcgagctcaacgacgtgttcgccatcgtcaacgccgtgtcggccatctccctcctcggtgacgtcgtgagcagatacaccacatggacaagtttgagggcgtcccgtatgggctcttcctgggaccaaaggagctggaggaggtcgatggcctggacgagctggaaaaggagctcgcgtgaatcggccggaccatctgatggattcatccggattccggcgcggcgatctccgctccgctccgtgattccggcgcagcctcatggttggggagccgacgaccagaacctccagaagggatttggtttggatgcgcgagcatagatcttgacctgcatttcggatggtctgtggaggcacagctcgtacctggagatgtctggtgccatggaattacttttcttttcttcttttcctgacattttcacgccgacgtctttatttgtggagacgtcgcacgttctggcccatgtattactgttcttatggctaggattctgtatataacttgtagagacatgttatgaaccaccagctcaatgaagct

SEQ ID NO: 13001 - protein, 184 aa, Zea mays subsp. mays
  peptide (1)..(184): Ceres Seq. ID no. 12411456
MMSNLGVTSMAVAAVYYRFSWQMEGGAVPVSEMFGTFALSVGEAVGMEFWARWAHRALWHASLWHMHESHHRPREGPFELNDVFAIVNAVSAISLLGDVVSRYTTWTSLRASRMGSSWDQRSWRRSMAWTSWKRSSRESAGPSDGFIRIPARRSPLRSVIPAQPHGWGADDQNLQKGFGLDARA

SEQ ID NO: 13002 - protein, 183 aa, Zea mays subsp. mays
  peptide (1)..(183): Ceres Seq. ID no. 12411457
MSNLGVTSMAVAAVYYRFSWQMEGGAVPVSEMFGTFALSVGEAVGMEFWARWAHRALWHASLWHMHESHHRPREGPFELNDVFAIVNAVSAISLLGDVVSRYTTWTSLRASRMGSSWDQRSWRRSMAWTSWKRSSRESAGPSDGFIRIPARRSPLRSVIPAQPHGWGADDQNLQKGFGLDARA

SEQ ID NO: 13003 - protein, 175 aa, Zea mays subsp. mays
  peptide (1)..(175): Ceres Seq. ID no. 12411458
MAVAAVYYRFSWQMEGGAVPVSEMFGTFALSVGEAVGMEFWARWAHRALWHASLWHMHESHHRPREGPFELNDVFAIVNAVSAISLLGDVVSRYTTWTSLRASRMGSSWDQRSWRRSMAWTSWKRSSRESAGPSDGFIRIPARRSPLRSVIPAQPHGWGADDQNLQKGFGLDARA

SEQ ID NO: 13004 - DNA, 1323 bp, Zea mays subsp. mays
  misc_feature (1)..(1323): Ceres Seq. ID no. 12376296
  misc_feature (1)..(1323): Ortholog of  Ceres SEQ ID NO 14316404 as cited in SEQ ID NO 57641
  misc_feature (1)..(1323): Ortholog of  Ceres SEQ ID NO 14308575 as cited in SEQ ID NO 58782
  misc_feature (1)..(1323): Ortholog of  Ceres SEQ ID NO 12611159 as cited in SEQ ID NO 59821
  misc_feature (1)..(1323): Ortholog of  Ceres SEQ ID NO 15180029 as cited in SEQ ID NO 0
attgcttcgaacccacttgatcgctgcgtcgtctcccgggccggccctcagcgagctctcccgtacgtgcgcagttctcggcacgctaccccttatataccccccggccgctctcgctctagatgcacaggcagtgacacgcgcgcataccgacggactaggtagctgctcatcagctatccagatcgttgctcctcccctcgccatcggccgcgcccgtgtcgggcggcgggaatgggacgccacgcgggctccggcggcggcgtgcagcagaagctgcgcaagggcctctggtcgcccgaggaagacgagaagctctacaaccacatcatccactacggcgtcgggtgctggagctccgtgcccaagctctcagggctgcagaggtgcggcaagagctgccgccttcggtggatcaactacctgcgccccgacctgaagcggggcagcttctcgcagcaggaggaggacgccatcgtcggcctccatgagatcctgggcaacagatggtcgcagatcgcgtcgcacttgccgggccgaacggacaacgagatcaagaacttctggaacagctgcctcaagaagaagctgcgccagcgcggcatcgaccccagcacccacaagcccatctccgccgacgcggcggcattggagcagccggcgtcgcgagaccgcaagccgtcgttggccacagccgccgctggtggcggcctcgatgtgaagcagcatcagcagcagcagcaggtgttcgacccgttcccgctgaccgacagcttcggcggcggcttcgacgacgcggccggcgccgcattgtacggccacatgggcggcggcggcaagcagcaggacgcggccgcgttcgtggactacagcagcgtgctggacgtgtcggagaacctgggctacggcgagagctccagcaacagcagcaacaactggaactgcgcgccggaggtgaacaacaacaacaatgcgctggacggcggcgacgcgccgctgcactgggcctccgagagcaaggccgcgcccttcgccggctacggcgccgaggagcagtcgctgctggagcacaagctccttccgcatttcgacttcgacatcggccgggccgccgtggtcggcgacttcagcctcgacttcttctgaagggttcttcagccctgcgggtataatcatcgatcgccgtgcccgtgtatgtactgtatcaaagccaattcatacggaacagtcgggagcttagagaccgcgctttgttaattctcctctagtcgtccttactcagcagctctcctcctttaacaatgttttgggcttcttcgtttc

SEQ ID NO: 13005 - protein, 303 aa, Zea mays subsp. mays
  peptide (1)..(303): Ceres Seq. ID no. 12376297
MGRHAGSGGGVQQKLRKGLWSPEEDEKLYNHIIHYGVGCWSSVPKLSGLQRCGKSCRLRWINYLRPDLKRGSFSQQEEDAIVGLHEILGNRWSQIASHLPGRTDNEIKNFWNSCLKKKLRQRGIDPSTHKPISADAAALEQPASRDRKPSLATAAAGGGLDVKQHQQQQQVFDPFPLTDSFGGGFDDAAGAALYGHMGGGGKQQDAAAFVDYSSVLDVSENLGYGESSSNSSNNWNCAPEVNNNNNALDGGDAPLHWASESKAAPFAGYGAEEQSLLEHKLLPHFDFDIGRAAVVGDFSLDFF

SEQ ID NO: 13006 - protein, 221 aa, Zea mays subsp. mays
  peptide (1)..(221): Ceres Seq. ID no. 12376298
MVADRVALAGPNGQRDQELLEQLPQEEAAPARHRPQHPQAHLRRRGGIGAAGVARPQAVVGHSRRWWRPRCEAASAAAAGVRPVPADRQLRRRLRRRGRRRIVRPHGRRRQAAGRGRVRGLQQRAGRVGEPGLRRELQQQQQQLELRAGGEQQQQCAGRRRRAAALGLREQGRALRRLRRRGAVAAGAQAPSAFRLRHRPGRRGRRLQPRLLLKGSSALRV

SEQ ID NO: 13007 - DNA, 1824 bp, Zea mays subsp. mays
  misc_feature (1)..(1824): Ceres Seq. ID no. 12593647
  misc_feature (1)..(1824): Ortholog of  Ceres SEQ ID NO 15178157 as cited in SEQ ID NO 57481
  misc_feature (1)..(1824): Ortholog of  Ceres SEQ ID NO 13594380 as cited in SEQ ID NO 58039
  misc_feature (1)..(1824): Ortholog of  Ceres SEQ ID NO 13597407 as cited in SEQ ID NO 64106
  misc_feature (1)..(1824): Ortholog of  Ceres SEQ ID NO 15180690 as cited in SEQ ID NO 0
gcacgagaccattacctagaacatcctaatcgaaaaatttcattctttgtttgtttcagcctttcacggaagaggggcggagtacgtaaggtgaacccggtcgtctgaagagaagcgaggacgacgtaggagaggggaggacagcgagatggccggcgggtttggcagcggcggggcagccgccgggagggccgagctctacgagggcaagatcaccggctacttcatcctcgcttgcatcgtcggctccttcggcggatccctcttcggctatgacctcggagtctccagcggcgtgacttccatggacgacttcctggtgaagttcttcccggacgtgtaccggcggaagcaggcgcacctccacgagacggactactgcaagtacgacaaccaggtgctgacgctcttcacctcgtcgctctacttcgcgggcctcgtctccaccttcggcgcctcctacgtgaccaagcgccacggccggcgcgccagcatcatggtgggcgccgccagcttcttcctcggcggcgccatcaacgcggccgccatgaacatcgccatgctcatcgtcggccgcgtgctcctcggcgtcggcatcggcttcggcaaccaggccgtgccgctctacctctcggagatcgcgccctaccgcatccgcggcgccgtgaaccagctcttccagctcaccacctgcctcggcatcctcgtcgccgacgtcatcaactacttcaccgaccgcctgcacccctgggggtggcgcctctcgctgggcctcgccatgggcccggccaccgccatcttcgtcggcgcgctcttccttcccgagacgcccaacagcctcgtcgagcgcgggcacctggaggaggcccgccgcgtgctggagaaggtgcgcggcacgcacaaggtggacgccgagttcgaggacctcaaggaggccagccaggccgcgcgcgccgtcacgggcacgttccggaacctgctcgccgtgcgcaaccgcccgcagctcatcatcggcgcgctcggcatcccggcgttccagcagctgtcgggcatgaactccatcctcttctactcgcccgtcatcttccagagccttggattcggctcctccgcggcgctctactcctccatcatcaccggctccatgctcgtcgtcggcgcgctcatctccatggttaccgtcgaccgccttggccgccgcttcctcttcatcgaggcgggcattcagatggtctcatccatggtcgtggtggctgtgatccttgccctcaagttcggaaaaggcgaggagctgagcaagggcgtgagcacggtgctggtggtggccatctgcctcttcgtggtggcctacggatggtcctgggggcccctcggatggctggtgccgagcgagctgttcccgctggagatgcggtcggcggggcagagcgtggtggtgtgcgtcaacctcttctggacggcttccgtagcgcagtgcttcctcgccgcgctgtgccacctccggtggggcgtcttcgtgctcttcgccgcgctcatcgtcgtcatgtccatcttcgtcatcctcctgctgccggagaccaagcaggtgcccatcgaggagatatggatgctctttgacaggcactggtactggaagcgcatcgtccgcagggacccaaaataccagggcaacctccaccagcagcaggagatgtccagaatatgaacatggttaattagcgatgtggtttaataagttttctatccctaaacatataggatatgatgattactactagattattaagacgaatgtggtgtgatccttgatgcaatccaaagagg

SEQ ID NO: 13008 - protein, 518 aa, Zea mays subsp. mays
  peptide (1)..(518): Ceres Seq. ID no. 12593648
MAGGFGSGGAAAGRAELYEGKITGYFILACIVGSFGGSLFGYDLGVSSGVTSMDDFLVKFFPDVYRRKQAHLHETDYCKYDNQVLTLFTSSLYFAGLVSTFGASYVTKRHGRRASIMVGAASFFLGGAINAAAMNIAMLIVGRVLLGVGIGFGNQAVPLYLSEIAPYRIRGAVNQLFQLTTCLGILVADVINYFTDRLHPWGWRLSLGLAMGPATAIFVGALFLPETPNSLVERGHLEEARRVLEKVRGTHKVDAEFEDLKEASQAARAVTGTFRNLLAVRNRPQLIIGALGIPAFQQLSGMNSILFYSPVIFQSLGFGSSAALYSSIITGSMLVVGALISMVTVDRLGRRFLFIEAGIQMVSSMVVVAVILALKFGKGEELSKGVSTVLVVAICLFVVAYGWSWGPLGWLVPSELFPLEMRSAGQSVVVCVNLFWTASVAQCFLAALCHLRWGVFVLFAALIVVMSIFVILLLPETKQVPIEEIWMLFDRHWYWKRIVRRDPKYQGNLHQQQEMSRI

SEQ ID NO: 13009 - protein, 466 aa, Zea mays subsp. mays
  peptide (1)..(466): Ceres Seq. ID no. 12593649
MDDFLVKFFPDVYRRKQAHLHETDYCKYDNQVLTLFTSSLYFAGLVSTFGASYVTKRHGRRASIMVGAASFFLGGAINAAAMNIAMLIVGRVLLGVGIGFGNQAVPLYLSEIAPYRIRGAVNQLFQLTTCLGILVADVINYFTDRLHPWGWRLSLGLAMGPATAIFVGALFLPETPNSLVERGHLEEARRVLEKVRGTHKVDAEFEDLKEASQAARAVTGTFRNLLAVRNRPQLIIGALGIPAFQQLSGMNSILFYSPVIFQSLGFGSSAALYSSIITGSMLVVGALISMVTVDRLGRRFLFIEAGIQMVSSMVVVAVILALKFGKGEELSKGVSTVLVVAICLFVVAYGWSWGPLGWLVPSELFPLEMRSAGQSVVVCVNLFWTASVAQCFLAALCHLRWGVFVLFAALIVVMSIFVILLLPETKQVPIEEIWMLFDRHWYWKRIVRRDPKYQGNLHQQQEMSRI

SEQ ID NO: 13010 - protein, 402 aa, Zea mays subsp. mays
  peptide (1)..(402): Ceres Seq. ID no. 12593650
MVGAASFFLGGAINAAAMNIAMLIVGRVLLGVGIGFGNQAVPLYLSEIAPYRIRGAVNQLFQLTTCLGILVADVINYFTDRLHPWGWRLSLGLAMGPATAIFVGALFLPETPNSLVERGHLEEARRVLEKVRGTHKVDAEFEDLKEASQAARAVTGTFRNLLAVRNRPQLIIGALGIPAFQQLSGMNSILFYSPVIFQSLGFGSSAALYSSIITGSMLVVGALISMVTVDRLGRRFLFIEAGIQMVSSMVVVAVILALKFGKGEELSKGVSTVLVVAICLFVVAYGWSWGPLGWLVPSELFPLEMRSAGQSVVVCVNLFWTASVAQCFLAALCHLRWGVFVLFAALIVVMSIFVILLLPETKQVPIEEIWMLFDRHWYWKRIVRRDPKYQGNLHQQQEMSRI

SEQ ID NO: 13011 - DNA, 1457 bp, Zea mays subsp. mays
  misc_feature (1)..(1457): Ceres Seq. ID no. 12353525
  misc_feature (1)..(1457): Ortholog of  Ceres SEQ ID NO 15170461 as cited in SEQ ID NO 52853
  misc_feature (1)..(1457): Ortholog of  Ceres SEQ ID NO 14313666 as cited in SEQ ID NO 54618
  misc_feature (1)..(1457): Ortholog of  Ceres SEQ ID NO 13595351 as cited in SEQ ID NO 55934
  misc_feature (1)..(1457): Ortholog of  Ceres SEQ ID NO 13595513 as cited in SEQ ID NO 56663
  misc_feature (1)..(1457): Ortholog of  Ceres SEQ ID NO 13639645 as cited in SEQ ID NO 57488
gccgtggagtagaggagcacaagtgagctagctagctctagctaggccacgcactgctgcctccttcatcatcaggtcgtgctagctagctagctatagctgggccgggggacgtacgacatcagcgcgcggccatgggcgtggggaagctgatgaacgacgtgaagccatacctggcgatggtgctgctgcaggtggggttctccgggatgtacatcgtctccgtcgcctccctcaagcgcggcatgaaccacttcgtcctcgtcgtctaccgcaacctcgtcgccaccgtcgtcatggcccccttcgccctcctcttcgagaggcgagtgaggcccaagatgacgccgctcatcttcctcaagatcatggggctcgccgtgctcgagcctgtgctcgaccagaacatgtactacctcggcgcgaagctgacgtccgcgaccttcgcctcagcgctggtcaacatcctccccgccatcacgttcctgctggccctcgccctgaggatggagaggctgaggctccggagcctccgcagccaggccaaggtggtcggcacggtctgcaccgtcgccggcgccgtgctgatgatcctctaccacggcccggtggtgccgttcccgtggtccgcgggtcgtcttcaccaccacgtccccgcggcggcggtggagagccagagcagcgcctcctggctcaacggcatctgcatgatcatcggcagctgcctgtgctggtccggcttcttcatcctccagtcgaacacgctgcagagctaccctgcggagctgacgctgacgactctgatctgcttcctgggctcggtgctgaccggcggcgtggcgctcgtggcggagcgccgcgacatgagcgcctgggtcattggcttcgacacccgcctcttcaccgccgtctactccgggatcgtgtgctccggcgtggccttctacgtgcaggggatcgtgacgcaggcgcgcgggccggtgttcgtgacggcgttccagcccctgtgcatgatcatcaccacggttcttggctccaccatactgaaagaggagaccaccctgggaagcgtgattggcgcggcgatcatagtggtggggctctactgcctcatctggggcaagagcaaggaccacctcggcagcaacggcggcaagcccggcgccgcggccgtcgccgagctgcccctgacctcgtcggctcctgcttggtccaacggcaagcaagctctggccgtcgtcgagacgacaccgccttcgtctttgcccaacaagtgcgttcactgacgcgcggatcggagctccatgcatgatgcggaccgtacaccaccgcacactactagtagtgcattgccagtgactgtaagccgccggccgtgtatgatcatgcatgcataccgtcataccgatatgatgtcccatactcccatcgttgcgtttaacactctcgagtttttg

SEQ ID NO: 13012 - protein, 383 aa, Zea mays subsp. mays
  peptide (1)..(383): Ceres Seq. ID no. 12353526
MGVGKLMNDVKPYLAMVLLQVGFSGMYIVSVASLKRGMNHFVLVVYRNLVATVVMAPFALLFERRVRPKMTPLIFLKIMGLAVLEPVLDQNMYYLGAKLTSATFASALVNILPAITFLLALALRMERLRLRSLRSQAKVVGTVCTVAGAVLMILYHGPVVPFPWSAGRLHHHVPAAAVESQSSASWLNGICMIIGSCLCWSGFFILQSNTLQSYPAELTLTTLICFLGSVLTGGVALVAERRDMSAWVIGFDTRLFTAVYSGIVCSGVAFYVQGIVTQARGPVFVTAFQPLCMIITTVLGSTILKEETTLGSVIGAAIIVVGLYCLIWGKSKDHLGSNGGKPGAAAVAELPLTSSAPAWSNGKQALAVVETTPPSSLPNKCVH

SEQ ID NO: 13013 - protein, 377 aa, Zea mays subsp. mays
  peptide (1)..(377): Ceres Seq. ID no. 12353527
MNDVKPYLAMVLLQVGFSGMYIVSVASLKRGMNHFVLVVYRNLVATVVMAPFALLFERRVRPKMTPLIFLKIMGLAVLEPVLDQNMYYLGAKLTSATFASALVNILPAITFLLALALRMERLRLRSLRSQAKVVGTVCTVAGAVLMILYHGPVVPFPWSAGRLHHHVPAAAVESQSSASWLNGICMIIGSCLCWSGFFILQSNTLQSYPAELTLTTLICFLGSVLTGGVALVAERRDMSAWVIGFDTRLFTAVYSGIVCSGVAFYVQGIVTQARGPVFVTAFQPLCMIITTVLGSTILKEETTLGSVIGAAIIVVGLYCLIWGKSKDHLGSNGGKPGAAAVAELPLTSSAPAWSNGKQALAVVETTPPSSLPNKCVH

SEQ ID NO: 13014 - protein, 368 aa, Zea mays subsp. mays
  peptide (1)..(368): Ceres Seq. ID no. 12353528
MVLLQVGFSGMYIVSVASLKRGMNHFVLVVYRNLVATVVMAPFALLFERRVRPKMTPLIFLKIMGLAVLEPVLDQNMYYLGAKLTSATFASALVNILPAITFLLALALRMERLRLRSLRSQAKVVGTVCTVAGAVLMILYHGPVVPFPWSAGRLHHHVPAAAVESQSSASWLNGICMIIGSCLCWSGFFILQSNTLQSYPAELTLTTLICFLGSVLTGGVALVAERRDMSAWVIGFDTRLFTAVYSGIVCSGVAFYVQGIVTQARGPVFVTAFQPLCMIITTVLGSTILKEETTLGSVIGAAIIVVGLYCLIWGKSKDHLGSNGGKPGAAAVAELPLTSSAPAWSNGKQALAVVETTPPSSLPNKCVH

SEQ ID NO: 13015 - DNA, 1641 bp, Zea mays subsp. mays
  misc_feature (1)..(1641): Ceres Seq. ID no. 12365124
  misc_feature (1)..(1641): Ortholog of  Ceres SEQ ID NO 14315063 as cited in SEQ ID NO 52256
  misc_feature (1)..(1641): Ortholog of  Ceres SEQ ID NO 14310736 as cited in SEQ ID NO 52901
  misc_feature (1)..(1641): Ortholog of  Ceres SEQ ID NO 15172325 as cited in SEQ ID NO 54668
  misc_feature (1)..(1641): Ortholog of  Ceres SEQ ID NO 13594345 as cited in SEQ ID NO 58043
  misc_feature (1)..(1641): Ortholog of  Ceres SEQ ID NO 14308594 as cited in SEQ ID NO 60384
  misc_feature (1)..(1641): Ortholog of  Ceres SEQ ID NO 13662880 as cited in SEQ ID NO 65422
  misc_feature (1)..(1641): Ortholog of  Ceres SEQ ID NO 14302071 as cited in SEQ ID NO 66585
  misc_feature (1)..(1641): Ortholog of  Ceres SEQ ID NO 14316013 as cited in SEQ ID NO 67181
  misc_feature (1)..(1641): Ortholog of  Ceres SEQ ID NO 12779098 as cited in SEQ ID NO 67698
  misc_feature (1)..(1641): Ortholog of  Ceres SEQ ID NO 13591190 as cited in SEQ ID NO 68044
  misc_feature (1)..(1641): Ortholog of  Ceres SEQ ID NO 13595961 as cited in SEQ ID NO 68223
aacacggccacaccccgacaccggcatggccacatccctttcccttaaatagacgccatcgccgccgagccgcgcattgggatcgtgcggcaatggcggcggcggcggcggcgcacgtgctggtgttcccggcccctgcgcagggccacctcaacagtttcctccacttctccacggggctcctccgcgcgggcctccacgtcaccttcctgcacaccgaccacaacctccgccgcctcggtactgctgccgccgaggctacggtcgcctcgccgcgtctccgcttcctatccgtgcccgacggcctccccgacgacgacccgcgcaccgtcgacggcctcccggagctcatggagtccctgcgcaccaaggccagcgcctcgtaccgcgcactgctcgcctcgctgcgcgcgggaggcggaggcttcccgccggtgacgtgcgtcgttgccgacggcataatgccgttcgtggtcgacgtcgcagaggagcttggagtcccggcgatctccttccgtacggtgagcgcgtgcgcggtcctggcgtacctgtccgtgcccaagctcatcgccctcggcgagctccccttccccaaaggtggcgacctcgacgcgcccatccgcggcgtcccggggatggagagcttcctgcgtcgacgagacctcccgatccagttccgccagctcaccagcacgtacgaggagcccttggtagcgggcggtggtcgcggccaccgtgcacagctgctgcaaggccagagctctcatcgtcaacacgaccacgtccctggagaggtcatccctcgggcacctcacgcaggagatgcgcgacgtattcgccgtcgggcctctgcacgccatgtcccccgcgccggcggtggcctcgagcctgtggcgccccgacgacgggtgcatggcgtggctcgacaaccagcaggcggagcgggccgtggtgtacatcagcctgggtagcctcgccgtcatctcccacgagcagttcaccgagttcctgcacgggctcgtcgccaccggctacccgttcctctgggtgctccggccggatatgctcgtggccagccaggacgccgcgctccgggaagccatcggcgcggtcgggaaagacagggcgtgcgtcgtncngtgggtgccgcagcgagacgtgctgcggcaccgcgccgtggggtgctttctgacgcacagcgggtggaactcgacgatggagggcatcgtcgagggcgtgcccatggtgtgctggcccttcttcgccgaccagcagatcaacagccgcttcgtaggcgccgtgtggaggaacgggctggacatgaaggacgtgtgcgacagagttgtggtggagagcacggtgagggaagcaatggagtccgaagagatcaggaggtcggttcatgctctggcggagcaggtgaagcgtgacgtcgccgacgacggggcatcggcgttggaattcaagcgcctcatcagcttcatcacggagctcagcacgtcagcagcacagggaaccccatcttcaaaatcgtgaagtgaatgaatgaatcgaaagtaaacttgatagatacgcaccggattcaacaaccggctgaggggtgttttggaatgttatttttgaaggaatttctattttctc

SEQ ID NO: 13016 - protein, 322 aa, Zea mays subsp. mays
  peptide (1)..(322): Ceres Seq. ID no. 12365125
HGHTPTPAWPHPFPLNRRHRRRAAHWDRAAMAAAAAAHVLVFPAPAQGHLNSFLHFSTGLLRAGLHVTFLHTDHNLRRLGTAAAEATVASPRLRFLSVPDGLPDDDPRTVDGLPELMESLRTKASASYRALLASLRAGGGGFPPVTCVVADGIMPFVVDVAEELGVPAISFRTVSACAVLAYLSVPKLIALGELPFPKGGDLDAPIRGVPGMESFLRRRDLPIQFRQLTSTYEEPLVAGGGRGHRAQLLQGQSSHRQHDHVPGEVIPRAPHAGDARRIRRRASARHVPRAGGGLEPVAPRRRVHGVARQPAGGAGRGVHQPG

SEQ ID NO: 13017 - protein, 292 aa, Zea mays subsp. mays
  peptide (1)..(292): Ceres Seq. ID no. 12365126
MAAAAAAHVLVFPAPAQGHLNSFLHFSTGLLRAGLHVTFLHTDHNLRRLGTAAAEATVASPRLRFLSVPDGLPDDDPRTVDGLPELMESLRTKASASYRALLASLRAGGGGFPPVTCVVADGIMPFVVDVAEELGVPAISFRTVSACAVLAYLSVPKLIALGELPFPKGGDLDAPIRGVPGMESFLRRRDLPIQFRQLTSTYEEPLVAGGGRGHRAQLLQGQSSHRQHDHVPGEVIPRAPHAGDARRIRRRASARHVPRAGGGLEPVAPRRRVHGVARQPAGGAGRGVHQPG

SEQ ID NO: 13018 - protein, 237 aa, Zea mays subsp. mays
  peptide (1)..(237): Ceres Seq. ID no. 12365127
  misc_feature (105)..(105): Xaa is any aa, unknown or other
  misc_feature (106)..(106): Xaa is any aa, unknown or other
MRDVFAVGPLHAMSPAPAVASSLWRPDDGCMAWLDNQQAERAVVYISLGSLAVISHEQFTEFLHGLVATGYPFLWVLRPDMLVASQDAALREAIGAVGKDRACVXXWVPQRDVLRHRAVGCFLTHSGWNSTMEGIVEGVPMVCWPFFADQQINSRFVGAVWRNGLDMKDVCDRVVVESTVREAMESEEIRRSVHALAEQVKRDVADDGASALEFKRLISFITELSTSAAQGTPSSKS

SEQ ID NO: 13019 - DNA, 1448 bp, Zea mays subsp. mays; identical to SEQ ID NO: 3555
  misc_feature (1)..(1448): Ceres Seq. ID no. 12343332
  misc_feature (1)..(1448): Ortholog of  Ceres SEQ ID NO 15169358 as cited in SEQ ID NO 53739
  misc_feature (1)..(1448): Ortholog of  Ceres SEQ ID NO 14313591 as cited in SEQ ID NO 60400

SEQ ID NO: 13020 - protein, 388 aa, Zea mays subsp. mays; identical to SEQ ID NO: 3556
  peptide (1)..(388): Ceres Seq. ID no. 12343333

SEQ ID NO: 13021 - protein, 340 aa, Zea mays subsp. mays; identical to SEQ ID NO: 3557
  peptide (1)..(340): Ceres Seq. ID no. 12343334

SEQ ID NO: 13022 - protein, 317 aa, Zea mays subsp. mays; identical to SEQ ID NO: 3558
  peptide (1)..(317): Ceres Seq. ID no. 12343335

SEQ ID NO: 13023 - DNA, 1559 bp, Zea mays subsp. mays
  misc_feature (1)..(1559): Ceres Seq. ID no. 12411451
  misc_feature (1)..(1559): Ortholog of  Ceres SEQ ID NO 14301830 as cited in SEQ ID NO 62310
  misc_feature (1)..(1559): Ortholog of  Ceres SEQ ID NO 15179524 as cited in SEQ ID NO 0
ctttcccctttccttcagaaacaaacaacagctgcgccggctccaccgcaccagcccacacccgccgcggccgttacatccccgcttccccggccaccttccttccatttatacccctccgtttcccacccttccctccccactccggcagtccccgtcccaccactacagccactgctgcccggccggccgcgtccctcttcctccgccaggcgccagccgcccgttctccagcaatggcgtctgcctcgcacgccccgacgccgctgctcaaggacgagctggacatcgtcatcccgacgatccgcaacctcgacttcctggagatgtggaggcccttcttccagccctaccacctcatcatcgtgcaggacggcgaccccagcaagaccatccgcgtccccgagggcttcgactacgagctctacaaccgcaacgacatcaaccgcatgctggggcccaaggcctcctgcatctccttcaaggactccgcctgccgctgcttcggctacatggtctccaagaagaagtacatctacaccatcgacgatgactgcttcgttgccaaggatccatcagggaaggacatcaatgcacttgagcagcacatcaagaacctcctgagcccttccactccatttttcttcaatactctgtatgacccttaccgtgttggcgccgattttgttcgtgggtaccccttcagccttcgtgagggtgtcccaactgctgtttctcacgggctttggctcaacattccagactacgatgcccctacccagcttgttaagccccttgagagaaacaccaggtatgtggatgctattcttacgatcccaaagggcaccctcttccctatgtgtggaatgaaccttgcatttgaccgtgagctcattggtcctgcaatgtactttggtcttatgggtgatggccagcctattggtcgctacgatgatatgtgggcaggatggtgcacaaaggtgattacggatcatctgggcctgggtgtgaagactggcctgccctacatctggcacagcaaagcaagcaacccatttgtgaacctgaagaaggaatacaacggcatcttctggcaagaagagctgatcccgttcttccagtcggtctcccttccaaaggaggccaccaccgtccaaaagtgctacctcgagctggccaagcaggtgagggccaagctcggtaaggtggacggctacttcaacaagcttgccgactccatggtcacgtggattgaggcctgggacgagctgaaccccccaaaaggcggagtccccacagcaaatggccctccaaagaagtaaaacactatgtagtgtaaacttcactcgttcatgtggaccatcgtactgaaaggaaatactgttttggggttagtgctgatggactgagatcactccgctgtaactcgagattttcacgtcccggaaaccgccctgccggttttagggcgtttacatgtttttttttcatttttcgtgtgatacaacaggtgtaatgtcggattggattagaataaagtttatgatcttcatcttttc

SEQ ID NO: 13024 - protein, 439 aa, Zea mays subsp. mays
  peptide (1)..(439): Ceres Seq. ID no. 12411452
FPFPSETNNSCAGSTAPAHTRRGRYIPASPATFLPFIPLRFPPFPPHSGSPRPTTTATAARPAASLFLRQAPAARSPAMASASHAPTPLLKDELDIVIPTIRNLDFLEMWRPFFQPYHLIIVQDGDPSKTIRVPEGFDYELYNRNDINRMLGPKASCISFKDSACRCFGYMVSKKKYIYTIDDDCFVAKDPSGKDINALEQHIKNLLSPSTPFFFNTLYDPYRVGADFVRGYPFSLREGVPTAVSHGLWLNIPDYDAPTQLVKPLERNTRYVDAILTIPKGTLFPMCGMNLAFDRELIGPAMYFGLMGDGQPIGRYDDMWAGWCTKVITDHLGLGVKTGLPYIWHSKASNPFVNLKKEYNGIFWQEELIPFFQSVSLPKEATTVQKCYLELAKQVRAKLGKVDGYFNKLADSMVTWIEAWDELNPPKGGVPTANGPPKK

SEQ ID NO: 13025 - protein, 361 aa, Zea mays subsp. mays
  peptide (1)..(361): Ceres Seq. ID no. 12411453
MASASHAPTPLLKDELDIVIPTIRNLDFLEMWRPFFQPYHLIIVQDGDPSKTIRVPEGFDYELYNRNDINRMLGPKASCISFKDSACRCFGYMVSKKKYIYTIDDDCFVAKDPSGKDINALEQHIKNLLSPSTPFFFNTLYDPYRVGADFVRGYPFSLREGVPTAVSHGLWLNIPDYDAPTQLVKPLERNTRYVDAILTIPKGTLFPMCGMNLAFDRELIGPAMYFGLMGDGQPIGRYDDMWAGWCTKVITDHLGLGVKTGLPYIWHSKASNPFVNLKKEYNGIFWQEELIPFFQSVSLPKEATTVQKCYLELAKQVRAKLGKVDGYFNKLADSMVTWIEAWDELNPPKGGVPTANGPPKK

SEQ ID NO: 13026 - protein, 331 aa, Zea mays subsp. mays
  peptide (1)..(331): Ceres Seq. ID no. 12411454
MWRPFFQPYHLIIVQDGDPSKTIRVPEGFDYELYNRNDINRMLGPKASCISFKDSACRCFGYMVSKKKYIYTIDDDCFVAKDPSGKDINALEQHIKNLLSPSTPFFFNTLYDPYRVGADFVRGYPFSLREGVPTAVSHGLWLNIPDYDAPTQLVKPLERNTRYVDAILTIPKGTLFPMCGMNLAFDRELIGPAMYFGLMGDGQPIGRYDDMWAGWCTKVITDHLGLGVKTGLPYIWHSKASNPFVNLKKEYNGIFWQEELIPFFQSVSLPKEATTVQKCYLELAKQVRAKLGKVDGYFNKLADSMVTWIEAWDELNPPKGGVPTANGPPKK

SEQ ID NO: 13027 - DNA, 1968 bp, Zea mays subsp. mays
  misc_feature (1)..(1968): Ceres Seq. ID no. 12355752
  misc_feature (1)..(1968): Ortholog of  Ceres SEQ ID NO 14313714 as cited in SEQ ID NO 54084
aaatagcagacggcagacaacagtcgaggggacacaggaaggcgcgaagaagaccgagatcctcgcccaacgccatcacgccactcccccaatactcaggtgtcaggacagcgagcaggcacaagcagatctcactccacgttgctccttccgcccttcctctccgccgctccccggaaggatcatggagcgcgggattcttggctccaggggcgccgtccaaatcttggggtcgaagaccggggccgcgatgtcatgtggcaaaacaacctctacaagttttacttgttctaccaaacacgagctgaacttgcatgtgaatgttaagccgttgcaattggtaacagatggatcctctcgtttggcatacaaaactccagtgcttaaaaatcagtggaatctttctgctagttcttcctctgcaaatgtggttaccacttttgatgatgacaaaggtgtaccttccagttttgctgaagaaaagatcggagtactgttattaaatcttggtggtccagaaaccctagacgatgttcaaccattcttgttcaacctatttgctgatccagatatcattcgactgcctaggctcttcaggttccttcaaagaccactggccaaacttatttctacttttagagctcctaagagtaaagaagggtatgcttcaatcggtggtgggtcaccattgaggaaaattactgatgagcaggcaaatgctttgaagattgctctggaaaagaaaaaattgaacgcaaatatatatgttgggatgcggtattggtatcctttcacagaagaagccattgatcagattaagaaggataatatttccaagctcgttgttcttccactctaccctcagtactccatatcaacaagtgggtcaagcattcgtgttctccaaaatgttgtcaaggaagattcatatttttctggcttgccaatctccattatcgaatcatggtaccaacgtgatggctatgtgaaatcaatggctgacctaattgaaaaagagctatctgccttttccaatcctgaagaggtaatgatattcttcagtgcacatggtgtgccacttacctatgttcaggatgctggagatccttacagagatcagatggaggattgtatttctttgatcatgggggagctgagatccagaggaatcttaaatggtcacactttggcgtatcagagtcgggtgggaccagttcaatggctgaagccatatactgatgaagttttagtagaacttggtcagaacggtgtgaagagcctcctggctgttccagtaagcttcgtgagcgagcacattgagacactggaagaaatagacatggagtacaaggagttggctctggaatcaggcattgagaactggggccgggtccctgctcttggatgcacttcgacgttcatctccgaccttgcagatgcggttgtcgaagccctgccctctgcctcggcgctgggaaccagaaagcctgaagacaccggttccagcatggacctgatgcattacctgaccaagatgttcttcggctcaatcttggcatttatcctgctgttgtcaccaagactggtttctgctttccggaacaccacgctttaggtggttaggtaggtaagcaaaaagggaatggtgtgataggtaattcttaaaaatttgagattaataatggaaaaactggagagagcttggtgatagtaactagagatactttaggctttgtttgagtactctagtattgaccccaatccgtgtgttgagatagattgaggtgtaaattagtttaagttacacctcaattcagctcaatacatatggattgagctcaatactaaaatactcaaactaggccttagggcacgaggtagcagcttgcaatttgctgtttttgatattgttcacaggaaacattggtctcataaatgaatctgtgaaagcacataacgttacaaatc

SEQ ID NO: 13028 - protein, 537 aa, Zea mays subsp. mays
  peptide (1)..(537): Ceres Seq. ID no. 12355753
NSRRQTTVEGTQEGAKKTEILAQRHHATPPILRCQDSEQAQADLTPRCSFRPSSPPLPGRIMERGILGSRGAVQILGSKTGAAMSCGKTTSTSFTCSTKHELNLHVNVKPLQLVTDGSSRLAYKTPVLKNQWNLSASSSSANVVTTFDDDKGVPSSFAEEKIGVLLLNLGGPETLDDVQPFLFNLFADPDIIRLPRLFRFLQRPLAKLISTFRAPKSKEGYASIGGGSPLRKITDEQANALKIALEKKKLNANIYVGMRYWYPFTEEAIDQIKKDNISKLVVLPLYPQYSISTSGSSIRVLQNVVKEDSYFSGLPISIIESWYQRDGYVKSMADLIEKELSAFSNPEEVMIFFSAHGVPLTYVQDAGDPYRDQMEDCISLIMGELRSRGILNGHTLAYQSRVGPVQWLKPYTDEVLVELGQNGVKSLLAVPVSFVSEHIETLEEIDMEYKELALESGIENWGRVPALGCTSTFISDLADAVVEALPSASALGTRKPEDTGSSMDLMHYLTKMFFGSILAFILLLSPRLVSAFRNTTL

SEQ ID NO: 13029 - protein, 476 aa, Zea mays subsp. mays
  peptide (1)..(476): Ceres Seq. ID no. 12355754
MERGILGSRGAVQILGSKTGAAMSCGKTTSTSFTCSTKHELNLHVNVKPLQLVTDGSSRLAYKTPVLKNQWNLSASSSSANVVTTFDDDKGVPSSFAEEKIGVLLLNLGGPETLDDVQPFLFNLFADPDIIRLPRLFRFLQRPLAKLISTFRAPKSKEGYASIGGGSPLRKITDEQANALKIALEKKKLNANIYVGMRYWYPFTEEAIDQIKKDNISKLVVLPLYPQYSISTSGSSIRVLQNVVKEDSYFSGLPISIIESWYQRDGYVKSMADLIEKELSAFSNPEEVMIFFSAHGVPLTYVQDAGDPYRDQMEDCISLIMGELRSRGILNGHTLAYQSRVGPVQWLKPYTDEVLVELGQNGVKSLLAVPVSFVSEHIETLEEIDMEYKELALESGIENWGRVPALGCTSTFISDLADAVVEALPSASALGTRKPEDTGSSMDLMHYLTKMFFGSILAFILLLSPRLVSAFRNTTL

SEQ ID NO: 13030 - protein, 454 aa, Zea mays subsp. mays
  peptide (1)..(454): Ceres Seq. ID no. 12355755
MSCGKTTSTSFTCSTKHELNLHVNVKPLQLVTDGSSRLAYKTPVLKNQWNLSASSSSANVVTTFDDDKGVPSSFAEEKIGVLLLNLGGPETLDDVQPFLFNLFADPDIIRLPRLFRFLQRPLAKLISTFRAPKSKEGYASIGGGSPLRKITDEQANALKIALEKKKLNANIYVGMRYWYPFTEEAIDQIKKDNISKLVVLPLYPQYSISTSGSSIRVLQNVVKEDSYFSGLPISIIESWYQRDGYVKSMADLIEKELSAFSNPEEVMIFFSAHGVPLTYVQDAGDPYRDQMEDCISLIMGELRSRGILNGHTLAYQSRVGPVQWLKPYTDEVLVELGQNGVKSLLAVPVSFVSEHIETLEEIDMEYKELALESGIENWGRVPALGCTSTFISDLADAVVEALPSASALGTRKPEDTGSSMDLMHYLTKMFFGSILAFILLLSPRLVSAFRNTTL

SEQ ID NO: 13031 - DNA, 954 bp, Zea mays subsp. mays
  misc_feature (1)..(954): Ceres Seq. ID no. 12413099
  misc_feature (1)..(954): Ortholog of  Ceres SEQ ID NO 14308618 as cited in SEQ ID NO 58541
caaactgtgatggttcatctagaccacttgaccatcctgcggatttgtatgatttccatgtctatactgattctaagactttgtttaacatgaggagcacatttgacagaacatcacgtagtggacctaaggcctttgtgagcgagtacgctgtctggagaagtgacgcgggtagaggcagtcttgcttgcttcgttggctgaagctgctttcctcactggtctggagaagaacagtgatatcgttcagatggcaagttacgctccactcttcgtgaacgacaatgaccaaacgtggaacccggacgctattgtcttcaactcctggcaacactatggaactcctagctactggatgcagacgattttccgcgagtcaagcggcgccatgattcatccggttaatatcagttcccggtactcgagttcgctggccgcgtctgcgatcacgtggcaggatgcagagaatagcttcctgagagtgaaggtcgtgaacttcgggtcggacaccgttaacctcacggtctccacgagcggactcggggccagcgtcaacgcgctgggatcaaccgccaccgtcctcacgtctggcaacgtcatggacgagaactccttcagtaacccgaacaaggttgcgccggtgaaaagccagctgagcaacgccgcggagcagatgcaggtcacgctggctcctcactccttcaccgccttcgatctggcgctggctgagcccaagcttgtggcggagatatgatgtgtgtgctgcacattacagtacacaaacagcgcgcggatggcagcaaccagagggtgtggagtgtggtgtgctgttagcgatcttgatcgataaaaaaggctttgtactggtgtaccacgatacaggataacgtactacgtactgttgcttcatgaaataaaaaccacatcaggtttttgcttggtgttggttggtttc

SEQ ID NO: 13032 - protein, 167 aa, Zea mays subsp. mays
  peptide (1)..(167): Ceres Seq. ID no. 12413100
MASYAPLFVNDNDQTWNPDAIVFNSWQHYGTPSYWMQTIFRESSGAMIHPVNISSRYSSSLAASAITWQDAENSFLRVKVVNFGSDTVNLTVSTSGLGASVNALGSTATVLTSGNVMDENSFSNPNKVAPVKSQLSNAAEQMQVTLAPHSFTAFDLALAEPKLVAEI

SEQ ID NO: 13033 - protein, 132 aa, Zea mays subsp. mays
  peptide (1)..(132): Ceres Seq. ID no. 12413101
MQTIFRESSGAMIHPVNISSRYSSSLAASAITWQDAENSFLRVKVVNFGSDTVNLTVSTSGLGASVNALGSTATVLTSGNVMDENSFSNPNKVAPVKSQLSNAAEQMQVTLAPHSFTAFDLALAEPKLVAEI

SEQ ID NO: 13034 - protein, 121 aa, Zea mays subsp. mays
  peptide (1)..(121): Ceres Seq. ID no. 12413102
MIHPVNISSRYSSSLAASAITWQDAENSFLRVKVVNFGSDTVNLTVSTSGLGASVNALGSTATVLTSGNVMDENSFSNPNKVAPVKSQLSNAAEQMQVTLAPHSFTAFDLALAEPKLVAEI

SEQ ID NO: 13035 - DNA, 1156 bp, Zea mays subsp. mays
  misc_feature (1)..(1156): Ceres Seq. ID no. 12364587
  misc_feature (1)..(1156): Ortholog of  Ceres SEQ ID NO 13594298 as cited in SEQ ID NO 57803
  misc_feature (1)..(1156): Ortholog of  Ceres SEQ ID NO 13503476 as cited in SEQ ID NO 61978
  misc_feature (1)..(1156): Ortholog of  Ceres SEQ ID NO 12578438 as cited in SEQ ID NO 62201
  misc_feature (1)..(1156): Ortholog of  Ceres SEQ ID NO 12617675 as cited in SEQ ID NO 64656
gcattcagcgtgcgaccgaagctagctagcagttattcttgctttgcattaattattgcgagatcgatgacgatgtccattgttgctgccgtgctgctgttgctgctcgtcgtacatccacgggcggcagcgtcgcagccttctccgggctacttcccgagctccacggtgaggcccatggccttctcggatggatacgacaacctgtgggggccgcagcaccagacgctgtcgcaggacaggatggcgctcacgctcttgatggaccgcacctcaggcagcgggttcaagtccaagcgctcgtaccggaacggctacttcggcgtctccatcaaggtgcagccgggctacaccgccggcgtcaacaccgccttctacctgtccaacaacgagctgtacccggggaggcacgacgagatcgacatggagctgctgggcaccgtgccgggggagccctacacgctgcagaccaacgtgtacgtgcggggcaccggcgacggcgcgcgcctcgtgggccgggagatgcgcttccacctctggttcgacccggccgccgacttccaccactacgccatcctctggaaccccgaccagatcgtcttcctcgtcgacgacgtccccatcaggcgctacgccgccgccagtgcgccgttcttccccgaccgccagatgtgggcgtacggctccatctgggacgcctccgactgggccaccgacggcggccgctacagggccgactaccgctaccagcccttcctggcgggattccgggggttcaggaccgccggatgcgaggacgcccagtgccgtcccgtgccggcgtcccccgccggcgccggactcagcgtgcagcagcgggacgccatgcgctgggcgcagcagacctccatggtctactactactgccaggattacaccaaggatcgctccttgtacccagagtgctcgctcgctagctagcctagctaccactaccagagcaagagcatgcatggaggaggcgtgcgagtgaagaagcgccgccctacgtacgtaccgttctaaaattgtatgtacaattaagtctccatccacatccatatatacatatgtaatgtataattaagtccattattaatttaatcatcaaaaaatggaacatgcctatatatttcct

SEQ ID NO: 13036 - protein, 319 aa, Zea mays subsp. mays
  peptide (1)..(319): Ceres Seq. ID no. 12364588
AFSVRPKLASSYSCFALIIARSMTMSIVAAVLLLLLVVHPRAAASQPSPGYFPSSTVRPMAFSDGYDNLWGPQHQTLSQDRMALTLLMDRTSGSGFKSKRSYRNGYFGVSIKVQPGYTAGVNTAFYLSNNELYPGRHDEIDMELLGTVPGEPYTLQTNVYVRGTGDGARLVGREMRFHLWFDPAADFHHYAILWNPDQIVFLVDDVPIRRYAAASAPFFPDRQMWAYGSIWDASDWATDGGRYRADYRYQPFLAGFRGFRTAGCEDAQCRPVPASPAGAGLSVQQRDAMRWAQQTSMVYYYCQDYTKDRSLYPECSLAS

SEQ ID NO: 13037 - protein, 297 aa, Zea mays subsp. mays
  peptide (1)..(297): Ceres Seq. ID no. 12364589
MTMSIVAAVLLLLLVVHPRAAASQPSPGYFPSSTVRPMAFSDGYDNLWGPQHQTLSQDRMALTLLMDRTSGSGFKSKRSYRNGYFGVSIKVQPGYTAGVNTAFYLSNNELYPGRHDEIDMELLGTVPGEPYTLQTNVYVRGTGDGARLVGREMRFHLWFDPAADFHHYAILWNPDQIVFLVDDVPIRRYAAASAPFFPDRQMWAYGSIWDASDWATDGGRYRADYRYQPFLAGFRGFRTAGCEDAQCRPVPASPAGAGLSVQQRDAMRWAQQTSMVYYYCQDYTKDRSLYPECSLAS

SEQ ID NO: 13038 - protein, 295 aa, Zea mays subsp. mays
  peptide (1)..(295): Ceres Seq. ID no. 12364590
MSIVAAVLLLLLVVHPRAAASQPSPGYFPSSTVRPMAFSDGYDNLWGPQHQTLSQDRMALTLLMDRTSGSGFKSKRSYRNGYFGVSIKVQPGYTAGVNTAFYLSNNELYPGRHDEIDMELLGTVPGEPYTLQTNVYVRGTGDGARLVGREMRFHLWFDPAADFHHYAILWNPDQIVFLVDDVPIRRYAAASAPFFPDRQMWAYGSIWDASDWATDGGRYRADYRYQPFLAGFRGFRTAGCEDAQCRPVPASPAGAGLSVQQRDAMRWAQQTSMVYYYCQDYTKDRSLYPECSLAS

SEQ ID NO: 13039 - DNA, 1054 bp, Zea mays subsp. mays
  misc_feature (1)..(1054): Ceres Seq. ID no. 12340668
  misc_feature (1)..(1054): Ortholog of  Ceres SEQ ID NO 15173129 as cited in SEQ ID NO 56188
  misc_feature (1)..(1054): Ortholog of  Ceres SEQ ID NO 12626033 as cited in SEQ ID NO 64401
ggaagaaacactcgcttctgagtttggtcgcggttttgcccctcccttcttgaactcctccgctcgatcgaactcagttccgattcggcaggttcattgtgaagttgaggtgggtggtataagcatcgaagagagcatgagcactgccagtggtacaaggcgtgcaccaagaagacagtcgcaagatgggtctgctgataaagtagtggtgatcatcgaagcaacctccccggtggtggggagccgtcgtggaccaccgacccctgttcctggcgcccaaaactcacccattgatgtggaggccatcgaagatgaagttcaggcagtatctccctcgcgagtgcccccaccgaggagggacaggagaaccaggagggaacctataacagtggttgacttggaggttgacgctagccaggaagggaacaaacgccagagggttgtggcagtagatcacctctctcccgattggggagcagggtccagcttgcagccaaatggcgtacaaaccggcaaagagcctgctaaggaggttcccaaggaaccatcttttacctgcccaatatgttggaataagatggaggagccttccacaacgacttgtggccatatcttctgcgacacgtgcatcaaacaggccatcaaggttcagaagaaatgccctacttgcaggaaggggctgaaaatgaatagtgttcatcgtattttccttccgaacgcttctagttaaggtcgattggctttgtcaaaggaacttctggtaacacaaggctgtgcaatgtacagtgaggatcagaagttcttgggtgaacagcagatagatgtttcatcctagtctgtatcatttaacagcatcactaggagctcatcatgaaaacttcctgactagggaagtggatatcagcctcagttttactggcctcttattgcatccgtggttcataatgttatttcgctgttgtatgtattaggttattactgtggtggattagtgtaactgggatttgcttcattgtaaaatgataatgacgagttgaaacgtttagcatttttg

SEQ ID NO: 13040 - protein, 242 aa, Zea mays subsp. mays
  peptide (1)..(242): Ceres Seq. ID no. 12340669
EETLASEFGRGFAPPFLNSSARSNSVPIRQVHCEVEVGGISIEESMSTASGTRRAPRRQSQDGSADKVVVIIEATSPVVGSRRGPPTPVPGAQNSPIDVEAIEDEVQAVSPSRVPPPRRDRRTRREPITVVDLEVDASQEGNKRQRVVAVDHLSPDWGAGSSLQPNGVQTGKEPAKEVPKEPSFTCPICWNKMEEPSTTTCGHIFCDTCIKQAIKVQKKCPTCRKGLKMNSVHRIFLPNASS

SEQ ID NO: 13041 - protein, 197 aa, Zea mays subsp. mays
  peptide (1)..(197): Ceres Seq. ID no. 12340670
MSTASGTRRAPRRQSQDGSADKVVVIIEATSPVVGSRRGPPTPVPGAQNSPIDVEAIEDEVQAVSPSRVPPPRRDRRTRREPITVVDLEVDASQEGNKRQRVVAVDHLSPDWGAGSSLQPNGVQTGKEPAKEVPKEPSFTCPICWNKMEEPSTTTCGHIFCDTCIKQAIKVQKKCPTCRKGLKMNSVHRIFLPNASS

SEQ ID NO: 13042 - DNA, 1264 bp, Zea mays subsp. mays
  misc_feature (1)..(1264): Ceres Seq. ID no. 12411439
  misc_feature (1)..(1264): Ortholog of  Ceres SEQ ID NO 15169380 as cited in SEQ ID NO 58483
  misc_feature (1)..(1264): Ortholog of  Ceres SEQ ID NO 13595647 as cited in SEQ ID NO 59884
atgccagagcaaacccataggtccagtccaaatccaatccctgttgccatgagaatttcaggggcagccatggccgaaaaggagagcaacggagtgcgggtgtgcgtcaccggaggagccgggttcatcggctcctggctcgtcaggaagctcctcgagaaaggctacaccgtccacgccaccctgcggaacaccggggacgaggcgaaggcggggctgctgcgtcggctggtccccggcgcagcggagcggctgcggttgttccaggccgacctcttcgacgccgccaccttcgcgccggcgatcgctgggtgccagttcgtcttcctcgtcgccacgccattcgggctcgatagcgccggctcccagtataagagcacggcggaagctgtggtggacgcggtgcacgcgatcctccggcaatgcgaggagtccaggacggtgaagcgagtgatccacacggcctccgtagcggccgcctcgccgctgctggaggaggaggtccccgcctccggcgtcgggtacagagacttcatcgacgaatcttgttggacttcgctcaacgttgactatcctctacgaagcgcacacttcgacaagtacatactgtcgaagctgcagtcggagcaagagctcctgagctacaacaacggcgagagtccggcgttcgaggtggtgaccctgccgctggggctcgtggcgggcgacacggtcctcggccgcgccccggagacggtggagagcgccgtggcgcccgtgtcccgcagcgagccctacttcggcctcctgcgcatactgcagcagctcctggggtcgctgccgctggtgcacgtggacgacgtctgcgacgcgctcgtcttctgcatggagcggcgcccctccgtcgccggccgcttcctctgcgccgccgcgtacccgacgatccacgacgtggtcgcccactacgccagcaagttccctcacctcgacatcttgaaagagacgacggaggcggtggcgacggtgcggcctgcccgggacaggttgggcgagctgggcttcaagtacaagtacggcatggaagagattctggatagcagcgttgcctgtgcggcgagattgggttcccttgacggatccaagctcggcctacagaaaggataaaagctcgaagcttactcataagcaccatggggaacttggattgttcgctgtccactatacgcgttcgaaatttggaaactagacatactccaataaaacaagaggtaaagaaacggaattc

SEQ ID NO: 13043 - protein, 380 aa, Zea mays subsp. mays
  peptide (1)..(380): Ceres Seq. ID no. 12411440
MPEQTHRSSPNPIPVAMRISGAAMAEKESNGVRVCVTGGAGFIGSWLVRKLLEKGYTVHATLRNTGDEAKAGLLRRLVPGAAERLRLFQADLFDAATFAPAIAGCQFVFLVATPFGLDSAGSQYKSTAEAVVDAVHAILRQCEESRTVKRVIHTASVAAASPLLEEEVPASGVGYRDFIDESCWTSLNVDYPLRSAHFDKYILSKLQSEQELLSYNNGESPAFEVVTLPLGLVAGDTVLGRAPETVESAVAPVSRSEPYFGLLRILQQLLGSLPLVHVDDVCDALVFCMERRPSVAGRFLCAAAYPTIHDVVAHYASKFPHLDILKETTEAVATVRPARDRLGELGFKYKYGMEEILDSSVACAARLGSLDGSKLGLQKG

SEQ ID NO: 13044 - protein, 364 aa, Zea mays subsp. mays
  peptide (1)..(364): Ceres Seq. ID no. 12411441
MRISGAAMAEKESNGVRVCVTGGAGFIGSWLVRKLLEKGYTVHATLRNTGDEAKAGLLRRLVPGAAERLRLFQADLFDAATFAPAIAGCQFVFLVATPFGLDSAGSQYKSTAEAVVDAVHAILRQCEESRTVKRVIHTASVAAASPLLEEEVPASGVGYRDFIDESCWTSLNVDYPLRSAHFDKYILSKLQSEQELLSYNNGESPAFEVVTLPLGLVAGDTVLGRAPETVESAVAPVSRSEPYFGLLRILQQLLGSLPLVHVDDVCDALVFCMERRPSVAGRFLCAAAYPTIHDVVAHYASKFPHLDILKETTEAVATVRPARDRLGELGFKYKYGMEEILDSSVACAARLGSLDGSKLGLQKG

SEQ ID NO: 13045 - protein, 357 aa, Zea mays subsp. mays
  peptide (1)..(357): Ceres Seq. ID no. 12411442
MAEKESNGVRVCVTGGAGFIGSWLVRKLLEKGYTVHATLRNTGDEAKAGLLRRLVPGAAERLRLFQADLFDAATFAPAIAGCQFVFLVATPFGLDSAGSQYKSTAEAVVDAVHAILRQCEESRTVKRVIHTASVAAASPLLEEEVPASGVGYRDFIDESCWTSLNVDYPLRSAHFDKYILSKLQSEQELLSYNNGESPAFEVVTLPLGLVAGDTVLGRAPETVESAVAPVSRSEPYFGLLRILQQLLGSLPLVHVDDVCDALVFCMERRPSVAGRFLCAAAYPTIHDVVAHYASKFPHLDILKETTEAVATVRPARDRLGELGFKYKYGMEEILDSSVACAARLGSLDGSKLGLQKG

SEQ ID NO: 13046 - DNA, 1177 bp, Zea mays subsp. mays
  misc_feature (1)..(1177): Ceres Seq. ID no. 12341403
  misc_feature (1)..(1177): Ortholog of  Ceres SEQ ID NO 14316365 as cited in SEQ ID NO 60135
acatatgctgtccgtcaccgcgcgcgcctccttgcccttcttcaccctttcctcccggacccggcgtctccgtgcccgtgcgtgccttctccggcctgcggtctcctccaccggccaccgctgcctcgcaattgggcaaggcaatcagaccgctcccatcaaccgccctgaccgcgcgaggaagatcaaacgcggaggccgtccgtccctcccgcgttatcgtgatgccaggcctcgccgcagccgagcaggacgccgtctcgctggtgcggcgcgtcgcccgcgctctcaaccgccgcttcaccgacatcgtcgcactgctcttcagccacaagggcgctggatcgctcggcgccgtcgcggggttcgccatcgccgtcgtgttcgcgtggaagttcctgcgcccccgcagacgtgctcccaagcggcccccacctacccctgcagcggctcccgctgcgactgtgcctgatgcggccgagcctatcggtgactcaggcaaggtagtaacacgggaaattgtggtgaagcgactgaaaggctgcagaaaggttacatgccaacttctcggtgttgtttttgaggaaaaaattcctgaggagcttcagaaacatgccacagttagaccctccgtggtagagctgctactggaaatatccagatattgtgatctctacctaatggagactgtaattgacgataagagcgaggaaaatgctctcatggccctggagatctctggacttttcagaactggtggcctgatgaaagagaaggtgctcttttgcagctctgaagttggtcgaacttcatttgttcgacagttggagtcagattttcacatagacacgagccttgacatagtttctcaactatctcggttcattcgatgccaactatttatttccacggtggaaggagaacagcttgcaggcaacgtattcaattctccaagtcttgagcagttcttctcttgatggcgggacgcaaagaaaggccttctgcactccaaacaaatgtgctgatttcacaattgtgacttgtgagttgtaggcttgtagcgcccccaaccaaggcctggacgcaacaaacaccctactcctgttggagttaagttgtgatcatgcaagatgtatattaaacagacaataataagttggtaaaaatattcatattt

SEQ ID NO: 13047 - protein, 324 aa, Zea mays subsp. mays
  peptide (1)..(324): Ceres Seq. ID no. 12341404
ICCPSPRAPPCPSSPFPPGPGVSVPVRAFSGLRSPPPATAASQLGKAIRPLPSTALTARGRSNAEAVRPSRVIVMPGLAAAEQDAVSLVRRVARALNRRFTDIVALLFSHKGAGSLGAVAGFAIAVVFAWKFLRPRRRAPKRPPPTPAAAPAATVPDAAEPIGDSGKVVTREIVVKRLKGCRKVTCQLLGVVFEEKIPEELQKHATVRPSVVELLLEISRYCDLYLMETVIDDKSEENALMALEISGLFRTGGLMKEKVLFCSSEVGRTSFVRQLESDFHIDTSLDIVSQLSRFIRCQLFISTVEGEQLAGNVFNSPSLEQFFS

SEQ ID NO: 13048 - protein, 250 aa, Zea mays subsp. mays
  peptide (1)..(250): Ceres Seq. ID no. 12341405
MPGLAAAEQDAVSLVRRVARALNRRFTDIVALLFSHKGAGSLGAVAGFAIAVVFAWKFLRPRRRAPKRPPPTPAAAPAATVPDAAEPIGDSGKVVTREIVVKRLKGCRKVTCQLLGVVFEEKIPEELQKHATVRPSVVELLLEISRYCDLYLMETVIDDKSEENALMALEISGLFRTGGLMKEKVLFCSSEVGRTSFVRQLESDFHIDTSLDIVSQLSRFIRCQLFISTVEGEQLAGNVFNSPSLEQFFS

SEQ ID NO: 13049 - DNA, 1385 bp, Zea mays subsp. mays
  misc_feature (1)..(1385): Ceres Seq. ID no. 12411435
  misc_feature (1)..(1385): Ortholog of  Ceres SEQ ID NO 14315993 as cited in SEQ ID NO 57788
agccgaagaaccctcgctcgagaccgaagaagacaaaatcgcatctcctcgcctcctcccctcctcccgagatccgggcaaagcgcgccgcgcgagaaccaggatatcgatttaggtatatggacaaggtgtctgaaggtactaagtgagatggataagaagaaagggaccgatggcaccgaaccaggaccagctccatctcgtgccgtcgacagatttggttttataaagccagaacaaggcaattcacctgatggaattccaaaaggcaagtctatacatgagcgtgaaagggaggaaagaaggataagaaaatggaggaagatgataggtgttggtggtaatgactggaagcattatgttagaaggaaccctcatgtggttaaaaggcgaataaggaaaggaattcctgattgtctcagaggacttgtttggcagttgatttcaggcagtcgggacctcttactaatgaacccaggggtttacgagacactggtgatatatgagacatcggcctctgaattggaaattattcgtgacatatcacgcacatttccatctcatatattctttcaacaaaggcatggtccaggccaaagatcattgtataacattttgaaagcatattctgtctatgacagggatgttggatatgtgcagggaatgggatttttagctgggctgctgcttctttatatgagtgaggaggatgcattctggttattagtcgcgttgctaaagggagctgtccatgcaccaatggaaggcttgtatcaggctggtttgccgcttgtgcagcaatatttgtctcagtttgagaaattagttattgagctcatgccaaaattgggacaacactttgttgaagaaatgataaacccaagcatgtatgcaagtcaatggtttatcacagttttctcatattccttcccatttcatctaactcttagagtttgggatgtgtttctttatgagggtattaaggttgtattccaagttggattggctctattgagactctgtcacgatgatttagtcaaattaccttttgagaaactgctctatgccttgagaaatttccctcaggaagcgacagatccagatgtattattgccgcttgccttttcatttaaggtatcgagtcgtctcgaggagcttcagaaggagtatcagaagcgacaggagggcaccagtgaaacttcaagcggcgagcggctacagcccctcgtatcgaagacgatgagcagggtcggtagccgtgttgtgtcgaacttaacgaccgctgacagaaaatgacagacacgttctcttgtttgtttgtaactcgcatgtacactgtacagaaagaacggccttataatccatccatctaacagtatttgttc

SEQ ID NO: 13050 - protein, 431 aa, Zea mays subsp. mays
  peptide (1)..(431): Ceres Seq. ID no. 12411436
SRRTLARDRRRQNRISSPPPLLPRSGQSAPRENQDIDLGIWTRCLKVLSEMDKKKGTDGTEPGPAPSRAVDRFGFIKPEQGNSPDGIPKGKSIHEREREERRIRKWRKMIGVGGNDWKHYVRRNPHVVKRRIRKGIPDCLRGLVWQLISGSRDLLLMNPGVYETLVIYETSASELEIIRDISRTFPSHIFFQQRHGPGQRSLYNILKAYSVYDRDVGYVQGMGFLAGLLLLYMSEEDAFWLLVALLKGAVHAPMEGLYQAGLPLVQQYLSQFEKLVIELMPKLGQHFVEEMINPSMYASQWFITVFSYSFPFHLTLRVWDVFLYEGIKVVFQVGLALLRLCHDDLVKLPFEKLLYALRNFPQEATDPDVLLPLAFSFKVSSRLEELQKEYQKRQEGTSETSSGERLQPLVSKTMSRVGSRVVSNLTTADRK

SEQ ID NO: 13051 - protein, 381 aa, Zea mays subsp. mays
  peptide (1)..(381): Ceres Seq. ID no. 12411437
MDKKKGTDGTEPGPAPSRAVDRFGFIKPEQGNSPDGIPKGKSIHEREREERRIRKWRKMIGVGGNDWKHYVRRNPHVVKRRIRKGIPDCLRGLVWQLISGSRDLLLMNPGVYETLVIYETSASELEIIRDISRTFPSHIFFQQRHGPGQRSLYNILKAYSVYDRDVGYVQGMGFLAGLLLLYMSEEDAFWLLVALLKGAVHAPMEGLYQAGLPLVQQYLSQFEKLVIELMPKLGQHFVEEMINPSMYASQWFITVFSYSFPFHLTLRVWDVFLYEGIKVVFQVGLALLRLCHDDLVKLPFEKLLYALRNFPQEATDPDVLLPLAFSFKVSSRLEELQKEYQKRQEGTSETSSGERLQPLVSKTMSRVGSRVVSNLTTADRK

SEQ ID NO: 13052 - protein, 323 aa, Zea mays subsp. mays
  peptide (1)..(323): Ceres Seq. ID no. 12411438
MIGVGGNDWKHYVRRNPHVVKRRIRKGIPDCLRGLVWQLISGSRDLLLMNPGVYETLVIYETSASELEIIRDISRTFPSHIFFQQRHGPGQRSLYNILKAYSVYDRDVGYVQGMGFLAGLLLLYMSEEDAFWLLVALLKGAVHAPMEGLYQAGLPLVQQYLSQFEKLVIELMPKLGQHFVEEMINPSMYASQWFITVFSYSFPFHLTLRVWDVFLYEGIKVVFQVGLALLRLCHDDLVKLPFEKLLYALRNFPQEATDPDVLLPLAFSFKVSSRLEELQKEYQKRQEGTSETSSGERLQPLVSKTMSRVGSRVVSNLTTADRK

SEQ ID NO: 13053 - DNA, 903 bp, Zea mays subsp. mays
  misc_feature (1)..(903): Ceres Seq. ID no. 12355756
  misc_feature (1)..(903): Ortholog of  Ceres SEQ ID NO 13584899 as cited in SEQ ID NO 64830
  misc_feature (1)..(903): Ortholog of  Ceres SEQ ID NO 13596128 as cited in SEQ ID NO 67831
  misc_feature (1)..(903): Ortholog of  Ceres SEQ ID NO 12585194 as cited in SEQ ID NO 68878
  misc_feature (1)..(903): Ortholog of  Ceres SEQ ID NO 12589186 as cited in SEQ ID NO 0
agggatagcataacaccgccgaggaagcagcaagcagcaaggtcgacatgtcgtctccgccgccggtgaagctgatcggcttcttcggcagcccgtacgcgttccgcgcggaggcggcgctgtgcctgaaaggcgtgccgtacgagctgatcctggaggacctgttcggcagcaagagcgagctcctgctccaccacaaccccgtgcacaagaaggtgcccgtgctcctccacggcgacggccgggccatctccgagtccctcgtcatcgccgagtacgtcgacgaggccttcgacgggccgccgctgctccccgccgacccctacgcgcgcgccgccgcccgcttctgggccgacttcatcgagaccaggctcaccaagcccttcttcatggcgatctgggtggaggagcgcgacgcgcggctgcggttcgaggaggaggccaaggagctcgtggcgctgctggaggcgcagctcgagggaaagaggttcttcgccggcgacaggccggggtacctcgacgtggccgcgtccgcgctcgggccctggcgcagcgtcatcgaggagctcaacggtgtggcgctgctcagcgaggatgaccaccccaacctgtgccggtggaccagggactactgcgccttcgaggctctcaagccgtgcatgccggatcgggagaagctcctcgcctacttcactaagaacttcgacaggtacaaggcggccgtcaatgcgacgctatcgcagtcgcagcagtaataactgcccaactgggtacgcctctgcccggccgtatggcgggcgtttctttttttctttcttcagaataacgtagctgtgcccagtactcatgttttcaattctgcaaagtgcaaaccaacaagtcgctgtgtggtttactcttttt

SEQ ID NO: 13054 - protein, 235 aa, Zea mays subsp. mays
  peptide (1)..(235): Ceres Seq. ID no. 12355757
MSSPPPVKLIGFFGSPYAFRAEAALCLKGVPYELILEDLFGSKSELLLHHNPVHKKVPVLLHGDGRAISESLVIAEYVDEAFDGPPLLPADPYARAAARFWADFIETRLTKPFFMAIWVEERDARLRFEEEAKELVALLEAQLEGKRFFAGDRPGYLDVAASALGPWRSVIEELNGVALLSEDDHPNLCRWTRDYCAFEALKPCMPDREKLLAYFTKNFDRYKAAVNATLSQSQQ

SEQ ID NO: 13055 - protein, 121 aa, Zea mays subsp. mays
  peptide (1)..(121): Ceres Seq. ID no. 12355758
MAIWVEERDARLRFEEEAKELVALLEAQLEGKRFFAGDRPGYLDVAASALGPWRSVIEELNGVALLSEDDHPNLCRWTRDYCAFEALKPCMPDREKLLAYFTKNFDRYKAAVNATLSQSQQ

SEQ ID NO: 13056 - DNA, 1565 bp, Zea mays subsp. mays
  misc_feature (1)..(1565): Ceres Seq. ID no. 12411428
  misc_feature (1)..(1565): Ortholog of  Ceres SEQ ID NO 13596048 as cited in SEQ ID NO 68476
  misc_feature (1)..(1565): Ortholog of  Ceres SEQ ID NO 12589137 as cited in SEQ ID NO 0
aaccatcctccctccacagatctctccggggaggcagcaacagttatgtcatatcattgtcgcgtcctcgtccccgttccatttcattatccccccggagctggtgcgcgagtcggagctggtgcagggtcacccttcccctcggcctcaagagctctgcggttgccgcggccaagggcgtccgtggagaagcgggagcaggtggcggcgatggaagagcaaggcggccaggcggcgctcgggtgggcggccagggacgactccggcgtcctctccccctacagcttctccagaagggttcctaaagacgacgatgtcacgatcaaggtgctctactgcgggatctgccacaccgacctgcacgtcatcaagaacgactggcgaaacgccatgtacccagtcgtcccggggtaaccgatccaatttcgctagcctagacgccccggatgctgttgcaaaactaacagcctctgtctgtctgaccccgtcggctggcgtggcgtggcgagcaggcacgagatcgtgggcgtggtgaccggcgtcggcggcggcgtcacgcggttcaaggccggcgacacggtcggcgtgggctacttcgtggggtcctgccgctcctgcgacagctgcggcaagggggacgacaactactgcgcggggatcgtgctcacctccaacggcgtcgaccacgcgcacggcggcgcgcccaccagggggggattctccgacgtcctggtcgcgagcgagcactacgtggtccgcgtccccgacggcctggcgctggaccgcaccgcgccgctgctctcgccggcgtcaccgtgtacagccccatgatgcgccacggcctcaacgagcccggcaagcacctcggcgtcgtcggcctcggcggcctcggccacgtcgccgtcaagttcggcaaggccttcgggatgaaggtcaccgtcatcagcacgtccgccagcaagcgccaggaggccatcgagaacctcggcgcggacgagttcctcatcagccgggacaaggaccagatgaaggcggcgacggggaccatggacggcatcatcgacacggtgtcggcgtggcacccgatcacgccgctgctggcgctgctgaagccgctggggcagatggtggtcgtgggcgcgccgagcaagccgctcgagctgccggcctacgccatcgtgccgggcgggaagggcgtggctgggaacaatgtcggcagcgtcagggactgccaggccatgctcgagttcgcggggaagcacggcatcggggccgaggtcgaggtcatcaagatggactacgtcaacacggccatggagcggctcgagaagaacgacgtccgctaccgcttcgtcatcgacgtcgccggcagcctcggctctgccgcctaggcatggctgcaaaggtttcaatcagagcccagccgcaataatttgttagctaccgaatgaatgatggtctacgcttgttgatgagttggtgctttgtcgtggttttgtggatgtaataattcgatgtacaaataaaaaaaggggagacaaggtgcttgttcccttggtttggtg

SEQ ID NO: 13057 - protein, 187 aa, Zea mays subsp. mays
  peptide (1)..(187): Ceres Seq. ID no. 12411429
MMRHGLNEPGKHLGVVGLGGLGHVAVKFGKAFGMKVTVISTSASKRQEAIENLGADEFLISRDKDQMKAATGTMDGIIDTVSAWHPITPLLALLKPLGQMVVVGAPSKPLELPAYAIVPGGKGVAGNNVGSVRDCQAMLEFAGKHGIGAEVEVIKMDYVNTAMERLEKNDVRYRFVIDVAGSLGSAA

SEQ ID NO: 13058 - protein, 186 aa, Zea mays subsp. mays
  peptide (1)..(186): Ceres Seq. ID no. 12411430
MRHGLNEPGKHLGVVGLGGLGHVAVKFGKAFGMKVTVISTSASKRQEAIENLGADEFLISRDKDQMKAATGTMDGIIDTVSAWHPITPLLALLKPLGQMVVVGAPSKPLELPAYAIVPGGKGVAGNNVGSVRDCQAMLEFAGKHGIGAEVEVIKMDYVNTAMERLEKNDVRYRFVIDVAGSLGSAA

SEQ ID NO: 13059 - protein, 177 aa, Zea mays subsp. mays
  peptide (1)..(177): Ceres Seq. ID no. 12411431
TILPPQISPGRQQQLCHIIVASSSPFHFIIPPELVRESELVQGHPSPRPQELCGCRGQGRPWRSGSRWRRWKSKAARRRSGGRPGTTPASSPPTASPEGFLKTTMSRSRCSTAGSATPTCTSSRTTGETPCTQSSRGNRSNFASLDAPDAVAKLTASVCLTPSAGVAWRAGTRSWAW

SEQ ID NO: 13060 - DNA, 1269 bp, Zea mays subsp. mays
  misc_feature (1)..(1269): Ceres Seq. ID no. 12411424
  misc_feature (1)..(1269): Ortholog of  Ceres SEQ ID NO 14307065 as cited in SEQ ID NO 53918
aaaatccggcctccacggctccacccacgagccagtggaatcttaccgattcggcaaccgtgctaatcgatatccgtgcaattccacctcccgaaccgaatccctccaccgacccaaaccctagcgcgcacccttctccgtcgtcctttcctggcgcgcgggccggtgtcggagatgcgggcgctgctcgcggacggcgggatggcactggcggtgtcgccggaggccaacgagtcgtcgggtggcgctgcggtgtcgctagggccgttatcgtgggcgtcggagtgccacggggtactgtacaacctggccttgatgctgccatcgctgggcctttgtggggttcctggcgtggcaggcgcggcggagcttccgtaggctcagctacggccgctctcacgtcgttgtcgtcgcgtactacgcgctcctctgggccgtcgccgtactcaacctcctctggtgcttcctgcaggcatggcaatgtatgcctgacagggcattctcttggaatatactgtcactgtttacaaaatcaggaatgttattcttggaagtgagtctcatagcctttctacttcaaggaaatgatgccagcggttttgaatctttggcacgaacctttgttatatctggagctgtagttgctgctgatgtattgctcaagactatatatgtttttggcttcggtgttcctttgttcattgatactgatcaaggaactagtgggaaatggggcctgtggattctccacaaacttgtgcttactggagtctatgggctgattgttttcatgcatcattcaagatggagagacaggctgcctgcaaaaccagcatactacaactatgtatgtgtgatgttgctactgaatggcatatcactgtttggatgtttccttattgcaagtggagctggatttggtttatggttatataatctcacaaccgtatgctatcattctctttaccttcccctcctatatgtgactttcttagcagacttcttccaggaggaagacatgctcctagagaacgtctactattctgaaatgaaggatgctgggttcttcgatgctgactgggattaatccgtggctactgtgctgtatgacccatcccatatgaagtacgctgtatttgtttttattttatctgtgtactctcaacgtagaacaggaaatgtatgtagctagtcgtggtagtgaatggaaatatgtaatcttactgctgcatacttcagaaaatcagaattcaagtgatttcacggctg

SEQ ID NO: 13061 - protein, 200 aa, Zea mays subsp. mays
  peptide (1)..(200): Ceres Seq. ID no. 12411425
MPDRAFSWNILSLFTKSGMLFLEVSLIAFLLQGNDASGFESLARTFVISGAVVAADVLLKTIYVFGFGVPLFIDTDQGTSGKWGLWILHKLVLTGVYGLIVFMHHSRWRDRLPAKPAYYNYVCVMLLLNGISLFGCFLIASGAGFGLWLYNLTTVCYHSLYLPLLYVTFLADFFQEEDMLLENVYYSEMKDAGFFDADWD

SEQ ID NO: 13062 - protein, 184 aa, Zea mays subsp. mays
  peptide (1)..(184): Ceres Seq. ID no. 12411426
NPASTAPPTSQWNLTDSATVLIDIRAIPPPEPNPSTDPNPSAHPSPSSFPGARAGVGDAGAARGRRDGTGGVAGGQRVVGWRCGVARAVIVGVGVPRGTVQPGLDAAIAGPLWGSWRGRRGGASVGSATAALTSLSSRTTRSSGPSPYSTSSGASCRHGNVCLTGHSLGIYCHCLQNQECYSWK

SEQ ID NO: 13063 - protein, 182 aa, Zea mays subsp. mays; identical to SEQ ID NO: 12760
  peptide (1)..(182): Ceres Seq. ID no. 12411427

SEQ ID NO: 13064 - DNA, 1852 bp, Zea mays subsp. mays
  misc_feature (1)..(1852): Ceres Seq. ID no. 12342422
  misc_feature (1)..(1852): Ortholog of  Ceres SEQ ID NO 12625388 as cited in SEQ ID NO 63299
  misc_feature (1)..(1852): Ortholog of  Ceres SEQ ID NO 15179860 as cited in SEQ ID NO 66716
actcaaaaaaggaaaaggaaacggaaaaactcccagttcgtgacggagacaccgaggccagcgccatccacccgctcccctccgctcggccttcatctccccacagccgcaagcgacgggcgtcatatcccatcctgatctctcctcccttcttcagtgcagcagcaggccagcggcacgccacccgcctcactcccgcctccgatccgctgcttactcgccacccggagatggccaccgccgccgccttctccgtctcctcgccggcggcctccgccgtcgccgcgcgatccaaggtgtttggaggagttaaccaggcgagaactagaactggctgccgcgtcggcatcacgcggaagaactttggccgtgtcatgatggcccttgcagtggatgtttctcgttttgaaggagtgccaatggctcctccagacccaattcttggggtttctgaggcctttaaagcagataaaagcgagctgaagctcaatcttggtgttggtgcctataggacagaagagctgcagccctacgtgctcaatgtagtcaagaaggctgaaaatcttatgttggagaaaggagaaaacaaagagtatcttcccattgaaggtttagccgcgtttaacaaagcaacagcagagctattgcttggagctgataaccctgttattaatcaaggactggttgctacacttcagtctctctcgggcactggatcactgcgtctcgctgcagcattcatacaaagatactttcctgaagctaaagtgctgatatcgtcgcctacctggggtaaccacaagaatatcttcaatgatgctagggtaccttggtcagagtaccggtattatgaccccaagactgttgggttggattttgagggaataatagctgacattgaggctgctcctgaaggttcttttgttctgctacatggttgtgctcacaacccaactggaatagacccaactcctgaacagtgggagaaaattgcagatgtcattcaagagaaaaagcatatgccattctttgatgttgcatatcagggttttgccagtggaagccttgatgaagatgcattttctgtcaggctttttgttaagcgtggcatggaagtgtttgttgcacaatcttacagcaagaaccttggtttatattctgaaagggttggtgcaataaatgtcgtgtgctcagcaccagaagttgcagatagggtaaatagccagctgaaacgattggcacgtcccatgtactcgaacccccctattcacggtgccaagatagttgccaacgttgttggtgatccaaccatgtttggtgaatggaaacaagagatggagctaatggctggacggatcaagaatgtaagacagaagctctacgacagtttgtctgccaaggacaagagcggcaaggactggtctttcattctgaggcagattggcatgttctcctacaccggcttgaacaaagcgcagagtgacaacatgacggataaatggcatatttacatgaccaaggatgggcggatctcgttagctgggctgtccctggctaagtgtgattatcttgccgacgccatcatcgattccttccataatgtgaactaggctgaggtacgatagttgagggtcaagctattgatgtttagttccgtggacgctaggctgggatttttgggtccttccagctatacagctcttccgttgtgctccatctggtgtaacttggataaataaaatttttgtcgctgaactaaaactcgtgtgcttttttacctgtaactgtaaggtcagcgcgtggctacagacttgtaaacacttgaatgaaaaaaaaacaatgacattaccgg

SEQ ID NO: 13065 - protein, 535 aa, Zea mays subsp. mays
  peptide (1)..(535): Ceres Seq. ID no. 12342423
SKKEKETEKLPVRDGDTEASAIHPLPSARPSSPHSRKRRASYPILISPPFFSAAAGQRHATRLTPASDPLLTRHPEMATAAAFSVSSPAASAVAARSKVFGGVNQARTRTGCRVGITRKNFGRVMMALAVDVSRFEGVPMAPPDPILGVSEAFKADKSELKLNLGVGAYRTEELQPYVLNVVKKAENLMLEKGENKEYLPIEGLAAFNKATAELLLGADNPVINQGLVATLQSLSGTGSLRLAAAFIQRYFPEAKVLISSPTWGNHKNIFNDARVPWSEYRYYDPKTVGLDFEGIIADIEAAPEGSFVLLHGCAHNPTGIDPTPEQWEKIADVIQEKKHMPFFDVAYQGFASGSLDEDAFSVRLFVKRGMEVFVAQSYSKNLGLYSERVGAINVVCSAPEVADRVNSQLKRLARPMYSNPPIHGAKIVANVVGDPTMFGEWKQEMELMAGRIKNVRQKLYDSLSAKDKSGKDWSFILRQIGMFSYTGLNKAQSDNMTDKWHIYMTKDGRISLAGLSLAKCDYLADAIIDSFHNVN

SEQ ID NO: 13066 - protein, 459 aa, Zea mays subsp. mays
  peptide (1)..(459): Ceres Seq. ID no. 12342424
MATAAAFSVSSPAASAVAARSKVFGGVNQARTRTGCRVGITRKNFGRVMMALAVDVSRFEGVPMAPPDPILGVSEAFKADKSELKLNLGVGAYRTEELQPYVLNVVKKAENLMLEKGENKEYLPIEGLAAFNKATAELLLGADNPVINQGLVATLQSLSGTGSLRLAAAFIQRYFPEAKVLISSPTWGNHKNIFNDARVPWSEYRYYDPKTVGLDFEGIIADIEAAPEGSFVLLHGCAHNPTGIDPTPEQWEKIADVIQEKKHMPFFDVAYQGFASGSLDEDAFSVRLFVKRGMEVFVAQSYSKNLGLYSERVGAINVVCSAPEVADRVNSQLKRLARPMYSNPPIHGAKIVANVVGDPTMFGEWKQEMELMAGRIKNVRQKLYDSLSAKDKSGKDWSFILRQIGMFSYTGLNKAQSDNMTDKWHIYMTKDGRISLAGLSLAKCDYLADAIIDSFHNVN

SEQ ID NO: 13067 - protein, 411 aa, Zea mays subsp. mays
  peptide (1)..(411): Ceres Seq. ID no. 12342425
MMALAVDVSRFEGVPMAPPDPILGVSEAFKADKSELKLNLGVGAYRTEELQPYVLNVVKKAENLMLEKGENKEYLPIEGLAAFNKATAELLLGADNPVINQGLVATLQSLSGTGSLRLAAAFIQRYFPEAKVLISSPTWGNHKNIFNDARVPWSEYRYYDPKTVGLDFEGIIADIEAAPEGSFVLLHGCAHNPTGIDPTPEQWEKIADVIQEKKHMPFFDVAYQGFASGSLDEDAFSVRLFVKRGMEVFVAQSYSKNLGLYSERVGAINVVCSAPEVADRVNSQLKRLARPMYSNPPIHGAKIVANVVGDPTMFGEWKQEMELMAGRIKNVRQKLYDSLSAKDKSGKDWSFILRQIGMFSYTGLNKAQSDNMTDKWHIYMTKDGRISLAGLSLAKCDYLADAIIDSFHNVN

SEQ ID NO: 13068 - DNA, 1340 bp, Zea mays subsp. mays
  misc_feature (1)..(1340): Ceres Seq. ID no. 12355829
  misc_feature (1)..(1340): Ortholog of  Ceres SEQ ID NO 14312507 as cited in SEQ ID NO 0
gcagctcagttactcactccggcctccagcttttcctttgcgccccagggccggaagagcccacacaccaccaccaccactagatagccagcgacgatcgagccgcgcgccggtggacgcgcacatacacgcggtagcttccttctcaagcctagctagccccatcctgcgcgcaggcgggcggcagcgagaattgacgtgcgacgacgagcttgtgcttgctagctagagagcgaggatgtcgagccggaggccgtcgtcgcgtggcaacatctccgaggacgagatcaacgagctcatctccaagctgcaggccctgctccccagctcccgccgccgcggctccggccaggtgcgtcgttgcgaacacacatgaccgctcaactaattaactcccgttcgcctgctgcgccctttttttccgttttaaaacgtctaatgcgcgcggcgcggaatgtaatgcaggcgtcgacgacgaagctgctcaaggagacctgcagctacatcaagagcctgcaccgggaggtggacgacctgagcgaccggctgtccgacctcatggccaccatggaccacaacagccccggcgcggagatcatccgcagcatcctccgctcctgatcgcccacgcgcctcctactgcggcggcgccggccggcgcgcgagagagcgaggtcggcgacgacctcgatcgccgacaacgacgaccgcgcgcgcccgcgccccccggcccatctgttctctccaccggctggccgccgggagccgagctcaattagctagggtatatctcaacctctctctctctctctctctcgctcgctctacatgtgtgtgtacctttctcttcctttcacctgcctgtctcctccctagatctgagatcatgtggctagctctcccatatcaaaatgtactagctacacgcgcacgtatggtggtggtctctgctaagcctaagcttcactgggtagtagggtactagtagcactaggggcttaagcaagctaagcttatcctcctcatcagaatcacattagctcgcaccgcactctctggcttctcgtcgatcgtcttcgtcgtcctcgctcctccgacccacatgatggctagctctccatgtgccgcttctcctctcgcacgtgccgcttctcctcttgtgttcgatatgttgtattgtttccatgtaaatttagtcggtggcctggatcgagttggctagctctctctacaggcaagagacaaccgaccgaccactactatcctagagcaaattgattatcgtcatgatggtgtactgttcaagcttttattaacgacttttaatttacttgctacgt

SEQ ID NO: 13069 - protein, 82 aa, Zea mays subsp. mays
  peptide (1)..(82): Ceres Seq. ID no. 12355830
MTAQLINSRSPAAPFFSVLKRLMRAARNVMQASTTKLLKETCSYIKSLHREVDDLSDRLSDLMATMDHNSPGAEIIRSILRS

SEQ ID NO: 13070 - protein, 75 aa, Zea mays subsp. mays
  peptide (1)..(75): Ceres Seq. ID no. 12355831
QLSYSLRPPAFPLRPRAGRAHTPPPPLDSQRRSSRAPVDAHIHAVASFSSLASPILRAGGRQRELTCDDELVLAS

SEQ ID NO: 13071 - protein, 60 aa, Zea mays subsp. mays
  peptide (1)..(60): Ceres Seq. ID no. 12355832
MRAARNVMQASTTKLLKETCSYIKSLHREVDDLSDRLSDLMATMDHNSPGAEIIRSILRS

SEQ ID NO: 13072 - DNA, 1887 bp, Zea mays subsp. mays
  misc_feature (1)..(1887): Ceres Seq. ID no. 12348859
  misc_feature (1)..(1887): Ortholog of  Ceres SEQ ID NO 14303850 as cited in SEQ ID NO 53464
  misc_feature (1)..(1887): Ortholog of  Ceres SEQ ID NO 14310452 as cited in SEQ ID NO 54426
  misc_feature (1)..(1887): Ortholog of  Ceres SEQ ID NO 15176262 as cited in SEQ ID NO 54751
  misc_feature (1)..(1887): Ortholog of  Ceres SEQ ID NO 15174626 as cited in SEQ ID NO 59393
  misc_feature (1)..(1887): Ortholog of  Ceres SEQ ID NO 15169663 as cited in SEQ ID NO 64659
  misc_feature (1)..(1887): Ortholog of  Ceres SEQ ID NO 13656177 as cited in SEQ ID NO 64997
aaaccgtcggaaccctagatctctctcgcccgcgctccgaaaccccagatccgccatgcaccagcctagagctcgctacccacccggctatggctccggcggtggaggcggagccggacgtggcggtggaggcggaaatggaggaggtggcggaaaccacaactactacggccgaaacccgcagcaacaccactaccaccagcagcagcagtcgcagcactctcataggaactcttcgtaccagcaacagtggctgcggcgagaccaggcccccgccgttgcgggggcagcgtccggaaacgctgtggccaagacggcgtctcagcttgacgccgtaggctcgagctcccaagactggaaggctcaactaaatataccagctccagatacacgctacaggacagaggatgtcactgcaacaaaaggcaatgagtttgaagattatttcttgaaacgtgaactgcttatgggaatctacgaaaagggatttgaaagaccatctcctattcaagaagaaagcattcctattgcgctgactggaagtgatattcttgcaagggcaaaaaatggcactggaaagactgctgccttttgcattccggcacttgaaaaaattgatcctgaaaaaaatgctattcaagttgttatactagtaccaacaagggaactggctctgcaaacttcgcaagtctgtaaagagctcgggaagtaccttaacattcaagttatggttagcactggaggaactagcttgaaggatgacatcatgcgtttataccaacctgttcatttacttgttgggactcctggccgaatacttgatcttaccaggaagggcatttgtgtgttgaaagactgttcaatgcttgtcatggatgaggcagacaagctattagctccagagttccagccttctgtggaggcacttattcatttccttccacctagtcggcagctgttgatgttttcagcaacctttcctgtaactgtcaaggaattcaaagataaatatctgcctagaccttatgtgattaatctaatggatgaactgaccctgaaaggaatcacacaatattatgcttttgtcgaagaaaggcaaaaagttcattgcctgaatacacttttctcaaagcttcaaattaatcaatccattatattctgcaactctgttaatagagttgagctactggctaagaaaataactgaactcggttattcatgcttctacattcatgctaagatgttgcaagaccacagaaaccgagtgtttcatgattttcgtaatggtgcttgcagaaaccttgtgtgcacagatctgtttaccagaggaattgatatccaggctgttaatgtggtcattaattttgacttccctaagacatctgagacatacttacacagggttggccgttctgggagatatggacaccttggtttggcagtgaacttgatcacttatgaagaccgtttcaacttatataggattgagcaagaacttggaacggaaattaagacaatacccccacagattgacctgtccatatactgccaatgatatgtgacagtttcaatgagcatcggacacattttatttattttgagaacatctgtacatagcaacccatcaagtgagttctccaactaaggcgcaactatttcagaagctacctaaatggctacattcctttgtcgtcacacatcaatttctcccccattctcgtcgggttttgttttaatgccttgatgtcgtttgtaagcttacttggattagtagaggaagtgtttcctgtaggctctgatctggtactaacctgtttagctgaggacatgcacattgggtgggctgcttggggcccaaaactatgatgagatgagacattatcttac

SEQ ID NO: 13073 - protein, 517 aa, Zea mays subsp. mays
  peptide (1)..(517): Ceres Seq. ID no. 12348860
NRRNPRSLSPALRNPRSAMHQPRARYPPGYGSGGGGGAGRGGGGGNGGGGGNHNYYGRNPQQHHYHQQQQSQHSHRNSSYQQQWLRRDQAPAVAGAASGNAVAKTASQLDAVGSSSQDWKAQLNIPAPDTRYRTEDVTATKGNEFEDYFLKRELLMGIYEKGFERPSPIQEESIPIALTGSDILARAKNGTGKTAAFCIPALEKIDPEKNAIQVVILVPTRELALQTSQVCKELGKYLNIQVMVSTGGTSLKDDIMRLYQPVHLLVGTPGRILDLTRKGICVLKDCSMLVMDEADKLLAPEFQPSVEALIHFLPPSRQLLMFSATFPVTVKEFKDKYLPRPYVINLMDELTLKGITQYYAFVEERQKVHCLNTLFSKLQINQSIIFCNSVNRVELLAKKITELGYSCFYIHAKMLQDHRNRVFHDFRNGACRNLVCTDLFTRGIDIQAVNVVINFDFPKTSETYLHRVGRSGRYGHLGLAVNLITYEDRFNLYRIEQELGTEIKTIPPQIDLSIYCQ

SEQ ID NO: 13074 - protein, 499 aa, Zea mays subsp. mays
  peptide (1)..(499): Ceres Seq. ID no. 12348861
MHQPRARYPPGYGSGGGGGAGRGGGGGNGGGGGNHNYYGRNPQQHHYHQQQQSQHSHRNSSYQQQWLRRDQAPAVAGAASGNAVAKTASQLDAVGSSSQDWKAQLNIPAPDTRYRTEDVTATKGNEFEDYFLKRELLMGIYEKGFERPSPIQEESIPIALTGSDILARAKNGTGKTAAFCIPALEKIDPEKNAIQVVILVPTRELALQTSQVCKELGKYLNIQVMVSTGGTSLKDDIMRLYQPVHLLVGTPGRILDLTRKGICVLKDCSMLVMDEADKLLAPEFQPSVEALIHFLPPSRQLLMFSATFPVTVKEFKDKYLPRPYVINLMDELTLKGITQYYAFVEERQKVHCLNTLFSKLQINQSIIFCNSVNRVELLAKKITELGYSCFYIHAKMLQDHRNRVFHDFRNGACRNLVCTDLFTRGIDIQAVNVVINFDFPKTSETYLHRVGRSGRYGHLGLAVNLITYEDRFNLYRIEQELGTEIKTIPPQIDLSIYCQ

SEQ ID NO: 13075 - protein, 362 aa, Zea mays subsp. mays
  peptide (1)..(362): Ceres Seq. ID no. 12348862
MGIYEKGFERPSPIQEESIPIALTGSDILARAKNGTGKTAAFCIPALEKIDPEKNAIQVVILVPTRELALQTSQVCKELGKYLNIQVMVSTGGTSLKDDIMRLYQPVHLLVGTPGRILDLTRKGICVLKDCSMLVMDEADKLLAPEFQPSVEALIHFLPPSRQLLMFSATFPVTVKEFKDKYLPRPYVINLMDELTLKGITQYYAFVEERQKVHCLNTLFSKLQINQSIIFCNSVNRVELLAKKITELGYSCFYIHAKMLQDHRNRVFHDFRNGACRNLVCTDLFTRGIDIQAVNVVINFDFPKTSETYLHRVGRSGRYGHLGLAVNLITYEDRFNLYRIEQELGTEIKTIPPQIDLSIYCQ

SEQ ID NO: 13076 - DNA, 670 bp, Zea mays subsp. mays
  misc_feature (1)..(670): Ceres Seq. ID no. 12345755
  misc_feature (1)..(670): Ortholog of  Ceres SEQ ID NO 14308991 as cited in SEQ ID NO 0
atattggctagcttttggctcggcagctaacgacctgcagccaaccatctaccagcgactcagcgagcgagagcagcacacactgcacgcagctagctaggagcagcagcagcggcggcgatggcggcctccatgatctcctcgtcagctctggcggtggcgcctcagggcctgccgcccctcggccgccgcgcctcctccttcgccgtcgtctgctccaagaagaagatcaagaccgacaagccctacgggattgggggtggcctgaccgtcgacgtcgacgccaacgggagaaagggcaagggcaagggcgtgtaccagttcgtcgacaagtacggcgcgaacgtcgacggatacagcccaatctacaacgaggatgactggtctcccaccggcgacgtctacgtcggtggaaccactgggcttctgatctgggccgtcaccctcgctgggatcctcggcggcggcgccctcctcgtctacaacaccagcgccctctccggctaaggatatccaatgcatgcgcttcttgcgattcgtcatgtaaaatcagggtgtctgtctataatctagcctccatggatgctcaaccttcgtcatgtaacaataatcagtgctactcttcattacataattttgatgctatatatatataccccatccctccctt

SEQ ID NO: 13077 - protein, 128 aa, Zea mays subsp. mays
  peptide (1)..(128): Ceres Seq. ID no. 12345756
MAASMISSSALAVAPQGLPPLGRRASSFAVVCSKKKIKTDKPYGIGGGLTVDVDANGRKGKGKGVYQFVDKYGANVDGYSPIYNEDDWSPTGDVYVGGTTGLLIWAVTLAGILGGGALLVYNTSALSG

SEQ ID NO: 13078 - protein, 124 aa, Zea mays subsp. mays
  peptide (1)..(124): Ceres Seq. ID no. 12345757
MISSSALAVAPQGLPPLGRRASSFAVVCSKKKIKTDKPYGIGGGLTVDVDANGRKGKGKGVYQFVDKYGANVDGYSPIYNEDDWSPTGDVYVGGTTGLLIWAVTLAGILGGGALLVYNTSALSG

SEQ ID NO: 13079 - DNA, 1482 bp, Zea mays subsp. mays
  misc_feature (1)..(1482): Ceres Seq. ID no. 13492673
  misc_feature (1)..(1482): Ortholog of  Ceres SEQ ID NO 14308851 as cited in SEQ ID NO 55618
atcgcctccaccgttctctcttcctctgctcttctctgcctgcctgagctcaccgcacctcgcctcctcaccgcgtttcctccgttaatccggtaaccgtctctcaccatctctgcggtcaccctagagtccctctctgcctgcccctgccagcgcgggggcgcggtgtggctctcccagatccgcctggcattgctcgctcggggtcgtgccaagccgatccgatctcgcgcttgcgcgctcctgccgcggatccggctggatctcgctggaattggggcgcgcgtttatttgaaatgcagcagatccgcgtgcttgcgcgcgtgatctggcgtcgtcgcgggcctttctttaacgaaatggcccgatctgtggtttggtggtcaatgccatgtttttttttattattactgtcttatgctgggagaaaaataggaacagagaatagcttcaattgatgccttttagaacggattctatagagcaactcatggatactttctgcttgttttaacaaaatgtggcatcgggcgagctctgctgtaggtagaaaatggccgatgccgaggatatccagcccctcgtctgcgacaacggaactggcatggtcaaggctgggttcgccggcgacgacgccccgagggccgtcttccccagcatcgtggggcgcccgcgccacactggtgtcatggtcgggatggggcagaaggacgcctacgtcggtgacgaggcgcagtccaagaggggtatcctgaccctcaagtaccccatcgagcacgggatcgtcagcaactgggacgacatggagaagatctggcatcacaccttctacaacgagctccgcgtggctcccgaggagcaccccgtcctcctcaccgaggcgcccctgaaccccaaggctaacagggagaagatgacccagatcatgttcgagaccttcaacacccccgctatgtacgtcgccatccaggccgtgctctctctgtatgccagtggccgtaccacaggtatcgtgctcgactcgggagatggtgtgagccacaccgtccccatctacgagggatacgccctcccccacgccatccttcgccttgatctggccggtcgcgacctcaccgactacctgatgaagatcctgactgagcgcggctactccttcaccaccaccgctgagcgggaaatcgtgagggacatgaaggagaagctcgcctacatcgccctggactacgaccaggagatggagaccgccaagaccagcagtttgagctgtatatgtaggtagtaggtaatagggtagttgccaaaaggacggctcccttttcctattgggaattgcgaatttttgtaggaactaataccttgcacagcaatgcctcgatgccaagatacagactttaaatttaatgttggattagatgctggaagagaaacatcctggtgtatattgcagtggaatgtactgctggaatacatgtttttccg

SEQ ID NO: 13080 - protein, 242 aa, Zea mays subsp. mays
  peptide (1)..(242): Ceres Seq. ID no. 13492674
MADAEDIQPLVCDNGTGMVKAGFAGDDAPRAVFPSIVGRPRHTGVMVGMGQKDAYVGDEAQSKRGILTLKYPIEHGIVSNWDDMEKIWHHTFYNELRVAPEEHPVLLTEAPLNPKANREKMTQIMFETFNTPAMYVAIQAVLSLYASGRTTGIVLDSGDGVSHTVPIYEGYALPHAILRLDLAGRDLTDYLMKILTERGYSFTTTAEREIVRDMKEKLAYIALDYDQEMETAKTSSLSCICR

SEQ ID NO: 13081 - protein, 225 aa, Zea mays subsp. mays
  peptide (1)..(225): Ceres Seq. ID no. 13492675
MVKAGFAGDDAPRAVFPSIVGRPRHTGVMVGMGQKDAYVGDEAQSKRGILTLKYPIEHGIVSNWDDMEKIWHHTFYNELRVAPEEHPVLLTEAPLNPKANREKMTQIMFETFNTPAMYVAIQAVLSLYASGRTTGIVLDSGDGVSHTVPIYEGYALPHAILRLDLAGRDLTDYLMKILTERGYSFTTTAEREIVRDMKEKLAYIALDYDQEMETAKTSSLSCICR

SEQ ID NO: 13082 - protein, 197 aa, Zea mays subsp. mays
  peptide (1)..(197): Ceres Seq. ID no. 13492676
MVGMGQKDAYVGDEAQSKRGILTLKYPIEHGIVSNWDDMEKIWHHTFYNELRVAPEEHPVLLTEAPLNPKANREKMTQIMFETFNTPAMYVAIQAVLSLYASGRTTGIVLDSGDGVSHTVPIYEGYALPHAILRLDLAGRDLTDYLMKILTERGYSFTTTAEREIVRDMKEKLAYIALDYDQEMETAKTSSLSCICR

SEQ ID NO: 13083 - DNA, 1858 bp, Zea mays subsp. mays
  misc_feature (1)..(1858): Ceres Seq. ID no. 12355801
  misc_feature (1)..(1858): Ortholog of  Ceres SEQ ID NO 15169603 as cited in SEQ ID NO 65772
  misc_feature (1)..(1858): Ortholog of  Ceres SEQ ID NO 14308003 as cited in SEQ ID NO 65919
  misc_feature (1)..(1858): Ortholog of  Ceres SEQ ID NO 14303087 as cited in SEQ ID NO 66569
tttacaagcttaaaacgcaccggcatggccattgtacaggacaacggtgtcctgcacttgcacccttatgccgtcgccgcggcggcagcggcattgatctcggcgtacatggtgtggttctgggcgctgacgcgacggctgtccgggccgcggatgtggcccctcgtcggcagcctgcccagcgtcgtcctgaaccgggcgcgggttcacgactggatcgtcgacaacctgcgctccaagggggaagcggccacgtaccagacgtgcatcttgccgctgccgttcttggcgcggcgccaggggctggtgaccgtcacgtgcaacccgcggaacctggagcacatcctgcgcgcgcgtttcgacaactaccccaagggccccatgtggcaggcggcgttccacgatctcctaggccagggcatcttcaactccgacggcgagacgtggctgctccagcgcaagacggcggcgctcgagttcaccacgaggaccttgcgccaggcgatggcgcgctgggccaaccgcatcatcaagtaccgcctgtggagtatcctcgcagaacactgcgaggccgcggcgagcgtcgacctccaggacctgctcttgcgcctcaccttcgacaacatctgcggcctcaccttcggcaaggaccccgagacactgtcgccggggttgcaggagaaccccttcgccaacgccttcgactccgccaccgaggcgacgctgcagaggttcctgttccccagcttcctgtggcgcgtcaagaaggcgctcggcgtcggcagcgagcggagcctccgcgagagcctcgcgatcgtggaccagtacatgacggaggccatcgcggcgcgcaaggcgaatccgtcggacgacctgctctccaggttcatgaagaagcgcgacggcagcggcagggcgttccccgaggacgtgctccagtgggtcgcgctcaacttcgtgctcgcgggacgcgacacgtcgtccgtcgcgctcagctggttcttctggatgctcatgctgcggcgcgacgtcgagcgcaaggtggtcctggagatcgcctccgtcctcagggagacgcgtggcgacgacagcgggaggtggaccgaggagccgctggacttcgacgagctggaccgcctcgtgtacctgaaggcggcattggcggagacgctgcggctgtacccttcggtgccgcaggactccaagtacgtggtggaggacgacgtgttgcccgatggcaccgtggtgccggccggctcagcggtcacctactccatctactcggttggacgaatggagagcatctggggaaaagactgctctgagttccggcctgagcggtggctctcggctgacgggacccggttcgagccggccaaggacgcgtaccgcttcgtggcgttcaacggcgggccgcggacgtgcctgggcaaggacctggcgtacttgcagatgaagtccatcgcttccgctgtgctactgcgccactcggtggagctcgtccctggacacaaggtggagcagaagatgtcgctcactctgttcatgaagaacggcctccgagtgcacgtcaagccgcgggacctcgccggctacgtcgtggcaccggaggaagccccgcagctgggagcctttgtgatctcgaccacaactgcagcagctgcataagcctgcatgtgcccgcgcgtattggcactggtttcttcgtgctgaagttcttctgtatgcctctgctgtcaaagtcatatcgttttcgtttctccctcttcattagactgttaggtttgtgggtacctggcgtcatattggttgtacctgtgtagtttttgtgtggatgaatcggtttgtgtacttctgt

SEQ ID NO: 13084 - protein, 555 aa, Zea mays subsp. mays
  peptide (1)..(555): Ceres Seq. ID no. 12355802
FTSLKRTGMAIVQDNGVLHLHPYAVAAAAAALISAYMVWFWALTRRLSGPRMWPLVGSLPSVVLNRARVHDWIVDNLRSKGEAATYQTCILPLPFLARRQGLVTVTCNPRNLEHILRARFDNYPKGPMWQAAFHDLLGQGIFNSDGETWLLQRKTAALEFTTRTLRQAMARWANRIIKYRLWSILAEHCEAAASVDLQDLLLRLTFDNICGLTFGKDPETLSPGLQENPFANAFDSATEATLQRFLFPSFLWRVKKALGVGSERSLRESLAIVDQYMTEAIAARKANPSDDLLSRFMKKRDGSGRAFPEDVLQWVALNFVLAGRDTSSVALSWFFWMLMLRRDVERKVVLEIASVLRETRGDDSGRWTEEPLDFDELDRLVYLKAALAETLRLYPSVPQDSKYVVEDDVLPDGTVVPAGSAVTYSIYSVGRMESIWGKDCSEFRPERWLSADGTRFEPAKDAYRFVAFNGGPRTCLGKDLAYLQMKSIASAVLLRHSVELVPGHKVEQKMSLTLFMKNGLRVHVKPRDLAGYVVAPEEAPQLGAFVISTTTAAAA

SEQ ID NO: 13085 - protein, 547 aa, Zea mays subsp. mays
  peptide (1)..(547): Ceres Seq. ID no. 12355803
MAIVQDNGVLHLHPYAVAAAAAALISAYMVWFWALTRRLSGPRMWPLVGSLPSVVLNRARVHDWIVDNLRSKGEAATYQTCILPLPFLARRQGLVTVTCNPRNLEHILRARFDNYPKGPMWQAAFHDLLGQGIFNSDGETWLLQRKTAALEFTTRTLRQAMARWANRIIKYRLWSILAEHCEAAASVDLQDLLLRLTFDNICGLTFGKDPETLSPGLQENPFANAFDSATEATLQRFLFPSFLWRVKKALGVGSERSLRESLAIVDQYMTEAIAARKANPSDDLLSRFMKKRDGSGRAFPEDVLQWVALNFVLAGRDTSSVALSWFFWMLMLRRDVERKVVLEIASVLRETRGDDSGRWTEEPLDFDELDRLVYLKAALAETLRLYPSVPQDSKYVVEDDVLPDGTVVPAGSAVTYSIYSVGRMESIWGKDCSEFRPERWLSADGTRFEPAKDAYRFVAFNGGPRTCLGKDLAYLQMKSIASAVLLRHSVELVPGHKVEQKMSLTLFMKNGLRVHVKPRDLAGYVVAPEEAPQLGAFVISTTTAAAA

SEQ ID NO: 13086 - protein, 519 aa, Zea mays subsp. mays
  peptide (1)..(519): Ceres Seq. ID no. 12355804
MVWFWALTRRLSGPRMWPLVGSLPSVVLNRARVHDWIVDNLRSKGEAATYQTCILPLPFLARRQGLVTVTCNPRNLEHILRARFDNYPKGPMWQAAFHDLLGQGIFNSDGETWLLQRKTAALEFTTRTLRQAMARWANRIIKYRLWSILAEHCEAAASVDLQDLLLRLTFDNICGLTFGKDPETLSPGLQENPFANAFDSATEATLQRFLFPSFLWRVKKALGVGSERSLRESLAIVDQYMTEAIAARKANPSDDLLSRFMKKRDGSGRAFPEDVLQWVALNFVLAGRDTSSVALSWFFWMLMLRRDVERKVVLEIASVLRETRGDDSGRWTEEPLDFDELDRLVYLKAALAETLRLYPSVPQDSKYVVEDDVLPDGTVVPAGSAVTYSIYSVGRMESIWGKDCSEFRPERWLSADGTRFEPAKDAYRFVAFNGGPRTCLGKDLAYLQMKSIASAVLLRHSVELVPGHKVEQKMSLTLFMKNGLRVHVKPRDLAGYVVAPEEAPQLGAFVISTTTAAAA

SEQ ID NO: 13087 - DNA, 1671 bp, Zea mays subsp. mays
  misc_feature (1)..(1671): Ceres Seq. ID no. 12405914
  misc_feature (1)..(1671): Ortholog of  Ceres SEQ ID NO 12583314 as cited in SEQ ID NO 56435
  misc_feature (1)..(1671): Ortholog of  Ceres SEQ ID NO 13655237 as cited in SEQ ID NO 62892
  misc_feature (1)..(1671): Ortholog of  Ceres SEQ ID NO 13597268 as cited in SEQ ID NO 63929
  misc_feature (1)..(1671): Ortholog of  Ceres SEQ ID NO 13659840 as cited in SEQ ID NO 66970
  misc_feature (1)..(1671): Ortholog of  Ceres SEQ ID NO 13660544 as cited in SEQ ID NO 67401
  misc_feature (1)..(1671): Ortholog of  Ceres SEQ ID NO 15180683 as cited in SEQ ID NO 0
gtttccacattttgttgcgctcctttagcgccggcggcccgtagcctcatcatcatttccattccatccggtttcttccgacgacggtgtgtacagagagcaggatcggacaagtctctgctggtagaagcatggcgcagcgccggctgttgggcacggcgccggcgcccgcgggcgatgcggcgtcgcacggctcgggctccagccccgacgcgatgcggatcatggtgggcgtgctggtaacggtcatcgtctgcacgctgctctactgcgtctactgctggcggtggcggaagcgcaatggtgaaactgcgctctgctgccatccgagatccctgctggacagcctatggcggcggtcgagctcggacctgccgctcatggacctcgcctccatcctcgctgccaccgacaacttctccaaggccaacaagctcggcgagggcggcttcggccccgtctacagaggcgtgctgagcggcggctccgagatcgccgtgaagcgtctgtcggcgcggtcgcggcagggcgcggcggagttccggaacgaggtggagctcatcgccaagctgcagcaccgcaacctagtgcggctgctgggctggtgcgccgagcgcgaggagaagctgctggtgtacgagtacctccccaaccgcagcctcgacgccttcctcttcgatccgagcaagagtgcgcagcttgggtggagcacccggcacaacgtgatcctgggcatcgcccgcggcctgctgtacctccacgaggactcgctgctgaaggtggtccaccgggacctcaaggccagcaacgtgctgctcgaccacaagatgagcccaaagatctccgacttcggcatggccaagatcttcgaggacgactccgacgcgatcaacacgggccgcgtcgtcgggacctacgggtacatggcgcccgagttcgcgttggacggcgtcttctcggtgaagtcggacgtgttcagcttcggggtcctcctgctggagatcttgagcgggcaacggaacggcgctttgtacctcgaggaacaccagcagtccctcatccaagacgcatggaagctgtggagtgaagaccgcgcggccgagttcatggaccagtcgctggggcggtcctactccaaggacgaggcgtggcggtgctaccacgtcggcctgctctgcgtgcaggaggaccccgacgtccgccccaccatgtccaacgtcctgctcatgctcatcagcgaccacaccaagttacccgagccagccatgccgcccttgttcgcgcggctcaggaacatctccttgctggcgccgccactcactaccaaaaccgagtccaccacgtctccgctgtcgatcaacgacgtctccatcaccatgatcgaaccgcgatgagctcatgcgttttctacttctgacaactgagggagaggcttcgagtgtaaatttataagactgcaatcgttcagaatgactactcctatgtactagtaagtttttttttatgctgtgcacaagtgtgggatttaactactagactagaacatgcggcgcccgtaatcgggtcataacagatttttttttatgtttatgcattctcctatgtgatccaatggactaaaatgtgtcaccactgctagcaaagaccatataactattttaattagtttgt

SEQ ID NO: 13088 - protein, 420 aa, Zea mays subsp. mays
  peptide (1)..(420): Ceres Seq. ID no. 12405915
MAQRRLLGTAPAPAGDAASHGSGSSPDAMRIMVGVLVTVIVCTLLYCVYCWRWRKRNGETALCCHPRSLLDSLWRRSSSDLPLMDLASILAATDNFSKANKLGEGGFGPVYRGVLSGGSEIAVKRLSARSRQGAAEFRNEVELIAKLQHRNLVRLLGWCAEREEKLLVYEYLPNRSLDAFLFDPSKSAQLGWSTRHNVILGIARGLLYLHEDSLLKVVHRDLKASNVLLDHKMSPKISDFGMAKIFEDDSDAINTGRVVGTYGYMAPEFALDGVFSVKSDVFSFGVLLLEILSGQRNGALYLEEHQQSLIQDAWKLWSEDRAAEFMDQSLGRSYSKDEAWRCYHVGLLCVQEDPDVRPTMSNVLLMLISDHTKLPEPAMPPLFARLRNISLLAPPLTTKTESTTSPLSINDVSITMIEPR

SEQ ID NO: 13089 - protein, 392 aa, Zea mays subsp. mays
  peptide (1)..(392): Ceres Seq. ID no. 12405916
MRIMVGVLVTVIVCTLLYCVYCWRWRKRNGETALCCHPRSLLDSLWRRSSSDLPLMDLASILAATDNFSKANKLGEGGFGPVYRGVLSGGSEIAVKRLSARSRQGAAEFRNEVELIAKLQHRNLVRLLGWCAEREEKLLVYEYLPNRSLDAFLFDPSKSAQLGWSTRHNVILGIARGLLYLHEDSLLKVVHRDLKASNVLLDHKMSPKISDFGMAKIFEDDSDAINTGRVVGTYGYMAPEFALDGVFSVKSDVFSFGVLLLEILSGQRNGALYLEEHQQSLIQDAWKLWSEDRAAEFMDQSLGRSYSKDEAWRCYHVGLLCVQEDPDVRPTMSNVLLMLISDHTKLPEPAMPPLFARLRNISLLAPPLTTKTESTTSPLSINDVSITMIEPR

SEQ ID NO: 13090 - protein, 389 aa, Zea mays subsp. mays
  peptide (1)..(389): Ceres Seq. ID no. 12405917
MVGVLVTVIVCTLLYCVYCWRWRKRNGETALCCHPRSLLDSLWRRSSSDLPLMDLASILAATDNFSKANKLGEGGFGPVYRGVLSGGSEIAVKRLSARSRQGAAEFRNEVELIAKLQHRNLVRLLGWCAEREEKLLVYEYLPNRSLDAFLFDPSKSAQLGWSTRHNVILGIARGLLYLHEDSLLKVVHRDLKASNVLLDHKMSPKISDFGMAKIFEDDSDAINTGRVVGTYGYMAPEFALDGVFSVKSDVFSFGVLLLEILSGQRNGALYLEEHQQSLIQDAWKLWSEDRAAEFMDQSLGRSYSKDEAWRCYHVGLLCVQEDPDVRPTMSNVLLMLISDHTKLPEPAMPPLFARLRNISLLAPPLTTKTESTTSPLSINDVSITMIEPR

SEQ ID NO: 13091 - DNA, 1635 bp, Zea mays subsp. mays
  misc_feature (1)..(1635): Ceres Seq. ID no. 13493312
  misc_feature (1)..(1635): Ortholog of  Ceres SEQ ID NO 14307879 as cited in SEQ ID NO 54817
actgcagcaatcacagacagacacgagcaagtgtgagtgaggaggtttgcctgcccatctccatcggccatcgctgcctccccagtccccacatccgcacacatttttacccctcgcggcggccccaccgaccgccggggcgcagcggcgtcgccgcgggcaacgccgtcacgtcacgtgcatcacgacaatctcctcctccgcctcgtcttcctgccaggccgcgggagcaccagcccagcggcagatcagtcgaggcgggcgattccagggtttagagaggagcggagatggtgaaggtcatccaggggcgcccggccgagatggggttccggatgccggcggagtgggagccgcacgagcagtgctggatgggatggcctgagcgtccagataactggagggagaatgctggtccagctcaagaggtatttgctnnaactgcaattgccatttcaaagtttgaacccgtcacgttatgtgcaagtgccaagcagtaccccaaagtccacgagctgatggaacatgaaaccaacatcagggtcgttgagatgagcatgaacgattcctggttccgcgacatgggccccacttttgtcactcataaaggggattcaggaattgcagaacaaacaatagcaggaattgattggcaattcaatgcctggggaggaatctatgacgactggagtcttgacagcgatgttgccaagaaaatagtcgagatcgagaggatccctaggtttccccaaaaaaattatccttgagggtggaagcattcatgtagatggagaaggtacatgcattacaacggaagaatgcttgctgaatcctaataggaaccccaacatgaccaaactagagatagagaatgagctgaaggattttcttggagtctcgaaggtcatctggatacctcgtggactttatggtgacgaggatacaaacggccacgttgacaacctgtgctgcttcatcaaacccggtgtgatcctgctgtcgtggaccgacgacgagaaggaccatcagtacgaacggtcggtcgaggcgctgtctgttctctcccagtccgtcgacgcgaaagggcggcagctccaagtggtgaagatccacgtccccgggcctctgtacatgacagaggaataggcacagggcgttgtttcatcggggcattctgtaccgaggccagcgggcacgaggttggccgcctcgtacgtcaacttctacatcgccaatggggggatcatagcgccttccttcggtgacaggtgggacgaggaggcgtatgcggttctccagaaggcgtttcctgatcacgaggtggtgatggtcgaaggcggacgggagatcgcgctgggaggtgggaacattcactgcatcacgcagcagcagcccgtgcgcccgtcctaggtgaaaccggcgtcgacgcgaagcgatgaagagtatgctgctcctgtgtttaagcaggtgggttggtcccctgtcgttattacgctcaccaatacgcgcgcgaaataagccgtaggtacaagttccttgacaaatactgtatgagtactattaggccttgttggtgggtcggaacgattcctaaccgaattgtttatctaatttatataaattttgattagctgg

SEQ ID NO: 13092 - protein, 158 aa, Zea mays subsp. mays
  peptide (1)..(158): Ceres Seq. ID no. 13493313
  misc_feature (50)..(50): Xaa is any aa, unknown or other
MVKVIQGRPAEMGFRMPAEWEPHEQCWMGWPERPDNWRENAGPAQEVFAXTAIAISKFEPVTLCASAKQYPKVHELMEHETNIRVVEMSMNDSWFRDMGPTFVTHKGDSGIAEQTIAGIDWQFNAWGGIYDDWSLDSDVAKKIVEIERIPRFPQKNYP

SEQ ID NO: 13093 - protein, 147 aa, Zea mays subsp. mays
  peptide (1)..(147): Ceres Seq. ID no. 13493314
  misc_feature (39)..(39): Xaa is any aa, unknown or other
MGFRMPAEWEPHEQCWMGWPERPDNWRENAGPAQEVFAXTAIAISKFEPVTLCASAKQYPKVHELMEHETNIRVVEMSMNDSWFRDMGPTFVTHKGDSGIAEQTIAGIDWQFNAWGGIYDDWSLDSDVAKKIVEIERIPRFPQKNYP

SEQ ID NO: 13094 - protein, 143 aa, Zea mays subsp. mays
  peptide (1)..(143): Ceres Seq. ID no. 13493315
  misc_feature (35)..(35): Xaa is any aa, unknown or other
MPAEWEPHEQCWMGWPERPDNWRENAGPAQEVFAXTAIAISKFEPVTLCASAKQYPKVHELMEHETNIRVVEMSMNDSWFRDMGPTFVTHKGDSGIAEQTIAGIDWQFNAWGGIYDDWSLDSDVAKKIVEIERIPRFPQKNYP

SEQ ID NO: 13095 - DNA, 1323 bp, Zea mays subsp. mays
  misc_feature (1)..(1323): Ceres Seq. ID no. 12344625
  misc_feature (1)..(1323): Ortholog of  Ceres SEQ ID NO 14303446 as cited in SEQ ID NO 59378
gcatcggtccaccgagccacaccacaccaccgtctcgcggagaaactcctccaaaacccccaaaccctttcaatcggcggcaatggcggcgccggtggccgacgatgcctcggcatccccaggctacgtcctccgctccacacttgaggggcaccgccgcgccgtatcaacagttaagttctccccggatggccgccttctcgcctccgcctccgccgacaagcttcttcgcgtgtggtcttcctccgatctcacccccgttgcggagctcgagggccatggagagggtgtctcagacctctctttctcccccgacggccgcctccttgcctccgcctccgatgatcgcaccgtccgcatctgggacctcgccgtcggcggaggggcccgcctcgtcaagacgctcacgggccacaccaactacgccttctgcgtctccttcagcccccatggcaacgtcctcgcctccgggtcctttgacgagacggtgcgcgtgtgggaggtcaggtccggtaagtgcctccgcgtgctgccggcccattctgaacccgtcaccgccgtggacttcgatcgcgagggcgacatgattgtgtcagggagctacgacgggctctgccgcgtctgggactcggccaccggtcactgcgtcaaaaccctcatcgacgacgagagcccaccagtgtcctttgccaagttctcccccaatggcaagtttatcctcgcggcaacgcttgacagcaccttgaggctttggaatttctcagctggaaagtttctgaagacatataccggacatgttaacacaaagtactgcatcccagcggcgttttctatcacgaatagcaagtatattgtcagtggctccgaggacaaatgtgtctacctatgggacctccagtcaagaagaatagtgcagaaactggaaggccatactgatactgtcattgcggtctcatgtcatcccaaggaaaacatgatcgcatccggggcgcttgacaatgacaagaccgtgaaagtttgggtccaaaaggaagaagattgatgagcggcctggttacgctcttatctacattggctgtcatgtggactgactaatggtaagcaaaatatgcagcttcccaagcaactaaagtttgctgcagtggagaatgtgatgctcctggcatgtgtaactgagtgagtgctatattgtctattcagcagctcggcgatgatattagtgaactcaagtgttctgtagagctattcctgggaggctgggatcatgtaagaaagactcaacacaacaatgcttgaacttcatttgttgtgtttctgattccc

SEQ ID NO: 13096 - protein, 346 aa, Zea mays subsp. mays
  peptide (1)..(346): Ceres Seq. ID no. 12344626
HRSTEPHHTTVSRRNSSKTPKPFQSAAMAAPVADDASASPGYVLRSTLEGHRRAVSTVKFSPDGRLLASASADKLLRVWSSSDLTPVAELEGHGEGVSDLSFSPDGRLLASASDDRTVRIWDLAVGGGARLVKTLTGHTNYAFCVSFSPHGNVLASGSFDETVRVWEVRSGKCLRVLPAHSEPVTAVDFDREGDMIVSGSYDGLCRVWDSATGHCVKTLIDDESPPVSFAKFSPNGKFILAATLDSTLRLWNFSAGKFLKTYTGHVNTKYCIPAAFSITNSKYIVSGSEDKCVYLWDLQSRRIVQKLEGHTDTVIAVSCHPKENMIASGALDNDKTVKVWVQKEED

SEQ ID NO: 13097 - protein, 319 aa, Zea mays subsp. mays
  peptide (1)..(319): Ceres Seq. ID no. 12344627
MAAPVADDASASPGYVLRSTLEGHRRAVSTVKFSPDGRLLASASADKLLRVWSSSDLTPVAELEGHGEGVSDLSFSPDGRLLASASDDRTVRIWDLAVGGGARLVKTLTGHTNYAFCVSFSPHGNVLASGSFDETVRVWEVRSGKCLRVLPAHSEPVTAVDFDREGDMIVSGSYDGLCRVWDSATGHCVKTLIDDESPPVSFAKFSPNGKFILAATLDSTLRLWNFSAGKFLKTYTGHVNTKYCIPAAFSITNSKYIVSGSEDKCVYLWDLQSRRIVQKLEGHTDTVIAVSCHPKENMIASGALDNDKTVKVWVQKEED

SEQ ID NO: 13098 - protein, 194 aa, Zea mays subsp. mays
  peptide (1)..(194): Ceres Seq. ID no. 12344628
IGPPSHTTPPSRGETPPKPPNPFNRRQWRRRWPTMPRHPQATSSAPHLRGTAAPYQQLSSPRMAAFSPPPPPTSFFACGLPPISPPLRSSRAMERVSQTSLSPPTAASLPPPPMIAPSASGTSPSAEGPASSRRSRATPTTPSASPSAPMATSSPPGPLTRRCACGRSGPVSASACCRPILNPSPPWTSIARAT

SEQ ID NO: 13099 - DNA, 1485 bp, Zea mays subsp. mays
  misc_feature (1)..(1485): Ceres Seq. ID no. 12364144
  misc_feature (1)..(1485): Ortholog of  Ceres SEQ ID NO 15168537 as cited in SEQ ID NO 57100
  misc_feature (1)..(1485): Ortholog of  Ceres SEQ ID NO 15178681 as cited in SEQ ID NO 63192
  misc_feature (1)..(1485): Ortholog of  Ceres SEQ ID NO 13579918 as cited in SEQ ID NO 64644
  misc_feature (1)..(1485): Ortholog of  Ceres SEQ ID NO 13654122 as cited in SEQ ID NO 68192
gcacgagaccattacctagaacatcctaatcgaaaaatcgcaactcatactagaacatacagcatttcacaagacacaacataagcaatagccatgggagctgtgaagcatacattgaaaatgctttcatggctcctactcttcgcacaattggctgcggccaccacctccaagtgcacaaatgccacaaatgggactgagactgacagcctgggtgcaatgaaactgaagctgattgccattgcatccatcctcacagctggagcagctggtgtgctagtgccagtacttggccgctccatggccgcgctacatcctgatggtgacatttttttcgctgtcaaggcatttgcagccggtgtcatcctggccacgggcatggtccacattctgccagcagcatttgatgggctgacatccccatgcctctacaaaggtggcagtggtgggaacattttcccctttgcaggactcattgcaatgtctgctgcaatggccactatggtgatagactcactagctgctgggtactaccgccggtctcacttcaagaaggcacggccaatcgacatcctagagatccatgaacaaccaggagatgaggaaaggtctgggcatgcacaacatgtgcatgtgcacacccatgcaacacatgggcattcacacggagaggtggatgtcatcagttcaccagaggaggcttcaatagctgacacgatccggcacagggtggtatctcaggtccttgagctcggaattttggtgcattcagtgataattggggtgtccttaggtgcatctgtgaggtcatcgaccataaggcctcttgttggtgcccttagcttccatcaattctttgaaggcattggcctgggtggttgcattgtgcaggcaaatttcaagttgagggctaccgtcatgatggcaatttttttctccctgactgcacccattggcattgcattagggattggaatttcatcaagctacaatggccatagcactacagcgttcattgttgaaggagtgttcaactcagcctcagcaggaattttgatctacatgtcattagtcgatcttctggccacagatttcaataagcccaaactgcagacgaatacaaagcttcagctgatgacatatcttgcacttttcttaggtgcagggatgatgtccatgcttgctatatgggcatagattttcagaccatcaaaggatggctagagttgaagaaataagtttatttgtccaagagttctccattttctcaaacaagatgcccttggtgaagggttcatcatattaatccacgagttctccatcttccgtacgatatagcctcagatagtccttttgtacttcataatgtgagattacatgatttgtcatttgttggcatagtccattatcctaaagctatgatagtcattagctgtggttcatgtgctgaacattcagtcataaagacagagctaagccaattct

SEQ ID NO: 13100 - protein, 367 aa, Zea mays subsp. mays
  peptide (1)..(367): Ceres Seq. ID no. 12364145
MGAVKHTLKMLSWLLLFAQLAAATTSKCTNATNGTETDSLGAMKLKLIAIASILTAGAAGVLVPVLGRSMAALHPDGDIFFAVKAFAAGVILATGMVHILPAAFDGLTSPCLYKGGSGGNIFPFAGLIAMSAAMATMVIDSLAAGYYRRSHFKKARPIDILEIHEQPGDEERSGHAQHVHVHTHATHGHSHGEVDVISSPEEASIADTIRHRVVSQVLELGILVHSVIIGVSLGASVRSSTIRPLVGALSFHQFFEGIGLGGCIVQANFKLRATVMMAIFFSLTAPIGIALGIGISSSYNGHSTTAFIVEGVFNSASAGILIYMSLVDLLATDFNKPKLQTNTKLQLMTYLALFLGAGMMSMLAIWA

SEQ ID NO: 13101 - protein, 358 aa, Zea mays subsp. mays
  peptide (1)..(358): Ceres Seq. ID no. 12364146
MLSWLLLFAQLAAATTSKCTNATNGTETDSLGAMKLKLIAIASILTAGAAGVLVPVLGRSMAALHPDGDIFFAVKAFAAGVILATGMVHILPAAFDGLTSPCLYKGGSGGNIFPFAGLIAMSAAMATMVIDSLAAGYYRRSHFKKARPIDILEIHEQPGDEERSGHAQHVHVHTHATHGHSHGEVDVISSPEEASIADTIRHRVVSQVLELGILVHSVIIGVSLGASVRSSTIRPLVGALSFHQFFEGIGLGGCIVQANFKLRATVMMAIFFSLTAPIGIALGIGISSSYNGHSTTAFIVEGVFNSASAGILIYMSLVDLLATDFNKPKLQTNTKLQLMTYLALFLGAGMMSMLAIWA

SEQ ID NO: 13102 - protein, 325 aa, Zea mays subsp. mays
  peptide (1)..(325): Ceres Seq. ID no. 12364147
MKLKLIAIASILTAGAAGVLVPVLGRSMAALHPDGDIFFAVKAFAAGVILATGMVHILPAAFDGLTSPCLYKGGSGGNIFPFAGLIAMSAAMATMVIDSLAAGYYRRSHFKKARPIDILEIHEQPGDEERSGHAQHVHVHTHATHGHSHGEVDVISSPEEASIADTIRHRVVSQVLELGILVHSVIIGVSLGASVRSSTIRPLVGALSFHQFFEGIGLGGCIVQANFKLRATVMMAIFFSLTAPIGIALGIGISSSYNGHSTTAFIVEGVFNSASAGILIYMSLVDLLATDFNKPKLQTNTKLQLMTYLALFLGAGMMSMLAIWA

SEQ ID NO: 13103 - DNA, 1594 bp, Zea mays subsp. mays; identical to SEQ ID NO: 2660
  misc_feature (1)..(1594): Ceres Seq. ID no. 12387222
  misc_feature (1)..(1594): Ortholog of  Ceres SEQ ID NO 13598234 as cited in SEQ ID NO 63461
  misc_feature (1)..(1594): Ortholog of  Ceres SEQ ID NO 13597254 as cited in SEQ ID NO 63858
  misc_feature (1)..(1594): Ortholog of  Ceres SEQ ID NO 12622778 as cited in SEQ ID NO 67562

SEQ ID NO: 13104 - protein, 454 aa, Zea mays subsp. mays; identical to SEQ ID NO: 2661
  peptide (1)..(454): Ceres Seq. ID no. 12387223

SEQ ID NO: 13105 - protein, 350 aa, Zea mays subsp. mays; identical to SEQ ID NO: 2662
  peptide (1)..(350): Ceres Seq. ID no. 12387224

SEQ ID NO: 13106 - protein, 305 aa, Zea mays subsp. mays; identical to SEQ ID NO: 2663
  peptide (1)..(305): Ceres Seq. ID no. 12387225

SEQ ID NO: 13107 - DNA, 1585 bp, Zea mays subsp. mays
  misc_feature (1)..(1585): Ceres Seq. ID no. 12367895
  misc_feature (1)..(1585): Ortholog of  Ceres SEQ ID NO 13587235 as cited in SEQ ID NO 0
aaatttcccggagaccctcgagcaaaaatctggtctggttcaaactcgccttttgcctgcgggcggcgggcgttcttacgggccatgtcgcagcgcgacggcgacctcaccggagctcatccggaagaaggagaccgccacgccgttcgaatggatggctccgacgacgatgagctggaccaacctacgagtaaagcgactgagcacatcacggctatggacgtgaggaaggggaaggatatgcaagggatcccctggaacgtgatgccgactacaagggacaagtacaggcagtcacggctgcaggggtacgccaactttgagaacgtgcctaattccggaaggctttctgagaaggaatgcatgcctgcagagaaaggccaactctactacgagtttcagcacagcacgaggtcggtgaaaccgaccatccgtcatttccagttgaggaatttagtgtgggcaacaacaaggcacgatgtgtatcttatgtcaaacttttctgtgcttcattggtcagcaatgacttgtaagaagcaagaagtcattaatcttcaaggacacgtgacaccgtgcgagaagcaccatcggaattactacgaggggttttatcagactccagtcagtactttggcggtgaagcataacttgcttgttactggtgggtttcatggggagataatatgcaagtttctggatcgtcaaggagtaagctactgttgcaagacaacaaatgatgacgacggtattactaattctctggagatatttgagaagcctagtggttctctgcacttccttgcgtcaaacaatgattgtggacttagagactttgacatggaaaaatttcgaatatgcaaccacttccattttgcttggcctgtgaatcatacatcgttgagcccagatggtaaacttgctgctattgtgggggacagtcctgatggacttctgattgacgctaattcaggaaagacggttcacaaactccatggccatttggattactcctttgcgtcggcatggaatccagacggccgaacattcgccacggggaaccaagacaagacgtgcagggtctgggacgtccgcaatctctccagatcagttgttgtattgggtggcaacatcggagccgtcaggtcgattcgctacacgtcagacgggaagttcatggcgatgactgaacccgcggacttcatccacatcttcgatgttgagagtgggtacagcaggaagcaggagctggacttctttggtgagatcgcaggcatatcgttcagtcctgacactgaagctctctttgtcggtgtgcatgatcgcttcttcaactgctgcctcctccagttcagtcggcgacggttctactcgtaccttgattcaacactgtgagcttgtgctggtgtagacctgtgaggtcgacatcacaggctttagaagcaagaaagttgtggctatgttcataggtgttgctgtgaagaaactggagaacgatacgtttacttttgctgaacaagctgtaggtattcggcgacccatcttttctgggtgatcagagtctcaattaagattcccgctttctgtt

SEQ ID NO: 13108 - protein, 463 aa, Zea mays subsp. mays
  peptide (1)..(463): Ceres Seq. ID no. 12367896
KFPGDPRAKIWSGSNSPFACGRRAFLRAMSQRDGDLTGAHPEEGDRHAVRMDGSDDDELDQPTSKATEHITAMDVRKGKDMQGIPWNVMPTTRDKYRQSRLQGYANFENVPNSGRLSEKECMPAEKGQLYYEFQHSTRSVKPTIRHFQLRNLVWATTRHDVYLMSNFSVLHWSAMTCKKQEVINLQGHVTPCEKHHRNYYEGFYQTPVSTLAVKHNLLVTGGFHGEIICKFLDRQGVSYCCKTTNDDDGITNSLEIFEKPSGSLHFLASNNDCGLRDFDMEKFRICNHFHFAWPVNHTSLSPDGKLAAIVGDSPDGLLIDANSGKTVHKLHGHLDYSFASAWNPDGRTFATGNQDKTCRVWDVRNLSRSVVVLGGNIGAVRSIRYTSDGKFMAMTEPADFIHIFDVESGYSRKQELDFFGEIAGISFSPDTEALFVGVHDRFFNCCLLQFSRRRFYSYLDSTL

SEQ ID NO: 13109 - protein, 435 aa, Zea mays subsp. mays
  peptide (1)..(435): Ceres Seq. ID no. 12367897
MSQRDGDLTGAHPEEGDRHAVRMDGSDDDELDQPTSKATEHITAMDVRKGKDMQGIPWNVMPTTRDKYRQSRLQGYANFENVPNSGRLSEKECMPAEKGQLYYEFQHSTRSVKPTIRHFQLRNLVWATTRHDVYLMSNFSVLHWSAMTCKKQEVINLQGHVTPCEKHHRNYYEGFYQTPVSTLAVKHNLLVTGGFHGEIICKFLDRQGVSYCCKTTNDDDGITNSLEIFEKPSGSLHFLASNNDCGLRDFDMEKFRICNHFHFAWPVNHTSLSPDGKLAAIVGDSPDGLLIDANSGKTVHKLHGHLDYSFASAWNPDGRTFATGNQDKTCRVWDVRNLSRSVVVLGGNIGAVRSIRYTSDGKFMAMTEPADFIHIFDVESGYSRKQELDFFGEIAGISFSPDTEALFVGVHDRFFNCCLLQFSRRRFYSYLDSTL

SEQ ID NO: 13110 - protein, 413 aa, Zea mays subsp. mays
  peptide (1)..(413): Ceres Seq. ID no. 12367898
MDGSDDDELDQPTSKATEHITAMDVRKGKDMQGIPWNVMPTTRDKYRQSRLQGYANFENVPNSGRLSEKECMPAEKGQLYYEFQHSTRSVKPTIRHFQLRNLVWATTRHDVYLMSNFSVLHWSAMTCKKQEVINLQGHVTPCEKHHRNYYEGFYQTPVSTLAVKHNLLVTGGFHGEIICKFLDRQGVSYCCKTTNDDDGITNSLEIFEKPSGSLHFLASNNDCGLRDFDMEKFRICNHFHFAWPVNHTSLSPDGKLAAIVGDSPDGLLIDANSGKTVHKLHGHLDYSFASAWNPDGRTFATGNQDKTCRVWDVRNLSRSVVVLGGNIGAVRSIRYTSDGKFMAMTEPADFIHIFDVESGYSRKQELDFFGEIAGISFSPDTEALFVGVHDRFFNCCLLQFSRRRFYSYLDSTL

SEQ ID NO: 13111 - DNA, 1506 bp, Zea mays subsp. mays
  misc_feature (1)..(1506): Ceres Seq. ID no. 12362128
  misc_feature (1)..(1506): Ortholog of  Ceres SEQ ID NO 12612408 as cited in SEQ ID NO 54155
attaaatagaaagcgagcttcattcgtttttgattggcgtcgcagcaaccacctgtcaagtgtcaacactccagtccactacaatcatcgctgtaggagatggaggaggcggcggcggcggcggcggaggtgaggtatgggatagtcggggtggggatgatgggccgggagcacctccacaacctcgcccacctcgccacagaggtcgagcgggagcagtccgtccgggtgcgggtcaccggcctcgccgacccccaccaggagtcactccgccttggcctccagctcgccgctgagctcggcctcccgcctccccagacctttccaggtcaccgcgagctgctggacagcgggctctgtgacgccatcatcgtatcatccccaaacatgacccactacgagatactcatggacatcatccaccatcgtgaaccgcagcacatccttgtcgagaagcccctgtgcaccactgtgcaggactgcaagaaggtcattgaagctgctaaacagagaccagagatagttgtgcaagttggattagaatacaggtatatgccacccgttgctaagctgatagacatcgttaagagcggtacactaggacaagtcagaatggtggcaatacgcgaacaccgttttcctttccttgttaaggtaaacaactggaatagattcaattgtaacagtgggggaactctagtagagaagtgctgccacttctttgatctgatgatattgtttgcggctgcaaatccagttcgcgtgatggcttcaggagccattgatgttaaccataagaatgaagtgtatgatggacaggtaccagatattattgataatgcatatgtgatagtagaatttgataatggctcccgtggcatgcttgatctctgcatgtttgctgaaggaagtagaaacgagcaagaaatttgtgtggttggtgacattgggaagggcgaaacttttgttccagagagcattgtcaggtttggaaagagaacagaaggcagagatggagttgtaacaataatggcggaagatgaacggatcaagtatcaaggtcttcatcatggatccagctacttggagcacctcaatttcttgtctgctataagggctcaaggtgcatccggaccatctgtgaacttaagtgacggcctactatctgttgccgtcggtgtggctgggcaattatcaatcgagcagggccggtttgtaaccatggaagaggtcttaggtttgtagcctggtgataattcaggcatcctaatgtactgtaaaaccttttgtgtattattaggtatatgttcttaataatgctgcggactgacgagtttatgcaaagttaggataacattataacatgcatttcaaatagaggaatatgatgataatcttcaagcaaatgtcatggagtagcagggttatgttatctgcaagtgatatcttggacctcttggttgtgattaatggaccaatatctagaacatgtcatattatttcttg

SEQ ID NO: 13112 - protein, 381 aa, Zea mays subsp. mays
  peptide (1)..(381): Ceres Seq. ID no. 12362129
MEEAAAAAAEVRYGIVGVGMMGREHLHNLAHLATEVEREQSVRVRVTGLADPHQESLRLGLQLAAELGLPPPQTFPGHRELLDSGLCDAIIVSSPNMTHYEILMDIIHHREPQHILVEKPLCTTVQDCKKVIEAAKQRPEIVVQVGLEYRYMPPVAKLIDIVKSGTLGQVRMVAIREHRFPFLVKVNNWNRFNCNSGGTLVEKCCHFFDLMILFAAANPVRVMASGAIDVNHKNEVYDGQVPDIIDNAYVIVEFDNGSRGMLDLCMFAEGSRNEQEICVVGDIGKGETFVPESIVRFGKRTEGRDGVVTIMAEDERIKYQGLHHGSSYLEHLNFLSAIRAQGASGPSVNLSDGLLSVAVGVAGQLSIEQGRFVTMEEVLGL

SEQ ID NO: 13113 - protein, 362 aa, Zea mays subsp. mays
  peptide (1)..(362): Ceres Seq. ID no. 12362130
MMGREHLHNLAHLATEVEREQSVRVRVTGLADPHQESLRLGLQLAAELGLPPPQTFPGHRELLDSGLCDAIIVSSPNMTHYEILMDIIHHREPQHILVEKPLCTTVQDCKKVIEAAKQRPEIVVQVGLEYRYMPPVAKLIDIVKSGTLGQVRMVAIREHRFPFLVKVNNWNRFNCNSGGTLVEKCCHFFDLMILFAAANPVRVMASGAIDVNHKNEVYDGQVPDIIDNAYVIVEFDNGSRGMLDLCMFAEGSRNEQEICVVGDIGKGETFVPESIVRFGKRTEGRDGVVTIMAEDERIKYQGLHHGSSYLEHLNFLSAIRAQGASGPSVNLSDGLLSVAVGVAGQLSIEQGRFVTMEEVLGL

SEQ ID NO: 13114 - protein, 361 aa, Zea mays subsp. mays
  peptide (1)..(361): Ceres Seq. ID no. 12362131
MGREHLHNLAHLATEVEREQSVRVRVTGLADPHQESLRLGLQLAAELGLPPPQTFPGHRELLDSGLCDAIIVSSPNMTHYEILMDIIHHREPQHILVEKPLCTTVQDCKKVIEAAKQRPEIVVQVGLEYRYMPPVAKLIDIVKSGTLGQVRMVAIREHRFPFLVKVNNWNRFNCNSGGTLVEKCCHFFDLMILFAAANPVRVMASGAIDVNHKNEVYDGQVPDIIDNAYVIVEFDNGSRGMLDLCMFAEGSRNEQEICVVGDIGKGETFVPESIVRFGKRTEGRDGVVTIMAEDERIKYQGLHHGSSYLEHLNFLSAIRAQGASGPSVNLSDGLLSVAVGVAGQLSIEQGRFVTMEEVLGL

SEQ ID NO: 13115 - DNA, 1158 bp, Zea mays subsp. mays
  misc_feature (1)..(1158): Ceres Seq. ID no. 12355511
  misc_feature (1)..(1158): Ortholog of  Ceres SEQ ID NO 15169248 as cited in SEQ ID NO 55022
  misc_feature (1)..(1158): Ortholog of  Ceres SEQ ID NO 14315042 as cited in SEQ ID NO 56959
  misc_feature (1)..(1158): Ortholog of  Ceres SEQ ID NO 12608620 as cited in SEQ ID NO 60192
  misc_feature (1)..(1158): Ortholog of  Ceres SEQ ID NO 15173077 as cited in SEQ ID NO 64566
  misc_feature (1)..(1158): Ortholog of  Ceres SEQ ID NO 13662898 as cited in SEQ ID NO 66199
  misc_feature (1)..(1158): Ortholog of  Ceres SEQ ID NO 14313358 as cited in SEQ ID NO 67347
  misc_feature (1)..(1158): Ortholog of  Ceres SEQ ID NO 13654314 as cited in SEQ ID NO 67914
agggactcgcggttcgtggcggccctggccagagtctgcgcccgctcctgcccccgccccgggccaggccaccctcgcctcctcgcgcctataaagtgcgggcgtacggcgtacccgattgccccaagccgcaacctcaaccaccttcccaaatctcagtagtcgcctctcgtcgtcttcgtctagccccggcccgttccaaaacctccgtagccgccgccgccaccccggcgaccgaagatgatctccccggacgcagcccgcaacgtagtcggcatcatcggcaatgtcatctccttcggcctcttcctgtccccagtgctgacgttctggcggatctacaaggccaaggacgtggaggagttcaagccggacccttacctggcgacgctgctcaactgcatgctctgggtgttctatggcatccccgtcgtccaccccaacagcattctcgtcgtcaccatcaacggcatcggcctcgtcatcgaggccgtctacctcactatcttcttcctctattccgacagccagaagcgcaagaaggcgttcgcgatcctggccgtggagattctgttcatggtcgccgtggtgctcggtgtgatcctcggcgcgcacactcacgagaaacgttccatgatcgtcggcatcctctgcgtcatcttcggctcgatgatgtacgcctcaccactcactatcatgagtcgagtgatcaagaccaagagcgttgagtacatgcccttcctcctgtcgctggtgagcttcctcaacggctgctgctggacggcctacgcgctcatccgcttcgacctctacgtcacgatcccgaacgccctgggcgcattcttcggcctcgtccagctgatcctctacttctgctactacaagtcgacccccaagaaggagaagaacgtggagctgcccaccgtctccagcaacgtcggcggcggcaacgtcaccgtcagcgttgagcgatagatgatgtagctgccgccgcccgtcgagaacgaactcgacgagacgtgctttacccacaagtagttttggccttgtctaattgctcttctcggatgatcgtttaagtgagtgttagttagttttgccctgcgtgtgatgtcaggaacaattaatatatccatgtggctgtgtttgccattctag

SEQ ID NO: 13116 - protein, 244 aa, Zea mays subsp. mays; identical to SEQ ID NO: 3895
  peptide (1)..(244): Ceres Seq. ID no. 12355512

SEQ ID NO: 13117 - protein, 241 aa, Zea mays subsp. mays
  peptide (1)..(241): Ceres Seq. ID no. 12355513
GLAVRGGPGQSLRPLLPPPRARPPSPPRAYKVRAYGVPDCPKPQPQPPSQISVVASRRLRLAPARSKTSVAAAATPATEDDLPGRSPQRSRHHRQCHLLRPLPVPSADVLADLQGQGRGGVQAGPLPGDAAQLHALGVLWHPRRPPQQHSRRHHQRHRPRHRGRLPHYLLPLFRQPEAQEGVRDPGRGDSVHGRRGARCDPRRAHSRETFHDRRHPLRHLRLDDVRLTTHYHESSDQDQER

SEQ ID NO: 13118 - protein, 190 aa, Zea mays subsp. mays; identical to SEQ ID NO: 3897
  peptide (1)..(190): Ceres Seq. ID no. 12355514

SEQ ID NO: 13119 - DNA, 1282 bp, Zea mays subsp. mays
  misc_feature (1)..(1282): Ceres Seq. ID no. 12411405
  misc_feature (1)..(1282): Ortholog of  Ceres SEQ ID NO 12484482 as cited in SEQ ID NO 53324
  misc_feature (1)..(1282): Ortholog of  Ceres SEQ ID NO 15176234 as cited in SEQ ID NO 54949
  misc_feature (1)..(1282): Ortholog of  Ceres SEQ ID NO 14314507 as cited in SEQ ID NO 59337
atctccgcgcattttatatgcaggcttgcgcctgtcacttctcccctgtccttgctccccctcgatcccgcatcagtgcgtcacattcaccgggaatggcaacgctcaaggtcccagccactgttcctcccgtcgccgatgactgcgaccagctgcgcaaagcattccaagggtggggcacgaacgaggcgctcatcatctccatcctcggccaccgcgacgccgcgcagcgccgcgccatccgccgcgcttacgccgaggcctacggcgaggagctcctccgctccatcacggacgagatctccggcgacttcgagagggccgtgatcctgtggacgctggacccagcggagcgcgacgcggtgctggccaacgaggcggcgcggaagtggaagcccgggaaccgtgtgctcgtcgagatcgcctgcacgcgcacctccgcgcagatcttcgcgaccaggcaggcttatcacgagcggttcaagcgctcgcttgaggaagacatcgctgcgcacgtcactggggacttccgcaagctattggtgccacttgtaagtacttaccgctatgatggaccagaggtcaacacaaggttggcacactcagaagccaaactacttcatgagaagatccatcacaaggcttacagtgatgatgagatcatcagaatcctcaccactaggagcaaacctcagctgattgctacattcaatcattacaatgatgcatttggccaccgaatcaacaaggatctgaaggctgacccccaggacgagtacctcagaacgctgcgggcgatcatccggtgcttcagttgccctgacaggtactttgagaaggtggctaggcaggccatagcggggctaggcacagatgagaactccctgaccagggtcatcaccacccgcgctgaggtggacctcaaactgattaaggaggcgtaccagaagaggaacagcgtgccgctggagcgggccgtcgcgggggacacctccggcgactacgagagcatgctcctcgcgctcctggggcaggagtgatgagccgtactggtgcgctggtgcctttctgaccggcgccgtggtgtttgttcgtgatcgtaataaacctgattgcctagctgtacgtgaggctgtttcttcggtcctggtactgtcgctgcagcatgcatagcagtggaccagtggtgataaataagttactgtgctttcgacgaatgaaccctttttttgtgtctaagttgtggaacctcgagaaagtttttgtgtctaaggctgtcttt

SEQ ID NO: 13120 - protein, 345 aa, Zea mays subsp. mays
  peptide (1)..(345): Ceres Seq. ID no. 12411406
LRAFYMQACACHFSPVLAPPRSRISASHSPGMATLKVPATVPPVADDCDQLRKAFQGWGTNEALIISILGHRDAAQRRAIRRAYAEAYGEELLRSITDEISGDFERAVILWTLDPAERDAVLANEAARKWKPGNRVLVEIACTRTSAQIFATRQAYHERFKRSLEEDIAAHVTGDFRKLLVPLVSTYRYDGPEVNTRLAHSEAKLLHEKIHHKAYSDDEIIRILTTRSKPQLIATFNHYNDAFGHRINKDLKADPQDEYLRTLRAIIRCFSCPDRYFEKVARQAIAGLGTDENSLTRVITTRAEVDLKLIKEAYQKRNSVPLERAVAGDTSGDYESMLLALLGQE

SEQ ID NO: 13121 - protein, 340 aa, Zea mays subsp. mays
  peptide (1)..(340): Ceres Seq. ID no. 12411407
MQACACHFSPVLAPPRSRISASHSPGMATLKVPATVPPVADDCDQLRKAFQGWGTNEALIISILGHRDAAQRRAIRRAYAEAYGEELLRSITDEISGDFERAVILWTLDPAERDAVLANEAARKWKPGNRVLVEIACTRTSAQIFATRQAYHERFKRSLEEDIAAHVTGDFRKLLVPLVSTYRYDGPEVNTRLAHSEAKLLHEKIHHKAYSDDEIIRILTTRSKPQLIATFNHYNDAFGHRINKDLKADPQDEYLRTLRAIIRCFSCPDRYFEKVARQAIAGLGTDENSLTRVITTRAEVDLKLIKEAYQKRNSVPLERAVAGDTSGDYESMLLALLGQE

SEQ ID NO: 13122 - protein, 314 aa, Zea mays subsp. mays
  peptide (1)..(314): Ceres Seq. ID no. 12411408
MATLKVPATVPPVADDCDQLRKAFQGWGTNEALIISILGHRDAAQRRAIRRAYAEAYGEELLRSITDEISGDFERAVILWTLDPAERDAVLANEAARKWKPGNRVLVEIACTRTSAQIFATRQAYHERFKRSLEEDIAAHVTGDFRKLLVPLVSTYRYDGPEVNTRLAHSEAKLLHEKIHHKAYSDDEIIRILTTRSKPQLIATFNHYNDAFGHRINKDLKADPQDEYLRTLRAIIRCFSCPDRYFEKVARQAIAGLGTDENSLTRVITTRAEVDLKLIKEAYQKRNSVPLERAVAGDTSGDYESMLLALLGQE

SEQ ID NO: 13123 - DNA, 1076 bp, Zea mays subsp. mays; identical to SEQ ID NO: 4438
  misc_feature (1)..(1076): Ceres Seq. ID no. 12337188
  misc_feature (1)..(1076): Ortholog of  Ceres SEQ ID NO 14304848 as cited in SEQ ID NO 54575
  misc_feature (1)..(1076): Ortholog of  Ceres SEQ ID NO 12617447 as cited in SEQ ID NO 65185

SEQ ID NO: 13124 - protein, 296 aa, Zea mays subsp. mays; identical to SEQ ID NO: 4439
  peptide (1)..(296): Ceres Seq. ID no. 12337189

SEQ ID NO: 13125 - protein, 291 aa, Zea mays subsp. mays; identical to SEQ ID NO: 4440
  peptide (1)..(291): Ceres Seq. ID no. 12337190

SEQ ID NO: 13126 - protein, 214 aa, Zea mays subsp. mays; identical to SEQ ID NO: 4441
  peptide (1)..(214): Ceres Seq. ID no. 12337191

SEQ ID NO: 13127 - DNA, 1449 bp, Zea mays subsp. mays
  misc_feature (1)..(1449): Ceres Seq. ID no. 12355833
  misc_feature (1)..(1449): Ortholog of  Ceres SEQ ID NO 12607856 as cited in SEQ ID NO 55419
gaacaatccgttggcggattgctgcacatccgctcgatctgatagagtggttgattcagacgtcctccgctgccagtctgcgttgtcataccgtggagtttgttcgtccaggatattgccttcggaggacgatagtcttgcaagggctcttcgctcgtgccactcgcagcctttctcattcgtagaggaaggagacaccggtgcatcagggatgataagcttagcagagtatctaggaactaatgtagctgaccacatccctgaaactcccaacaacctgtcagaggagatggtgagatgcatggcggggatatactgcagactcgcagatcctcccttggttcaccacggctcgtcctcttcaccgtcgtcgtcgttctcctcgactagcgcaatctctccgcagtatgtgggggacatgtggagtcccaaatacaggagagaggcgactctggactcccgtctgataaacccgttccatgtcgatggtctgaaggagttcagtggaccttacaacacaatggttgaggttcctatgattagccgggacagtcggaggctgaaagaagccgaggacctgctccagacttacaagttgattttgtatcggttggaagccgttgatctgaggagaatgacagatgaagaaaagatcgcattctgggtcaacatacacaatgctttgctgatgcatgcttatctgaagaatggcgtcccacagaacaatctaaagaaaacatccctacttgttaaggctgcctgcaaaatagccggacgcaacatcaacgccgccgtcatccagagcattgttcttgggtgcaacacacactgccccggacagtggctacggacgctgctttaccccaggatcaaaagcaaggtgagcaaagcggggcatgagtggcgggcctttgccgttgcgcaaccggagcctcttttacgctttgcgctttgttccggcagccattctgatcccgcggtgagggtgtacactccgaagcggctgttccaccagctggagtcggccaaggaggagttcatccgggcgacggccggcgtgtggaaggagcagaagctgctgctccccaagctggtggaggcgtacgccaaggacgtgaagctctcgccgcagggcctcgtggacatggtccagcgctacctcccggagagcatgaggatggccgtgcagcggtgccagcacggcggcaggtcgtcgggcaaggtcgtggagtgggtgtcctacaacccggccttccgctacctgctcgccagggacctcgcgttccctcacctcagctgaccgttcgttaatctttagtagtatatgcgtgtgtgccatagggttagaagtagagaagggatcatgtgcagtttttgtgtggtggttgtcaatggcttttgtagatgatgaacaggaaacaggggaagaaatgagagaaagcacgtttg

SEQ ID NO: 13128 - protein, 432 aa, Zea mays subsp. mays
  peptide (1)..(432): Ceres Seq. ID no. 12355834
NNPLADCCTSARSDRVVDSDVLRCQSALSYRGVCSSRILPSEDDSLARALRSCHSQPFSFVEEGDTGASGMISLAEYLGTNVADHIPETPNNLSEEMVRCMAGIYCRLADPPLVHHGSSSSPSSSFSSTSAISPQYVGDMWSPKYRREATLDSRLINPFHVDGLKEFSGPYNTMVEVPMISRDSRRLKEAEDLLQTYKLILYRLEAVDLRRMTDEEKIAFWVNIHNALLMHAYLKNGVPQNNLKKTSLLVKAACKIAGRNINAAVIQSIVLGCNTHCPGQWLRTLLYPRIKSKVSKAGHEWRAFAVAQPEPLLRFALCSGSHSDPAVRVYTPKRLFHQLESAKEEFIRATAGVWKEQKLLLPKLVEAYAKDVKLSPQGLVDMVQRYLPESMRMAVQRCQHGGRSSGKVVEWVSYNPAFRYLLARDLAFPHLS

SEQ ID NO: 13129 - protein, 362 aa, Zea mays subsp. mays
  peptide (1)..(362): Ceres Seq. ID no. 12355835
MISLAEYLGTNVADHIPETPNNLSEEMVRCMAGIYCRLADPPLVHHGSSSSPSSSFSSTSAISPQYVGDMWSPKYRREATLDSRLINPFHVDGLKEFSGPYNTMVEVPMISRDSRRLKEAEDLLQTYKLILYRLEAVDLRRMTDEEKIAFWVNIHNALLMHAYLKNGVPQNNLKKTSLLVKAACKIAGRNINAAVIQSIVLGCNTHCPGQWLRTLLYPRIKSKVSKAGHEWRAFAVAQPEPLLRFALCSGSHSDPAVRVYTPKRLFHQLESAKEEFIRATAGVWKEQKLLLPKLVEAYAKDVKLSPQGLVDMVQRYLPESMRMAVQRCQHGGRSSGKVVEWVSYNPAFRYLLARDLAFPHLS

SEQ ID NO: 13130 - protein, 336 aa, Zea mays subsp. mays
  peptide (1)..(336): Ceres Seq. ID no. 12355836
MVRCMAGIYCRLADPPLVHHGSSSSPSSSFSSTSAISPQYVGDMWSPKYRREATLDSRLINPFHVDGLKEFSGPYNTMVEVPMISRDSRRLKEAEDLLQTYKLILYRLEAVDLRRMTDEEKIAFWVNIHNALLMHAYLKNGVPQNNLKKTSLLVKAACKIAGRNINAAVIQSIVLGCNTHCPGQWLRTLLYPRIKSKVSKAGHEWRAFAVAQPEPLLRFALCSGSHSDPAVRVYTPKRLFHQLESAKEEFIRATAGVWKEQKLLLPKLVEAYAKDVKLSPQGLVDMVQRYLPESMRMAVQRCQHGGRSSGKVVEWVSYNPAFRYLLARDLAFPHLS

SEQ ID NO: 13131 - DNA, 1870 bp, Zea mays subsp. mays
  misc_feature (1)..(1870): Ceres Seq. ID no. 12376390
  misc_feature (1)..(1870): Ortholog of  Ceres SEQ ID NO 14304871 as cited in SEQ ID NO 54194
  misc_feature (1)..(1870): Ortholog of  Ceres SEQ ID NO 13597751 as cited in SEQ ID NO 60721
aaatcctcgcttccctcccccacgtcgcgtccgatcggcgacggtgcgccatgtcgatgctggacaccttcttcagcaagggcggcggcggcggcttccgcggcgccaagtgcaagacgctgctgaagctgtcgatcccgcggataaagctgctgcgggaaccggcgggagctgcagctgcgccagatgcgccgggacatcgccaagctcctagaggccggccaggaggccactgcccggatcagggtggagcacatcatccgggaggagaacatgatggccgcgcaggagatcctcgagctcttctgcgagctcatcgcggttcgcctgcccatcatcgaggcccaaaaggagtgtcctattgatctcaaagaagcaatatcaagtgtctgttttgccgctccaagatgtgcagatctacctgaactgatgcaagttcaaatgatgtttgcaactaaatatgggaaggaatttgtcgctgcagcttcagagttgatgcctgattgtggggtcaatcgtcagataattgaattgctttctattcgtcctcctcctgttgatgcaaagttgaaactgctgaaggagatagctgaggaacatgaagttgattgggatccatcagagacagagacagaatttctcaaacctcatgaagatctattgaatggaccgacctacttcaatgtatccacactacctcttcccaaggagaaacatgaggaaacagtagttgcaagtgctgccgagcagcctgatgaagactatgagtcagataccggtcttgactcactggatttgcctgaagtcccaaaagctgcaattcgtccaccttctgacgcaccattgaccccagatatttgcccacatgttcagggctctcagtcacttcctcatgagttctcagatcctggtaacttggaggagaatccaacagctggtggtgcttttaatgttattcagatgaaaagcttggagcatcttgtttatgcaccatctgatcagtcaaacataccggatttgccaaatgaaaagaagcagtttattccttttgcatctccaccgcccgttctttctccttcggtgggaaaagccgagacagttccctcaccttctctgtctcctccagtgaagccgacagagccagaaccagaaatcctcacaaagaaaattgatgaagtgaccacacctccagtacttccctcagattatattttcacaaaacagccagaacaagtgcggacaatctctccttctgagagtggggcaaatattgacttggacgacgttttatctgctgcgcagacagctgctgaatcagctgagcgagctgcatcagcagcccgtgctgctgcaaaccttgcacaactgcgcatttcagacctgaaagaagaattccaaggtttatagcaattacggtgatagcgtccaaaaggaaagccatcatcagactgaggcgacacaggaaccggtatttgatcaccaggactccttcaccaatgatacacaggactatgtgtcatcccatgtgccgcagaggtcgtcatctttggaggacgatccatatttctcgtatcccaacttgttctcagcgccaaagccctgaaggcggaaactagtggtctgcaagtagttgttcagaatagtctgaaacatgagatatcactttttcagctctgtccggtcctcttatgtttggtcttttctgatgcctccgaaaattctgtttatgttgagttggtacatagcggacaaaagggagactatgaaacctctgtctagttttgtctctgtaaattgtacatgtgcggtgtttgtatcagttgtctgaaacatttctgcagtctactggtaataacagaaattgaatctc

SEQ ID NO: 13132 - protein, 406 aa, Zea mays subsp. mays
  peptide (1)..(406): Ceres Seq. ID no. 12376391
MRRDIAKLLEAGQEATARIRVEHIIREENMMAAQEILELFCELIAVRLPIIEAQKECPIDLKEAISSVCFAAPRCADLPELMQVQMMFATKYGKEFVAAASELMPDCGVNRQIIELLSIRPPPVDAKLKLLKEIAEEHEVDWDPSETETEFLKPHEDLLNGPTYFNVSTLPLPKEKHEETVVASAAEQPDEDYESDTGLDSLDLPEVPKAAIRPPSDAPLTPDICPHVQGSQSLPHEFSDPGNLEENPTAGGAFNVIQMKSLEHLVYAPSDQSNIPDLPNEKKQFIPFASPPPVLSPSVGKAETVPSPSLSPPVKPTEPEPEILTKKIDEVTTPPVLPSDYIFTKQPEQVRTISPSESGANIDLDDVLSAAQTAAESAERAASAARAAANLAQLRISDLKEEFQGL

SEQ ID NO: 13133 - protein, 377 aa, Zea mays subsp. mays
  peptide (1)..(377): Ceres Seq. ID no. 12376392
MMAAQEILELFCELIAVRLPIIEAQKECPIDLKEAISSVCFAAPRCADLPELMQVQMMFATKYGKEFVAAASELMPDCGVNRQIIELLSIRPPPVDAKLKLLKEIAEEHEVDWDPSETETEFLKPHEDLLNGPTYFNVSTLPLPKEKHEETVVASAAEQPDEDYESDTGLDSLDLPEVPKAAIRPPSDAPLTPDICPHVQGSQSLPHEFSDPGNLEENPTAGGAFNVIQMKSLEHLVYAPSDQSNIPDLPNEKKQFIPFASPPPVLSPSVGKAETVPSPSLSPPVKPTEPEPEILTKKIDEVTTPPVLPSDYIFTKQPEQVRTISPSESGANIDLDDVLSAAQTAAESAERAASAARAAANLAQLRISDLKEEFQGL

SEQ ID NO: 13134 - protein, 376 aa, Zea mays subsp. mays
  peptide (1)..(376): Ceres Seq. ID no. 12376393
MAAQEILELFCELIAVRLPIIEAQKECPIDLKEAISSVCFAAPRCADLPELMQVQMMFATKYGKEFVAAASELMPDCGVNRQIIELLSIRPPPVDAKLKLLKEIAEEHEVDWDPSETETEFLKPHEDLLNGPTYFNVSTLPLPKEKHEETVVASAAEQPDEDYESDTGLDSLDLPEVPKAAIRPPSDAPLTPDICPHVQGSQSLPHEFSDPGNLEENPTAGGAFNVIQMKSLEHLVYAPSDQSNIPDLPNEKKQFIPFASPPPVLSPSVGKAETVPSPSLSPPVKPTEPEPEILTKKIDEVTTPPVLPSDYIFTKQPEQVRTISPSESGANIDLDDVLSAAQTAAESAERAASAARAAANLAQLRISDLKEEFQGL

SEQ ID NO: 13135 - DNA, 1558 bp, Zea mays subsp. mays
  misc_feature (1)..(1558): Ceres Seq. ID no. 12374009
  misc_feature (1)..(1558): Ortholog of  Ceres SEQ ID NO 13598653 as cited in SEQ ID NO 65049
aagctataggcgaaacttcgggggtcgtcgagggttctcgaccctcccttcccctctctcgcccgctcgctccctcaccgccggcgttctcgccgccagctacggacggggcacactgcgcagggtcccagccccgcctctcacccgaacgtcttcgctcccctcaccgggtaggcgtcgcgctctactggcaccaccccggccctcgcgctctactggcaccggaccggcgcggggtggcgcggagacctgtcccggccaggagaccgttccgtgctataccggtgaagatgctctttgcatagctcaagctccaaactgatggattctgatgacaagaagtttggaaatgggccaagggagcttactggtgctgttgatttgattaaccactacaaactgctgccacaccatgatttcttttgcaagaaacctttgccactggcaatatcagatacacattatcttcacaatattgtgggagacactgaaattcgaaaaggagaaggaatggagttagatcaacttgttcagaatgcatatatgagggataaacctgcttatattcagcccttcgatatggaaacactggggcaagcgttccaacttcgagaaacagctcctgtggttttgccctctactgaaaagggtataccgactatttcgggtaaaccaaaaagcgagtccaaggacaaagagaagaagcataaaaagcacaaagacagagagagggacaaagacaaggaacataagaagcacaaacatcggcataaggatcgaagtaaggacaaagataaagacaaagacaaggataagaaaaaagataagagtggtcatcatgattctgattcaaagaaacatcatgaaaagaagaggaagcacgagggaactgaagattcagcagatgtgcataagcacaagaagagtaagcacaagagttccaaaaccgatgagatggggaatggacttattagttaacacttcctagttctagcttcaatccttgtaatttgctgttaaaaggagactgatggtctctgccatcaaaaccctgtgcagaatagtgatgacaacataaaagttggagatcttgataagaacgcgataaagaagtatttttgcagagtccattccgaggaaaattaaattacttaatacaggactaatccttcgaactgtgcaaccttctgttcctccctgacgaattggttgtaggagcggttgaaaggatatgccatgagattgtttcgattgcagggccagcgcacttattgatactaggcttcttatttaactcctaatttcggatgtagcgtgcatgagtatcctgttgagtagctgtggatggttttacagttggtctagagatgtagttgagggcagggaattggaaagaatttcgtgttcccgtcgtactgaccttggttgatagagagtttaaccagtagctaaattaaatgttgctagtcagttccaagtttattctgcgtggaatgaattggagtcaaattagcacactgcttatttaaccatgataaagatcttgttattacaaagt

SEQ ID NO: 13136 - protein, 218 aa, Zea mays subsp. mays
  peptide (1)..(218): Ceres Seq. ID no. 12374010
MDSDDKKFGNGPRELTGAVDLINHYKLLPHHDFFCKKPLPLAISDTHYLHNIVGDTEIRKGEGMELDQLVQNAYMRDKPAYIQPFDMETLGQAFQLRETAPVVLPSTEKGIPTISGKPKSESKDKEKKHKKHKDRERDKDKEHKKHKHRHKDRSKDKDKDKDKDKKKDKSGHHDSDSKKHHEKKRKHEGTEDSADVHKHKKSKHKSSKTDEMGNGLIS

SEQ ID NO: 13137 - protein, 155 aa, Zea mays subsp. mays
  peptide (1)..(155): Ceres Seq. ID no. 12374011
MELDQLVQNAYMRDKPAYIQPFDMETLGQAFQLRETAPVVLPSTEKGIPTISGKPKSESKDKEKKHKKHKDRERDKDKEHKKHKHRHKDRSKDKDKDKDKDKKKDKSGHHDSDSKKHHEKKRKHEGTEDSADVHKHKKSKHKSSKTDEMGNGLIS

SEQ ID NO: 13138 - protein, 144 aa, Zea mays subsp. mays
  peptide (1)..(144): Ceres Seq. ID no. 12374012
MRDKPAYIQPFDMETLGQAFQLRETAPVVLPSTEKGIPTISGKPKSESKDKEKKHKKHKDRERDKDKEHKKHKHRHKDRSKDKDKDKDKDKKKDKSGHHDSDSKKHHEKKRKHEGTEDSADVHKHKKSKHKSSKTDEMGNGLIS

SEQ ID NO: 13139 - DNA, 1950 bp, Zea mays subsp. mays
  misc_feature (1)..(1950): Ceres Seq. ID no. 12343962
  misc_feature (1)..(1950): Ortholog of  Ceres SEQ ID NO 12618563 as cited in SEQ ID NO 65025
aactaatcactacctctccctctccgtcgcgacacaggccacggcgggcggcggcggaggcttccgtgcggctcttggcggattgaacgcccactcgagctgcgccggcggctgtttcagccgtccttagatagaccctgctttcctcccgggcgaatcaaagttgcacaaatgccgacaccagtgaagtcggtgctccccgtggtgctcctcggctgcggcggcgtcggccgctacctcctccgccacatcgtctcctgtcgtcccctccacgccaaccagggcgtggccatccgggtggtgggcgtcgccgatagctcctccctgctcgtcgccgaagatgtccactccaccggcctcgatgacgcgctcctcacccagctctgcgccgccaagtccgcaggctctcccctctcctccctgctcggccgagggcactgtcagctgttcaagaaccctgaggctaggggcaaagtcatagacgccgctaccacacttggaagtacaactggtctggtgctagttgactgttctgcaacttatgacactgttagcctgctgaaagatgctgtggatcatggatgctgtgtcgtattggcaaacaagaaacctcttaccggtgcttatgaggattttcagaagttggtctccaacttccgtcggataagatttgaatctactgttggagcaggtttgcctgtgatagcttctgtaacccgtattattgcatctggagaccctattactcgtattgttggcagtctgagtggtacacttgggtatgtgatgagtgagcttgaggatggaaagaaatttagtgaagttgtaaaaactgccaagtctcttggctatacagaaccagatccacgtgatgatcttggtggaatggatgtggctagaaaggcattgatcctggctaggcttcttgggcaacagataagcatggagagtatcaatgttgagagtttatatcctagtgaattaggacctgatgcagtgtccacaaaggacttccttgaaagtggtttagtgcaacttgacaagagcatggaagaaagaatcagagcagcatcttcgagaggaaacgttcttcgttacgtctgtgagattgaaagcgcagggtgccaagtaggccttaaagagctcccaaaggattctgcgctgggtagattgaggggaagtgacaatgtggtcgagatatacagcagatgttaccagagctcccctctggtgatccagggcgcaggagctggcaacgacaccactgccgccggcgtccttgctgacataatcgacctccaagacctgttccagacgatggcttgatcgttgatcggcatccacaccagtacaccatcttgatttttgcaaggcaccagagcgtttgatactttgatcggtgccagtggaatcccccactgcccactggttggcttcgctccttgtcatgtgtgcattttgttcacgggcatgctctcaggctgagagcctgagacgtctgacattcgaaatgtaattttgagcaggcgtgtgggggatttctttacagtttacataaaggaactttgtttcagtgaaataatgtcgcggtctccacattaaactaataaacagtccgagctacattgccgctatctgatagtgaaataatatcgctggcagcctgaaaccgtgaacgagagacgtgggaaattgatgcaattcaccctgatgcagattcggcaattgatgcaaggttgcaattcagtgtcctgaaatgtctacgaggagaggagaggagatgagatggctggaattttaaatactactcttgcatcacgcaattcaattctgtgttccgttattatatatcgttcactgatgcgacagcatagcagactagtagtcaataataatttttgttggaattgccacgaacccgccaccataaggcattgttcgtttctactc

SEQ ID NO: 13140 - protein, 384 aa, Zea mays subsp. mays
  peptide (1)..(384): Ceres Seq. ID no. 12343963
MPTPVKSVLPVVLLGCGGVGRYLLRHIVSCRPLHANQGVAIRVVGVADSSSLLVAEDVHSTGLDDALLTQLCAAKSAGSPLSSLLGRGHCQLFKNPEARGKVIDAATTLGSTTGLVLVDCSATYDTVSLLKDAVDHGCCVVLANKKPLTGAYEDFQKLVSNFRRIRFESTVGAGLPVIASVTRIIASGDPITRIVGSLSGTLGYVMSELEDGKKFSEVVKTAKSLGYTEPDPRDDLGGMDVARKALILARLLGQQISMESINVESLYPSELGPDAVSTKDFLESGLVQLDKSMEERIRAASSRGNVLRYVCEIESAGCQVGLKELPKDSALGRLRGSDNVVEIYSRCYQSSPLVIQGAGAGNDTTAAGVLADIIDLQDLFQTMA

SEQ ID NO: 13141 - DNA, 948 bp, Zea mays subsp. mays
  misc_feature (1)..(948): Ceres Seq. ID no. 12347805
  misc_feature (1)..(948): Ortholog of  Ceres SEQ ID NO 13594180 as cited in SEQ ID NO 60353
atctcctttcagtaacagtatgcagccttaggagaagctaagctgtcttctaactctctctctcgagttcatagtttttgctcttcctctctcatggtcacaatgcttgcagctagttctctagtgaacagcaacctcgcttgctcatcaaggatatcatcctgttcagacttcacatatagccactcctggcgtcccatacatgctatgaaactccatcagatgcgtgctgtgagctcaatacgtataagttgtgctgccactaaacctgcaaagactcctgctgaagaagaatggaaagttaagcggcaactgctatcagaaaagcgggtacgaagtgtcgatgtgaaggaagcactgcgccttcaaaaggaaaacaactttgtcattcttgatgtcaggccagaagcagagtttaaagaggctcatccacctggcgccatcaatgtacaaatatacagattaatcaaggaatggacagcgtgggatattgcgaggcgtgcagcgtttgcgttcttcggcatatttgctggaacagaagagaatcctgagttcatacagagtgttgatacgaaggttgggaaagatgcgaagataattgtggcatgctctacaggagggacactgaagccaacgcaaaatttccctgatgggaagcaatctcggtccctgatagctgcgtacttgttggtcctgaatggctacagcaacgtgtaccatctggaaggaggactttacacatggttcaaagaaggactaccagctgttgcaggagaagagtaagagagacattacgaacatagtgttcgcatgctggagagagtggagagtggagactagagttgcgaggacttgtagtgatgtgcttgcttcacagtcacagggttgtcgattgttgtgtacggattgagatgtcgaagatttctcctgccaatgtgatgctgtcct

SEQ ID NO: 13142 - protein, 229 aa, Zea mays subsp. mays
  peptide (1)..(229): Ceres Seq. ID no. 12347806
MVTMLAASSLVNSNLACSSRISSCSDFTYSHSWRPIHAMKLHQMRAVSSIRISCAATKPAKTPAEEEWKVKRQLLSEKRVRSVDVKEALRLQKENNFVILDVRPEAEFKEAHPPGAINVQIYRLIKEWTAWDIARRAAFAFFGIFAGTEENPEFIQSVDTKVGKDAKIIVACSTGGTLKPTQNFPDGKQSRSLIAAYLLVLNGYSNVYHLEGGLYTWFKEGLPAVAGEE

SEQ ID NO: 13143 - protein, 226 aa, Zea mays subsp. mays
  peptide (1)..(226): Ceres Seq. ID no. 12347807
MLAASSLVNSNLACSSRISSCSDFTYSHSWRPIHAMKLHQMRAVSSIRISCAATKPAKTPAEEEWKVKRQLLSEKRVRSVDVKEALRLQKENNFVILDVRPEAEFKEAHPPGAINVQIYRLIKEWTAWDIARRAAFAFFGIFAGTEENPEFIQSVDTKVGKDAKIIVACSTGGTLKPTQNFPDGKQSRSLIAAYLLVLNGYSNVYHLEGGLYTWFKEGLPAVAGEE

SEQ ID NO: 13144 - protein, 191 aa, Zea mays subsp. mays
  peptide (1)..(191): Ceres Seq. ID no. 12347808
MKLHQMRAVSSIRISCAATKPAKTPAEEEWKVKRQLLSEKRVRSVDVKEALRLQKENNFVILDVRPEAEFKEAHPPGAINVQIYRLIKEWTAWDIARRAAFAFFGIFAGTEENPEFIQSVDTKVGKDAKIIVACSTGGTLKPTQNFPDGKQSRSLIAAYLLVLNGYSNVYHLEGGLYTWFKEGLPAVAGEE

SEQ ID NO: 13145 - DNA, 1784 bp, Zea mays subsp. mays
  misc_feature (1)..(1784): Ceres Seq. ID no. 12367303
  misc_feature (1)..(1784): Ortholog of  Ceres SEQ ID NO 15168509 as cited in SEQ ID NO 57909
  misc_feature (1)..(1784): Ortholog of  Ceres SEQ ID NO 13594429 as cited in SEQ ID NO 58006
  misc_feature (1)..(1784): Ortholog of  Ceres SEQ ID NO 13661403 as cited in SEQ ID NO 61549
cttggattggggagctccgcctccctctcctcaagtttgaccaaccctcacccacctccctccgtcgtctagtatgcttcttgcctcccgcctgcttcctccgccgccctcctccgccgcggccggttcctcctcatcctctctgactccgatcccaactcaaaacacagagaactctgaaagctaatcggcaatggataaccacatccatagtcagccagctgctaacctctactaccagttcggcatggggactgagcagcaatacccaccaccgttcgcctcaccaccatccaccaacatcccgcacatggactggaacccggccacgatgctagacaacctcaccttcatcgaggagaagatacagcaagtgaaggacgtcatccgcacaatggtggacaacgccgggcaggtgcaggtccagtgccaccaccaaggcaggcgagctgctggctcagaagcagaagcagcaggtggtcaacgcggacctgacatgccttatagttcagctcatctccaccgccggcagcctgctcccgtcactgaagaactcgtcgttcctcagccacccccaccctgctggccacgtggacatggctaaccatgttggcccaagctcgagcctagtgcctaatgcgatgaccgtttctgaagactatgaggagctgttcaagggatggaccgatggcggcattgaggtcgacgacgacggcgttcttgtcgaggagcaggaaattaccaaggacggagacagcctctcgtacgagctgctgcagctggaggaggacgagatactggcgccgcacacgcacttttgcaccatctgcgggaaagggttcaagcgggacgcgaacctgcggatgcacatgcgagggcacggcgacgagtacaagagcccggcggcgctggccaagccgccgagggacccgggcgcggagcaggagccggcgaagcggcggtactcgtgcccgttcgcggggtgcaagcggaacaagctgcacaaaagcttccagcccctcaagaccatcctgtgcgtgaagaaccactacaggcggagccactgcgagaagagccacacctgcggccggtgccacgccaagaagttctccatcgtggccgacctgaggacgcacgagaagcactgcggccgccgggacaggtgggtgtgctcctgcgggacgagtttctcgaggaaggacaagctcttcgcgcacgtcgccttgttccaaggtcacacgcccgcgttgtcgtcgccgctggaggaggagccgccgaaggcttgctcggaccagcaccagaccggccgtgctgggagccgtcgggaaccagcgaaagtcccagctggctcagtgggcggcggcagcggcagcagcttcgtgtggggtgcctcgtcctcaggggagaacagtgctctggatatcaaaggttttgttgatggatgcagtggtgacttcctctcgacggcgaactttggctccttcaacctcagcttcgggcctgctgacgggttcacaggagagccttctagtggtggttcgttctcgatgctacctcctgagcactttcagagtgctcagaagaaggggcagaactgaatatggataatctcagacagctttagatgtatgtatctgggcggcttcagatgcaccaccatcatctctggttcatgctcgtttttctccactgtagtgtagaacattgtcacagtttgagattgttgtctccttccttcctatgtacccgcctttatcgctggaagccgactgttgaactttcgc

SEQ ID NO: 13146 - protein, 333 aa, Zea mays subsp. mays
  peptide (1)..(333): Ceres Seq. ID no. 12367304
MANHVGPSSSLVPNAMTVSEDYEELFKGWTDGGIEVDDDGVLVEEQEITKDGDSLSYELLQLEEDEILAPHTHFCTICGKGFKRDANLRMHMRGHGDEYKSPAALAKPPRDPGAEQEPAKRRYSCPFAGCKRNKLHKSFQPLKTILCVKNHYRRSHCEKSHTCGRCHAKKFSIVADLRTHEKHCGRRDRWVCSCGTSFSRKDKLFAHVALFQGHTPALSSPLEEEPPKACSDQHQTGRAGSRREPAKVPAGSVGGGSGSSFVWGASSSGENSALDIKGFVDGCSGDFLSTANFGSFNLSFGPADGFTGEPSSGGSFSMLPPEHFQSAQKKGQN

SEQ ID NO: 13147 - protein, 318 aa, Zea mays subsp. mays
  peptide (1)..(318): Ceres Seq. ID no. 12367305
MTVSEDYEELFKGWTDGGIEVDDDGVLVEEQEITKDGDSLSYELLQLEEDEILAPHTHFCTICGKGFKRDANLRMHMRGHGDEYKSPAALAKPPRDPGAEQEPAKRRYSCPFAGCKRNKLHKSFQPLKTILCVKNHYRRSHCEKSHTCGRCHAKKFSIVADLRTHEKHCGRRDRWVCSCGTSFSRKDKLFAHVALFQGHTPALSSPLEEEPPKACSDQHQTGRAGSRREPAKVPAGSVGGGSGSSFVWGASSSGENSALDIKGFVDGCSGDFLSTANFGSFNLSFGPADGFTGEPSSGGSFSMLPPEHFQSAQKKGQN

SEQ ID NO: 13148 - protein, 244 aa, Zea mays subsp. mays
  peptide (1)..(244): Ceres Seq. ID no. 12367306
MHMRGHGDEYKSPAALAKPPRDPGAEQEPAKRRYSCPFAGCKRNKLHKSFQPLKTILCVKNHYRRSHCEKSHTCGRCHAKKFSIVADLRTHEKHCGRRDRWVCSCGTSFSRKDKLFAHVALFQGHTPALSSPLEEEPPKACSDQHQTGRAGSRREPAKVPAGSVGGGSGSSFVWGASSSGENSALDIKGFVDGCSGDFLSTANFGSFNLSFGPADGFTGEPSSGGSFSMLPPEHFQSAQKKGQN

SEQ ID NO: 13149 - DNA, 1500 bp, Zea mays subsp. mays
  misc_feature (1)..(1500): Ceres Seq. ID no. 12425157
  misc_feature (1)..(1500): Ortholog of  Ceres SEQ ID NO 13639663 as cited in SEQ ID NO 57850
  misc_feature (1)..(1500): Ortholog of  Ceres SEQ ID NO 15224330 as cited in SEQ ID NO 58808
gaaccaaccaaacctcaccgaatcgcaacgacagcgagaacgtccaaacgagcgcgagtctccggcgataaccaagagcgcgggcacgcaaagcggcgaagcgggaaggaagcagtaacgatggggcttgactattacaagatcctaggcgtcgacaagggcgccaccgatgacgacctcaagaaggcctaccgcaagctcgccatgaaatggcaccccgacaagaaccccaacaacaagaaggaggccgagaacaagttcaagcagatctcggaggcgtacgaggtgctgagcgacccgcagaagcgcgcggtgtacgaccagtacggcgaggagggtctcaaggggcaggtgccgccgccgggcgccggcggggcgggccccggcggcgcaaccttcttctccaccggcggcgacgggccgacggtgttccggttcaacccgcgcaacgcggaggacatcttcgccgagttcttcggcggctccagccccttcggcggtatgggcggcggtggcatgggcggcagcggcatggggggtgggatgcccggcatgcggagcggcgggacaaggttctcctcctccatcttcggggacgacatattcggctctgcgttccgcagcggcccggacgggcacggcatgcacgccggcgggcgggccgtgaaggcgccggccatagagcggaagctgccgtgcagcctcgaggagctgtacaagggcaccaccaagaagatgaagatctccagggaaatctctgacgccagtgggaagacgatcccagtggaagagatcctaacgatcgacgtgaagccggggtggaagaagggcaccaagatcacgttcccggagaagggcaacgagacgcccaacacgatcccggcggacctcgtcttcatcatcgacgagaagccgcacccggtgttcacccgcgacggcaacgacctggtggtgacccagaagatcccgctggcggaggccctgacggggtacaccgcgcacgtgacgacgctggacgggcgcagcctgacggtgcccatcagctccgtgatccacccgggctacgaggagntggtgcgaggggagggcatgccgatacccaaggacccgtccaggaagggcaacctccggatcaagttcgacatcaagttcccggcgaggctcacggcggaccagaagtccggcgtcaagaggctgctcgggcagtagagcgcgcttgtgttgttttgtattgtgtatcagacattttcgtgttggttcatcttgaactggggtggagggagctgccatttgcagcctccgcaacgacgacgacgatgacgaggccaccaagtgttgagtacagaacagctactgttgtacggtgtatggttgagaaacttgagatgtgtagcggaggattccttgtgcgaacttccagatcgtggtggttgtctgttcactggtccacgtcgttgcatttgcaacttgcaaggatcgcggatggagtaactgttggcc

SEQ ID NO: 13150 - protein, 402 aa, Zea mays subsp. mays
  peptide (1)..(402): Ceres Seq. ID no. 12425158
  misc_feature (358)..(358): Xaa is any aa, unknown or other
EPTKPHRIATTARTSKRARVSGDNQERGHAKRRSGKEAVTMGLDYYKILGVDKGATDDDLKKAYRKLAMKWHPDKNPNNKKEAENKFKQISEAYEVLSDPQKRAVYDQYGEEGLKGQVPPPGAGGAGPGGATFFSTGGDGPTVFRFNPRNAEDIFAEFFGGSSPFGGMGGGGMGGSGMGGGMPGMRSGGTRFSSSIFGDDIFGSAFRSGPDGHGMHAGGRAVKAPAIERKLPCSLEELYKGTTKKMKISREISDASGKTIPVEEILTIDVKPGWKKGTKITFPEKGNETPNTIPADLVFIIDEKPHPVFTRDGNDLVVTQKIPLAEALTGYTAHVTTLDGRSLTVPISSVIHPGYEEXVRGEGMPIPKDPSRKGNLRIKFDIKFPARLTADQKSGVKRLLGQ

SEQ ID NO: 13151 - protein, 362 aa, Zea mays subsp. mays
  peptide (1)..(362): Ceres Seq. ID no. 12425159
  misc_feature (318)..(318): Xaa is any aa, unknown or other
MGLDYYKILGVDKGATDDDLKKAYRKLAMKWHPDKNPNNKKEAENKFKQISEAYEVLSDPQKRAVYDQYGEEGLKGQVPPPGAGGAGPGGATFFSTGGDGPTVFRFNPRNAEDIFAEFFGGSSPFGGMGGGGMGGSGMGGGMPGMRSGGTRFSSSIFGDDIFGSAFRSGPDGHGMHAGGRAVKAPAIERKLPCSLEELYKGTTKKMKISREISDASGKTIPVEEILTIDVKPGWKKGTKITFPEKGNETPNTIPADLVFIIDEKPHPVFTRDGNDLVVTQKIPLAEALTGYTAHVTTLDGRSLTVPISSVIHPGYEEXVRGEGMPIPKDPSRKGNLRIKFDIKFPARLTADQKSGVKRLLGQ

SEQ ID NO: 13152 - protein, 334 aa, Zea mays subsp. mays
  peptide (1)..(334): Ceres Seq. ID no. 12425160
  misc_feature (290)..(290): Xaa is any aa, unknown or other
MKWHPDKNPNNKKEAENKFKQISEAYEVLSDPQKRAVYDQYGEEGLKGQVPPPGAGGAGPGGATFFSTGGDGPTVFRFNPRNAEDIFAEFFGGSSPFGGMGGGGMGGSGMGGGMPGMRSGGTRFSSSIFGDDIFGSAFRSGPDGHGMHAGGRAVKAPAIERKLPCSLEELYKGTTKKMKISREISDASGKTIPVEEILTIDVKPGWKKGTKITFPEKGNETPNTIPADLVFIIDEKPHPVFTRDGNDLVVTQKIPLAEALTGYTAHVTTLDGRSLTVPISSVIHPGYEEXVRGEGMPIPKDPSRKGNLRIKFDIKFPARLTADQKSGVKRLLGQ

SEQ ID NO: 13153 - DNA, 625 bp, Zea mays subsp. mays
  misc_feature (1)..(625): Ceres Seq. ID no. 12355240
  misc_feature (1)..(625): Ortholog of  Ceres SEQ ID NO 12585579 as cited in SEQ ID NO 63066
gcagtgcaaagcgtcaacgcaaacagaccaagatccagaagcaagaaagtgtttatagcctagccggtgcgcgcgcgagagggatagccgattatcatcaagctctgagctagcagagaagatgagcgcatcgtcgtccatgaccaagaaggcgtcgtcgttcgtggtggcggcgagcatgagcgcggtggaggcgctcaaggaccaggcggggctgtgccggtgggactacgcgctccgctccctctacaaccgcgcggccgccgccaataaggtcgtcgccggccgcgccgtcccgttgtcgttgtcgtcgtcccaaaccgcgggtggcagtggcagcgccgcggccgccggtagggccgccaggcccaggcgatcggaggaggagaagatgcacaaggcgtaccacctcgtctgctggggccctaactaattgttaggggcattctcttattaattactcctttatacacgctgtccgattcctccacttcttgttcgtacacatacagagatgtatctgcaaattttgtatgtgtaatccgtcctctggtggtttatgccacgagaattgcttattattgttgggtgataaacaaatggaaatgagaaattttgtgatgtg

SEQ ID NO: 13154 - protein, 103 aa, Zea mays subsp. mays
  peptide (1)..(103): Ceres Seq. ID no. 12355241
MSASSSMTKKASSFVVAASMSAVEALKDQAGLCRWDYALRSLYNRAAAANKVVAGRAVPLSLSSSQTAGGSGSAAAAGRAARPRRSEEEKMHKAYHLVCWGPN

SEQ ID NO: 13155 - protein, 97 aa, Zea mays subsp. mays
  peptide (1)..(97): Ceres Seq. ID no. 12355242
MTKKASSFVVAASMSAVEALKDQAGLCRWDYALRSLYNRAAAANKVVAGRAVPLSLSSSQTAGGSGSAAAAGRAARPRRSEEEKMHKAYHLVCWGPN

SEQ ID NO: 13156 - protein, 84 aa, Zea mays subsp. mays
  peptide (1)..(84): Ceres Seq. ID no. 12355243
MSAVEALKDQAGLCRWDYALRSLYNRAAAANKVVAGRAVPLSLSSSQTAGGSGSAAAAGRAARPRRSEEEKMHKAYHLVCWGPN

SEQ ID NO: 13157 - DNA, 1999 bp, Zea mays subsp. mays
  misc_feature (1)..(1999): Ceres Seq. ID no. 12345205
  misc_feature (1)..(1999): Ortholog of  Ceres SEQ ID NO 14313228 as cited in SEQ ID NO 67057
gagacgaaaacgagaagatcccatccactaccgcccggtcgccgtcctcccttcccgccgcgccgctccgcttgctcgccgcagatcgccctcaggattttattccgccctccgtctccgggctcgcttggatcgagatgggcgtctgcgtgtccaaggccgcctcctcctgctgctgctgctgctgctgccgcgagccgcacaacggggttactaacgacaggactgatgctgtaacggatgacgaggaggcatacgccctgcctgcgttccaggagtttaccttcgagcagttgcggctagctacatcagggtttgcggtggagaacatcgtgtctgagcagggtgagaaggctcccaatgtggtatacaaggggaagctccatgcccagcgccgcgtcgccgtcaagcgcttcaaccgctctgcctggcccgacccgcgccagttcctggaagaagctagatcagttggcctgctccgaagcaaaaggttggcaaatttgcttggctgttgctgcgaaggtgatgaaaggttgcttgttgcagaatacatgcccaatgatacgctcgcgaaacatcttttccactgggagtcacaatcaatgaaatggaccatgagattaagggttgttctctgtcttgctgaggctttagaatattgcaccaacaggggccgtgctctctaccatgatctcaatgcctatagagctctgtttgatgatgattgtaaccctagactttcctgttttggcctcatgaagaacagtcgtgatggaaaaagttatagcaccaatttggcatttacgcctccagaatacatgaggactggacgtattactcctgaaagtgtcatacacagctttggaaccttactgattgatgttcttagtgggaaacatattcctcctagccatgcccttgacctgattcgggaccgaaacttcaatatgctcttagactcatgtttagagggtcaattttcaaatgaggaaggggcagaaatggtacgattagcttcaaggtgccttcactatgaaccccgtgaacgacctaatgtccgatcacttgtgcaagtattgactcctctacagagggatgttgagactccatcttatgtgctgatgggtgttccacgtggcggtgcatcttctatccaaccattgcatctttcccctcttgccgaagcttgttccagaaaggatctgacagcaatacatgaaattctagaaaagacaggctacaaggatgatgaggggactgcaaatgagctctcgtttcagatgtggacaaatcagatgcaagatacactgaactcaaaaaagaagggtgacaatgcttttcgacaaaaggattttactactgccattgattgctattcccagttcattgaagttggtacaatggtatctccaaccatttatgctcgacgctgcttatcatatctgatgaatgacatgccacaggaggcattgaatgatgcagtgcatgctctggtaatatctccgacatggtcaacagcattctatcttcaggcagcagcacttttatcacaaggcatggagaatgaagcccaagaagcactcagggatggttatagcctagagcaaagtagcagcggtggacattgagtgtgaacagatttgtagtcccccaaatgcacataatttcaggtgcttgtttgaagagagtattattgtctatggaagcagccatcggatgtacatatggaagaaagcgataacagaggctggctctgaaggagagggcaaagacatccgaggtgaataagtgcagtagacaggaaattaatggggtgaagaaggtgaaacatttttcttggtcctactgaaacaaaagaaggaaaacgtagggggaaaaaggttgctgatgtacatgtctatccttgttggtggtagcctggtaggtgcgtaaacctgtacagcaagcgtggtttttaccttgtctttgttcttcgtttcttatgcgttagctcccattg

SEQ ID NO: 13158 - protein, 541 aa, Zea mays subsp. mays
  peptide (1)..(541): Ceres Seq. ID no. 12345206
DENEKIPSTTARSPSSLPAAPLRLLAADRPQDFIPPSVSGLAWIEMGVCVSKAASSCCCCCCCREPHNGVTNDRTDAVTDDEEAYALPAFQEFTFEQLRLATSGFAVENIVSEQGEKAPNVVYKGKLHAQRRVAVKRFNRSAWPDPRQFLEEARSVGLLRSKRLANLLGCCCEGDERLLVAEYMPNDTLAKHLFHWESQSMKWTMRLRVVLCLAEALEYCTNRGRALYHDLNAYRALFDDDCNPRLSCFGLMKNSRDGKSYSTNLAFTPPEYMRTGRITPESVIHSFGTLLIDVLSGKHIPPSHALDLIRDRNFNMLLDSCLEGQFSNEEGAEMVRLASRCLHYEPRERPNVRSLVQVLTPLQRDVETPSYVLMGVPRGGASSIQPLHLSPLAEACSRKDLTAIHEILEKTGYKDDEGTANELSFQMWTNQMQDTLNSKKKGDNAFRQKDFTTAIDCYSQFIEVGTMVSPTIYARRCLSYLMNDMPQEALNDAVHALVISPTWSTAFYLQAAALLSQGMENEAQEALRDGYSLEQSSSGGH

SEQ ID NO: 13159 - protein, 496 aa, Zea mays subsp. mays
  peptide (1)..(496): Ceres Seq. ID no. 12345207
MGVCVSKAASSCCCCCCCREPHNGVTNDRTDAVTDDEEAYALPAFQEFTFEQLRLATSGFAVENIVSEQGEKAPNVVYKGKLHAQRRVAVKRFNRSAWPDPRQFLEEARSVGLLRSKRLANLLGCCCEGDERLLVAEYMPNDTLAKHLFHWESQSMKWTMRLRVVLCLAEALEYCTNRGRALYHDLNAYRALFDDDCNPRLSCFGLMKNSRDGKSYSTNLAFTPPEYMRTGRITPESVIHSFGTLLIDVLSGKHIPPSHALDLIRDRNFNMLLDSCLEGQFSNEEGAEMVRLASRCLHYEPRERPNVRSLVQVLTPLQRDVETPSYVLMGVPRGGASSIQPLHLSPLAEACSRKDLTAIHEILEKTGYKDDEGTANELSFQMWTNQMQDTLNSKKKGDNAFRQKDFTTAIDCYSQFIEVGTMVSPTIYARRCLSYLMNDMPQEALNDAVHALVISPTWSTAFYLQAAALLSQGMENEAQEALRDGYSLEQSSSGGH

SEQ ID NO: 13160 - protein, 358 aa, Zea mays subsp. mays
  peptide (1)..(358): Ceres Seq. ID no. 12345208
MPNDTLAKHLFHWESQSMKWTMRLRVVLCLAEALEYCTNRGRALYHDLNAYRALFDDDCNPRLSCFGLMKNSRDGKSYSTNLAFTPPEYMRTGRITPESVIHSFGTLLIDVLSGKHIPPSHALDLIRDRNFNMLLDSCLEGQFSNEEGAEMVRLASRCLHYEPRERPNVRSLVQVLTPLQRDVETPSYVLMGVPRGGASSIQPLHLSPLAEACSRKDLTAIHEILEKTGYKDDEGTANELSFQMWTNQMQDTLNSKKKGDNAFRQKDFTTAIDCYSQFIEVGTMVSPTIYARRCLSYLMNDMPQEALNDAVHALVISPTWSTAFYLQAAALLSQGMENEAQEALRDGYSLEQSSSGGH

SEQ ID NO: 13161 - DNA, 2095 bp, Zea mays subsp. mays
  misc_feature (1)..(2095): Ceres Seq. ID no. 12351850
  misc_feature (1)..(2095): Ortholog of  Ceres SEQ ID NO 12638003 as cited in SEQ ID NO 1026
aacacgaggagagactgcggcagcggagtgcagagagcggacgcaacgcaacaccgcccactctctatcactgacgatcgaagcgaggagcgcactgaagccagccgccgatgagtcgcctcctctcgcggcagcaccttgccgccgtccgtcgatctgcaccctttgcgtgcgtgtccaggtggctgcacacgccgtcattcgcgacggtgtctccgcaagaggtttcaggttccagcccagcggaagtgcagaattttgtgcagggcagctggacagcatctgctaactggaactggatagtcgatcccctgaacggtgataaattcatcaaagttgctgaggttcagggaacagaaataaagccattcgtggagagtttatctaaatgcccaaagcatggacttcacaacccacttaaagctccagagaggtacctcatgtatggagatatatctgcaaaagctgcgcatatgctgggccaacctgcagtcttagatttctttgctaaacttatccagagggtatctcccaagagctaccaacaagctcttgcagaagttcaagtttctcaaaagtttttggaaaacttttgtggagaccaggtacgctttctggcaaggtcatttgctgtaccaggtaaccatcttggacaaagaagtaatggctaccgttggccatatggcccagttgcaattatcacaccattcaattttccgttggagatccccttactacaattgatgggagcactatacatgggaaataaaccagtactcaaggttgacagcaaggttagcattgtgatggaacaaatgattaggttgcttcatgattgtggattgccagcagaggatatggatttcataaattctgatggtgccgtaatgaacaagcttctgttagaggctaatccgaaaatgacccttttcactgggagttcacgggtagcagagaaattggctgctgatttgaaaggccgagttaaattggaggatgctggttttgattggaaaattcttggtccagatgttcaagaggttgattatgttgcatgggtttgcgatcaggatgcttatgcttgtagcggtcagaaatgctctgctcaatctgttctattcatgcacaagaattggtcttctagtggtctgcttgagaaaatgaagaaactttctgaaagaaggaagcttgaagatttaacaattggtccagtccttacagttactacagaagccatgatagagcacatgaacaaccttctcaaaataagaggatcgaaggttctgtttggtggtgaaccgttagggaatcactcaattcccaaaatttatggtgccatgaagcctactgctgtatttgttcctctagaagaaattctaaaaagtgggaacttcgagcttgtgacaaaggagatatttggtccattccaggtagtcacagaatactctgaggatcagcttgagttggtcttagaagcctgcgaaaggatgaatgcgcatctgacagctgcagttgtctcaaacgacccgctattcctgcaggatgtacttgggagatccgttaacgggacaacctacgccggaattcgagcgaggaccacgggcgctccacagaaccactggtttggcccggccggtgatccgcgaggcgcagggatcgggactccggaagccatcaaacttgtctggtcctgccacagggaagtcatatatgacgtcgggcccgtgcccgagagctgggcgcttccttccgcgacctgattagctagacgaggatagactattccatgtcatcacgaggaataaaaggggaagataagcgaagccagcaggactggagcgaccgaccgagagcgagtggctgcatgcctaggcattcattctctgcacgcaactgcattttcaaccctggagaaaacataataaatgttcgttcccctgtacttgagatacatggtacttggaccggaatgtcggactagctcatgagcggacaagtcgtctgttcgcagctgcactcggttatcttcttaggacttgtttgttagattatatattataataaattttatattaacgcttagttcaaaatttgt

SEQ ID NO: 13162 - protein, 549 aa, Zea mays subsp. mays
  peptide (1)..(549): Ceres Seq. ID no. 12351851
MSRLLSRQHLAAVRRSAPFACVSRWLHTPSFATVSPQEVSGSSPAEVQNFVQGSWTASANWNWIVDPLNGDKFIKVAEVQGTEIKPFVESLSKCPKHGLHNPLKAPERYLMYGDISAKAAHMLGQPAVLDFFAKLIQRVSPKSYQQALAEVQVSQKFLENFCGDQVRFLARSFAVPGNHLGQRSNGYRWPYGPVAIITPFNFPLEIPLLQLMGALYMGNKPVLKVDSKVSIVMEQMIRLLHDCGLPAEDMDFINSDGAVMNKLLLEANPKMTLFTGSSRVAEKLAADLKGRVKLEDAGFDWKILGPDVQEVDYVAWVCDQDAYACSGQKCSAQSVLFMHKNWSSSGLLEKMKKLSERRKLEDLTIGPVLTVTTEAMIEHMNNLLKIRGSKVLFGGEPLGNHSIPKIYGAMKPTAVFVPLEEILKSGNFELVTKEIFGPFQVVTEYSEDQLELVLEACERMNAHLTAAVVSNDPLFLQDVLGRSVNGTTYAGIRARTTGAPQNHWFGPAGDPRGAGIGTPEAIKLVWSCHREVIYDVGPVPESWALPSAT

SEQ ID NO: 13163 - protein, 439 aa, Zea mays subsp. mays
  peptide (1)..(439): Ceres Seq. ID no. 12351852
MYGDISAKAAHMLGQPAVLDFFAKLIQRVSPKSYQQALAEVQVSQKFLENFCGDQVRFLARSFAVPGNHLGQRSNGYRWPYGPVAIITPFNFPLEIPLLQLMGALYMGNKPVLKVDSKVSIVMEQMIRLLHDCGLPAEDMDFINSDGAVMNKLLLEANPKMTLFTGSSRVAEKLAADLKGRVKLEDAGFDWKILGPDVQEVDYVAWVCDQDAYACSGQKCSAQSVLFMHKNWSSSGLLEKMKKLSERRKLEDLTIGPVLTVTTEAMIEHMNNLLKIRGSKVLFGGEPLGNHSIPKIYGAMKPTAVFVPLEEILKSGNFELVTKEIFGPFQVVTEYSEDQLELVLEACERMNAHLTAAVVSNDPLFLQDVLGRSVNGTTYAGIRARTTGAPQNHWFGPAGDPRGAGIGTPEAIKLVWSCHREVIYDVGPVPESWALPSAT

SEQ ID NO: 13164 - protein, 428 aa, Zea mays subsp. mays
  peptide (1)..(428): Ceres Seq. ID no. 12351853
MLGQPAVLDFFAKLIQRVSPKSYQQALAEVQVSQKFLENFCGDQVRFLARSFAVPGNHLGQRSNGYRWPYGPVAIITPFNFPLEIPLLQLMGALYMGNKPVLKVDSKVSIVMEQMIRLLHDCGLPAEDMDFINSDGAVMNKLLLEANPKMTLFTGSSRVAEKLAADLKGRVKLEDAGFDWKILGPDVQEVDYVAWVCDQDAYACSGQKCSAQSVLFMHKNWSSSGLLEKMKKLSERRKLEDLTIGPVLTVTTEAMIEHMNNLLKIRGSKVLFGGEPLGNHSIPKIYGAMKPTAVFVPLEEILKSGNFELVTKEIFGPFQVVTEYSEDQLELVLEACERMNAHLTAAVVSNDPLFLQDVLGRSVNGTTYAGIRARTTGAPQNHWFGPAGDPRGAGIGTPEAIKLVWSCHREVIYDVGPVPESWALPSAT

SEQ ID NO: 13165 - DNA, 1481 bp, Zea mays subsp. mays
  misc_feature (1)..(1481): Ceres Seq. ID no. 12411397
  misc_feature (1)..(1481): Ortholog of  Ceres SEQ ID NO 13585458 as cited in SEQ ID NO 60907
  misc_feature (1)..(1481): Ortholog of  Ceres SEQ ID NO 13598678 as cited in SEQ ID NO 61508
  misc_feature (1)..(1481): Ortholog of  Ceres SEQ ID NO 12625392 as cited in SEQ ID NO 63315
  misc_feature (1)..(1481): Ortholog of  Ceres SEQ ID NO 13598319 as cited in SEQ ID NO 68758
accaccacccaccagtccaccaccactgctcgcactcactccaccgctgcccacttcttgtttgtattgtatccagactccagaggaagccgagagggccaatgaggcaaggcatgagctccccttccgccgccgcggcgctcgtgctcctcctggccctgctcgccggaggccagtgccgagaggcccagctcgacgccgcggacgccggcaccggcacggagaactacaccgccagcgacgccgccgtgtactggggcccctggcagagggcccgggccacctggtacggccagcccaacggcgccggccccgacgacaacggtggcgcgtgcggattcaagcacaccaaccagtaccccttcatgtccatgggctcctgcggcaaccagccattgttcaaggacggcaagggctgcggctcctgctacaagattcggtgcaggaaggacccgtcctgctccgggcggacggagacggtgatcatcaccgacatgaactactacccggtgtccaagtaccacttcgacctcagcggcactgcgttcggcaggctggccaagcccggcctcaacgacaagctccgccactccggcatcatcgacatcgagttcaccagggtgccgtgcgagttcccgggcctgaagatcgggttccacgtggaggagtactcgaaccccgtctacttcgcggtgctggtggagtacgaggacggcgacggcgacgtggtgcaggtggacctgatggagtccaagacggcgcgcggcccgccgacggggcggtggacgccgatgcgcgagtcctggggctccgtctggcgcatggacaccaaccaccgcatgcagccgcccttctccatccgcatccgcaacgagtccggcaagacgctcgtcgccaacaacgtcatcccggccaactggcgccccaacaccttctaccgctccttcgtccagtacagctaaccgatcgggatccgtgccctgcccgcaattggagctggctggctggggcgctactcggctcggtcaccatcgtctacagtactatactatgctctactaccactagactgctgctgttactactagtctactaccaccaagtacggcggaacggaacagctagtcgtcgtcggcggccttgggaggggaggtgtctccggtcaccgtgccgttgcagttgtatcgtgatcatggtcctgggagttgttgcatccggggcgcgctttttaggtcaggcgtcgtgtgcgatgtttgtggggtcaggctggcatgtcatgccgtgcgtgaccctgattgcgagccggcaagcaagaagacaaaaaaactaaagccgtgtgggaaaatggaggaggcaggcgtacaagctacgctctcccgcccactgttgcttttataatttatcatcatcatcatcttcattccgatcggtgattaatcgaaaagtatattgtaatgtataaacgccattttcctttcgtc

SEQ ID NO: 13166 - protein, 442 aa, Zea mays subsp. mays
  peptide (1)..(442): Ceres Seq. ID no. 12411398
PPPTSPPPLLALTPPLPTSCLYCIQTPEEAERANEARHELPFRRRGARAPPGPARRRPVPRGPARRRGRRHRHGELHRQRRRRVLGPLAEGPGHLVRPAQRRRPRRQRWRVRIQAHQPVPLHVHGLLRQPAIVQGRQGLRLLLQDSVQEGPVLLRADGDGDHHRHELLPGVQVPLRPQRHCVRQAGQARPQRQAPPLRHHRHRVHQGAVRVPGPEDRVPRGGVLEPRLLRGAGGVRGRRRRRGAGGPDGVQDGARPADGAVDADARVLGLRLAHGHQPPHAAALLHPHPQRVRQDARRQQRHPGQLAPQHLLPLLRPVQLTDRDPCPARNWSWLAGALLGSVTIVYSTILCSTTTRLLLLLLVYYHQVRRNGTASRRRRPWEGRCLRSPCRCSCIVIMVLGVVASGARFLGQASCAMFVGSGWHVMPCVTLIASRQARRQKN

SEQ ID NO: 13167 - protein, 319 aa, Zea mays subsp. mays
  peptide (1)..(319): Ceres Seq. ID no. 12411399
HHPPVHHHCSHSLHRCPLLVCIVSRLQRKPRGPMRQGMSSPSAAAALVLLLALLAGGQCREAQLDAADAGTGTENYTASDAAVYWGPWQRARATWYGQPNGAGPDDNGGACGFKHTNQYPFMSMGSCGNQPLFKDGKGCGSCYKIRCRKDPSCSGRTETVIITDMNYYPVSKYHFDLSGTAFGRLAKPGLNDKLRHSGIIDIEFTRVPCEFPGLKIGFHVEEYSNPVYFAVLVEYEDGDGDVVQVDLMESKTARGPPTGRWTPMRESWGSVWRMDTNHRMQPPFSIRIRNESGKTLVANNVIPANWRPNTFYRSFVQYS

SEQ ID NO: 13168 - protein, 286 aa, Zea mays subsp. mays
  peptide (1)..(286): Ceres Seq. ID no. 12411400
MRQGMSSPSAAAALVLLLALLAGGQCREAQLDAADAGTGTENYTASDAAVYWGPWQRARATWYGQPNGAGPDDNGGACGFKHTNQYPFMSMGSCGNQPLFKDGKGCGSCYKIRCRKDPSCSGRTETVIITDMNYYPVSKYHFDLSGTAFGRLAKPGLNDKLRHSGIIDIEFTRVPCEFPGLKIGFHVEEYSNPVYFAVLVEYEDGDGDVVQVDLMESKTARGPPTGRWTPMRESWGSVWRMDTNHRMQPPFSIRIRNESGKTLVANNVIPANWRPNTFYRSFVQYS

SEQ ID NO: 13169 - DNA, 2023 bp, Zea mays subsp. mays
  misc_feature (1)..(2023): Ceres Seq. ID no. 12411393
  misc_feature (1)..(2023): Ortholog of  Ceres SEQ ID NO 15174606 as cited in SEQ ID NO 54460
agaaggaagccaacagatttcagtatttcacggtcaccagtccctcctacccgcttcccataaaatcttctgatctgtaacgcattcgtcgtcgcccacatccgcttcgctctcttgctcttttagtcccatctcccatcccacctggaggcgaatttcgtctggggaaaaagtcggcggccatggcggggcgagactccctcccggagggctctctcttcctcggattggacagctccactcaatcactgaaagctacggtgctcaataatgagctcacaatagtagcttctgaaattgttaattttgactctgaattgccacactacaaaactgaaggtggggtgtacagagacccagcagatgataggcacattttttcaccaaccattatgtgggtggaagctttggaggtgctgcttgagaagctaaaaccaaagatcaacttcggtaaggtagtggctgtttctgggagtgggcagcaacatggcagtgtttattggaagaagggcagccatgctgtgttatcctccttggatgctagtaaaagcttgttatcgcaactcaaggatgcattttctacaatgaactcaccattatggatggatagtagcacaacaaagcaatgcagagaaatagagaatgcagttggaggtgcactggagttagcaaaactgacaggatctcgtgcgtatgaaagattcactggcccccagataaggaagatctatcagacagagcctgatgtttatgaagataccgagagaatatctttggtgagctcgttcatggcatctatccttgttggaagctatgcaagtattgatgaaactgatggtgcggggatgaacttgatggatatcaagcaaaggacctggtcaaagtctgctttagaggcaactgctcctggacttgaagcaaagcttggaaatctggcaccagcatattcagctgctggccgaattgctccttattttgtagaaaggtttcagtttgataagaactgtttggtcattcagtggtctggagataatcctaatagccttgcaggtttaactctgaatacccctggtgatcttgccattagccttggtactagtgatacagtattcgggataacaacagaagctaaaccaagccttgaaggacatgttttccccaatcctgttgagcctaatggttatatggtcatgctatgctacaaaaatggctccttgaccagagaagatgtacgaaatcgctgtgcagacaaatcatgggacgtttttaacagctatctggagaaaacgccccctctaaatggtgggaagttaggattctactacaaagaccatgaaatcctccctccacttccagtgggtttccatcggtacactgttgaaaacctcaacgacgtctcatcagacgctctgttggagcgtgaagtggaagaatttgacccaccgtccgaggttcgtgccatcattgagggccaaatgctgtcgatgcgaggccacaccgagaggtttggcatgccgaaccctcccaaacggatcatagcaaccggcggggcatcctccaacgaaagcatcctcaagtcagtcgcgcagatcttcggctgccctgtcttcacagtccagagacctgattcggcatcgctgggcgcagcgctgagagctgcccacgggtggctatgcaacgcgcaaggtagcttcgtccccatctcgtgcctgtaccagggcaacctggagaagacctcccttggctcgaagctggcagtcccggccggcgacaaggagcaggaccgggagctcctccagaagtacaccctcctgatgaggaagagaatggagatcgagagacgcctggtggagaagatcgggcgatcgtaggaaaaaaaactcatgaagcgctgctgaggctggcaggaccgaataatttgtgaataaatatggattatctcgatggtaggaaacaaattcatggcaggaccgaacaattcgtgaataaaagtggattatcgtccattatgcagaactttctc

SEQ ID NO: 13170 - protein, 562 aa, Zea mays subsp. mays
  peptide (1)..(562): Ceres Seq. ID no. 12411394
MAGRDSLPEGSLFLGLDSSTQSLKATVLNNELTIVASEIVNFDSELPHYKTEGGVYRDPADDRHIFSPTIMWVEALEVLLEKLKPKINFGKVVAVSGSGQQHGSVYWKKGSHAVLSSLDASKSLLSQLKDAFSTMNSPLWMDSSTTKQCREIENAVGGALELAKLTGSRAYERFTGPQIRKIYQTEPDVYEDTERISLVSSFMASILVGSYASIDETDGAGMNLMDIKQRTWSKSALEATAPGLEAKLGNLAPAYSAAGRIAPYFVERFQFDKNCLVIQWSGDNPNSLAGLTLNTPGDLAISLGTSDTVFGITTEAKPSLEGHVFPNPVEPNGYMVMLCYKNGSLTREDVRNRCADKSWDVFNSYLEKTPPLNGGKLGFYYKDHEILPPLPVGFHRYTVENLNDVSSDALLEREVEEFDPPSEVRAIIEGQMLSMRGHTERFGMPNPPKRIIATGGASSNESILKSVAQIFGCPVFTVQRPDSASLGAALRAAHGWLCNAQGSFVPISCLYQGNLEKTSLGSKLAVPAGDKEQDRELLQKYTLLMRKRMEIERRLVEKIGRS

SEQ ID NO: 13171 - protein, 492 aa, Zea mays subsp. mays
  peptide (1)..(492): Ceres Seq. ID no. 12411395
MWVEALEVLLEKLKPKINFGKVVAVSGSGQQHGSVYWKKGSHAVLSSLDASKSLLSQLKDAFSTMNSPLWMDSSTTKQCREIENAVGGALELAKLTGSRAYERFTGPQIRKIYQTEPDVYEDTERISLVSSFMASILVGSYASIDETDGAGMNLMDIKQRTWSKSALEATAPGLEAKLGNLAPAYSAAGRIAPYFVERFQFDKNCLVIQWSGDNPNSLAGLTLNTPGDLAISLGTSDTVFGITTEAKPSLEGHVFPNPVEPNGYMVMLCYKNGSLTREDVRNRCADKSWDVFNSYLEKTPPLNGGKLGFYYKDHEILPPLPVGFHRYTVENLNDVSSDALLEREVEEFDPPSEVRAIIEGQMLSMRGHTERFGMPNPPKRIIATGGASSNESILKSVAQIFGCPVFTVQRPDSASLGAALRAAHGWLCNAQGSFVPISCLYQGNLEKTSLGSKLAVPAGDKEQDRELLQKYTLLMRKRMEIERRLVEKIGRS

SEQ ID NO: 13172 - protein, 428 aa, Zea mays subsp. mays
  peptide (1)..(428): Ceres Seq. ID no. 12411396
MNSPLWMDSSTTKQCREIENAVGGALELAKLTGSRAYERFTGPQIRKIYQTEPDVYEDTERISLVSSFMASILVGSYASIDETDGAGMNLMDIKQRTWSKSALEATAPGLEAKLGNLAPAYSAAGRIAPYFVERFQFDKNCLVIQWSGDNPNSLAGLTLNTPGDLAISLGTSDTVFGITTEAKPSLEGHVFPNPVEPNGYMVMLCYKNGSLTREDVRNRCADKSWDVFNSYLEKTPPLNGGKLGFYYKDHEILPPLPVGFHRYTVENLNDVSSDALLEREVEEFDPPSEVRAIIEGQMLSMRGHTERFGMPNPPKRIIATGGASSNESILKSVAQIFGCPVFTVQRPDSASLGAALRAAHGWLCNAQGSFVPISCLYQGNLEKTSLGSKLAVPAGDKEQDRELLQKYTLLMRKRMEIERRLVEKIGRS

SEQ ID NO: 13173 - DNA, 1464 bp, Zea mays subsp. mays
  misc_feature (1)..(1464): Ceres Seq. ID no. 12408541
  misc_feature (1)..(1464): Ortholog of  Ceres SEQ ID NO 15177384 as cited in SEQ ID NO 51085
  misc_feature (1)..(1464): Ortholog of  Ceres SEQ ID NO 14308787 as cited in SEQ ID NO 55614
  misc_feature (1)..(1464): Ortholog of  Ceres SEQ ID NO 13656547 as cited in SEQ ID NO 65935
ctgccattaagactagctaactagcgtgaaagagctcctccgacgactactagctctcgcttgctccgacgacccctgccggccgcctctggtacaacgtacgagaggaagagagacgatcgatggccggcgccaccgtgaccgtggacgaggtgaggaagggccagcgcgcgaccggccccgccaccgtgctggccatcgggacggcgacgcccgccaactgcgtgtaccaggccgactacccggactactacttccggatcaccaagagcgaccacctcaccgacctcaaggagaagttcaagaggatgtgcgacaagtcgatgatccggaagcggtacatgcacctgacggaggagttcctgtcggagaacccgagcatgtgcgcgtacatggcgccgtcgctggacgcgcggcaggacgtggtggtgacggaggtgccgaagctggggaaggcggccggcgcagaaggcgatcaaggagtgggggcagcccaagtcgcggatcacgcacctggtgttctgcaccacgtcgggggtggacatgccgggcgccgactaccagctgaccaaggcgctggggctgcgcccgtccgtgaaccgcctgatgatgtaccagcaggggtgcttcgcgggcggcacggtgctgcgcgtggccaaggacctggcggagaacaaccgcggggcgagggtcctggtggtgtgctcggagatcacggccgtgacgttccgcgggccgtccgagtcgcacctggactcgctcgtggggcaggcgctgttcggcgacggcgcggcggccgtcgtggtgggcgccgacccggacgggcgggtcgagcgcccgctgttccagctcgtgtcggcggcgcagaccatcctgcccgactcggagggcgccatcgacggccacctccgcgaggtggggctgacgttccacctgctcaaggacgtgcccgggctcatctccaagaacatcgagcgcgcgctggaggacgcgttcgagccgctcggcatctccgactggaactccatcttctgggtggcgcaccccggcgggcccgccatcctggaccaggtggaggccagggtcgggctggacaaggccaggatgcgcgccacccgccacgtcctctccgagtacggcaacatgtccagcgcctgcgtgctcttcatcctggacgagatgcgcaagcgctccgccgaggacggccaggccaccaccggcgaggggctcgactggggcgtcctcttcggcttcggcccgggcctcaccgtcgagaccgtcgtgctccacagcgtccccatcaccaccggagcgcccaccgccgcctgagtcgtccatctatcctcgcgatcgctccagacatgaacgacccgacctacgaataatgtatctgcgtaattaattactatctgtcttgtgtcctagtagctgttttaaaacccttaattaattttattatgggcg

SEQ ID NO: 13174 - protein, 420 aa, Zea mays subsp. mays
  peptide (1)..(420): Ceres Seq. ID no. 12408542
MAGATVTVDEVRKGQRATGPATVLAIGTATPANCVYQADYPDYYFRITKSDHLTDLKEKFKRMCDKSMIRKRYMHLTEEFLSENPSMCAYMAPSLDARQDVVVTEVPKLGKAAGAEGDQGVGAAQVADHAPGVLHHVGGGHAGRRLPADQGAGAAPVREPPDDVPAGVLRGRHGAARGQGPGGEQPRGEGPGGVLGDHGRDVPRAVRVAPGLARGAGAVRRRRGGRRGGRRPGRAGRAPAVPARVGGADHPARLGGRHRRPPPRGGADVPPAQGRARAHLQEHRARAGGRVRAARHLRLELHLLGGAPRRARHPGPGGGQGRAGQGQDARHPPRPLRVRQHVQRLRALHPGRDAQALRRGRPGHHRRGARLGRPLRLRPGPHRRDRRAPQRPHHHRSAHRRLSRPSILAIAPDMNDPTYE

SEQ ID NO: 13175 - protein, 358 aa, Zea mays subsp. mays
  peptide (1)..(358): Ceres Seq. ID no. 12408543
MCDKSMIRKRYMHLTEEFLSENPSMCAYMAPSLDARQDVVVTEVPKLGKAAGAEGDQGVGAAQVADHAPGVLHHVGGGHAGRRLPADQGAGAAPVREPPDDVPAGVLRGRHGAARGQGPGGEQPRGEGPGGVLGDHGRDVPRAVRVAPGLARGAGAVRRRRGGRRGGRRPGRAGRAPAVPARVGGADHPARLGGRHRRPPPRGGADVPPAQGRARAHLQEHRARAGGRVRAARHLRLELHLLGGAPRRARHPGPGGGQGRAGQGQDARHPPRPLRVRQHVQRLRALHPGRDAQALRRGRPGHHRRGARLGRPLRLRPGPHRRDRRAPQRPHHHRSAHRRLSRPSILAIAPDMNDPTYE

SEQ ID NO: 13176 - protein, 353 aa, Zea mays subsp. mays
  peptide (1)..(353): Ceres Seq. ID no. 12408544
MIRKRYMHLTEEFLSENPSMCAYMAPSLDARQDVVVTEVPKLGKAAGAEGDQGVGAAQVADHAPGVLHHVGGGHAGRRLPADQGAGAAPVREPPDDVPAGVLRGRHGAARGQGPGGEQPRGEGPGGVLGDHGRDVPRAVRVAPGLARGAGAVRRRRGGRRGGRRPGRAGRAPAVPARVGGADHPARLGGRHRRPPPRGGADVPPAQGRARAHLQEHRARAGGRVRAARHLRLELHLLGGAPRRARHPGPGGGQGRAGQGQDARHPPRPLRVRQHVQRLRALHPGRDAQALRRGRPGHHRRGARLGRPLRLRPGPHRRDRRAPQRPHHHRSAHRRLSRPSILAIAPDMNDPTYE

SEQ ID NO: 13177 - DNA, 1878 bp, Zea mays subsp. mays
  misc_feature (1)..(1878): Ceres Seq. ID no. 12345179
  misc_feature (1)..(1878): Ortholog of  Ceres SEQ ID NO 13599324 as cited in SEQ ID NO 0
atccgattggttggcctatttatctcccagtcccactccgtccactcgagctctccaccagctttccccttctctacggtccgggaatcggaagctcacggcagaagtttagccatggggcagacgcatcttttgttgctcgcttgtttctgggtcctgtcaacatgctccttgctacttgatgcttcctccgatggactgttaagaatcaacctgaacaagaagagactggacaaggaagctttgactgctgcgaaattggcgaagaaggagagcaaccttcgaaggtctgtgggtgctgaccagtatctcagtgcctcaactgatgacatagtccctttggacaactacctggacacccagtactttggacagatcagcatcggcacgccaccacagaacttcacagtgatattcgacactggaagctccaacttgtgggttcccctcatccaagtgctacttttcgatagcatgctacttacaccacagatacaagtcaaccaagtcgaagacttacacaaagaatggagaatcttgtacgataacatatggttctgggcaaatcgctggcttcttcagtgaggacaatgtgttggttggcaaccttgttgtgcaaaatcagaaatttattgagacaactcgagaaaccagccctactttcatcattgggaagtttgatggaattcttggtctcggatttcctgaaatttctgtaggaggagcccctccaatttggcagagcatgaaacagcagaaactggtcgcaaaggatgtcttctctttctggcttaatcgtgaccctgatgcatcttctggaggaggcgagcttgtctttggtggtgttgacccaaaacactacaaaggggaccatacatatgttcccgttacacgcaaaggctactggcagtttgacatgggagatcttattattggtggccactcaactggtttctgtgctggtggctgtgctgctattgtggactcagggacttcattgcttgctggtccaactaccatagtggctcaagtcaatcatgcaattggggctgagggaatcatcagtacagaatgcaaagaagtggtgagcgagtatggagagatgatccttgagttgctcatatcgcagacaagcccacagaaagtgtgcactcagattggtctctgtgtatttgatggtgcccattctgtcagcaatccaattgaatctgttgttgagaaacagaagcgtggttctgatcttttctgtactgcttgtgagatggctgttgtctggatacagaatcagctccgtgaaaacaagacaaaagaactcattttgaattatgctaatcagctctgtgagcgtctccctagccccaatggcgagtcaactgttgattgccatcagatctcaaagatgccaaatcttgcattcaccatagcaaacaagactttcaccttaacaccagagcagtacatagtgaagctggagcaagcaggacaaactatctgcatcagtgggtttatggcatttgacgtaccgcctcctcgtggtcctctctggatacttggtgatgtttttatgggtgcctaccacactgtttttgacttcggtgagaacaggattgggtttgccaaatctgcatgaggactggagttctgcgctttagtagcatgtccagtttgttatccgggtattgtacatatatatgttgccaactggtgtaatccgcagtgtttaatagtatatattcatgcagaaatctagaagattgtggcatgatatgtgtttgcaaatggagctatgctatgtatggagctccaggacctagagttttatgtaaagggagacgatgaggattagggcttttaacctattctcatcacgttattgtc

SEQ ID NO: 13178 - protein, 294 aa, Zea mays subsp. mays
  peptide (1)..(294): Ceres Seq. ID no. 12345180
MKQQKLVAKDVFSFWLNRDPDASSGGGELVFGGVDPKHYKGDHTYVPVTRKGYWQFDMGDLIIGGHSTGFCAGGCAAIVDSGTSLLAGPTTIVAQVNHAIGAEGIISTECKEVVSEYGEMILELLISQTSPQKVCTQIGLCVFDGAHSVSNPIESVVEKQKRGSDLFCTACEMAVVWIQNQLRENKTKELILNYANQLCERLPSPNGESTVDCHQISKMPNLAFTIANKTFTLTPEQYIVKLEQAGQTICISGFMAFDVPPPRGPLWILGDVFMGAYHTVFDFGENRIGFAKSA

SEQ ID NO: 13179 - protein, 237 aa, Zea mays subsp. mays
  peptide (1)..(237): Ceres Seq. ID no. 12345181
MGDLIIGGHSTGFCAGGCAAIVDSGTSLLAGPTTIVAQVNHAIGAEGIISTECKEVVSEYGEMILELLISQTSPQKVCTQIGLCVFDGAHSVSNPIESVVEKQKRGSDLFCTACEMAVVWIQNQLRENKTKELILNYANQLCERLPSPNGESTVDCHQISKMPNLAFTIANKTFTLTPEQYIVKLEQAGQTICISGFMAFDVPPPRGPLWILGDVFMGAYHTVFDFGENRIGFAKSA

SEQ ID NO: 13180 - protein, 194 aa, Zea mays subsp. mays
  peptide (1)..(194): Ceres Seq. ID no. 12345182
IRLVGLFISQSHSVHSSSPPAFPFSTVRESEAHGRSLAMGQTHLLLLACFWVLSTCSLLLDASSDGLLRINLNKKRLDKEALTAAKLAKKESNLRRSVGADQYLSASTDDIVPLDNYLDTQYFGQISIGTPPQNFTVIFDTGSSNLWVPLIQVLLFDSMLLTPQIQVNQVEDLHKEWRILYDNIWFWANRWLLQ

SEQ ID NO: 13181 - DNA, 1260 bp, Zea mays subsp. mays
  misc_feature (1)..(1260): Ceres Seq. ID no. 12411385
  misc_feature (1)..(1260): Ortholog of  Ceres SEQ ID NO 15170627 as cited in SEQ ID NO 52703
  misc_feature (1)..(1260): Ortholog of  Ceres SEQ ID NO 13655124 as cited in SEQ ID NO 62896
  misc_feature (1)..(1260): Ortholog of  Ceres SEQ ID NO 13597493 as cited in SEQ ID NO 64613
  misc_feature (1)..(1260): Ortholog of  Ceres SEQ ID NO 14313540 as cited in SEQ ID NO 68110
  misc_feature (1)..(1260): Ortholog of  Ceres SEQ ID NO 13596175 as cited in SEQ ID NO 68297
gtattccttcagggaacggcttccatagcgctgaagcgaggcgtgccgcattgggttgttcgagagctcctagtgttgccctactacatgatggagggcgatctccccacgcccgcgaacgctagggttgttgccgtggtcaccggcggcaacaaggggatcgggctggaggtgtgccgcagctggcctgcagcggcgtcaccgtcgtcttgacagccagggacgacgcgaggggcgcggcggccgtggagaacctcagaggcctggggctctccgatgtcctcttccaccgactggacgttaccgacgctccgagcatcgctcgactcgctggtttcctcgagacccgtttcgggaagctagacatcctggtaaataatgccgcgattggcggggttgagtatgttcatgaccaagattgtggctcagtaacgagcgaggaaaaggcaaagttgagcggcatggacatggatcagaggcttggatggctgtgggagaattgccgggagacctacgacgatgcaaagacaggcctacgaacaaactactacggcacaaagcaagtaatcgagactttactgcctctactgcaagcctcctccgatgggaggatcgttaacgtctcctcccacttcggccagctaaggcttttccgaaacgaggagctgaagcgggagctgaacgacattgacaacctcaccccggagaggctggatggcctgctggacatgttcttaaatgacttggaggccggcgaggtggagtcgtcgaacggctggccgatgtatttctcggcgtacaaggtggccaaggcggccatgaacgcgtactcgaggatcctggcgaggcggcaccccgagctgcgcgtcaactgcgtgcaccccggctatgtcaggaccgacatgaccatacactcggggctgttgacaccggaggaaggtggcagcagggtggccatggtggcgctgctgccgggaggcgggccaaccggcgcgttctttgaagattttcaacagtcgtcgttcgtgtgatgttgaacatgcagctgcatctcatatgtattctatagatattatttatgtgaaagatgctacagtacgctccccctgcgtttacattcagcgcacctctgaactcttaaacttcaagtcttcaacgacaaatctagacatgatgctgcaaaacatttttaatgtctcctctttcaaaacacgagtttcgtgcgtcatgcacgaagcacaaagagttttttttctcttc

SEQ ID NO: 13182 - protein, 189 aa, Zea mays subsp. mays
  peptide (1)..(189): Ceres Seq. ID no. 12411386
MDMDQRLGWLWENCRETYDDAKTGLRTNYYGTKQVIETLLPLLQASSDGRIVNVSSHFGQLRLFRNEELKRELNDIDNLTPERLDGLLDMFLNDLEAGEVESSNGWPMYFSAYKVAKAAMNAYSRILARRHPELRVNCVHPGYVRTDMTIHSGLLTPEEGGSRVAMVALLPGGGPTGAFFEDFQQSSFV

SEQ ID NO: 13183 - protein, 187 aa, Zea mays subsp. mays
  peptide (1)..(187): Ceres Seq. ID no. 12411387
MDQRLGWLWENCRETYDDAKTGLRTNYYGTKQVIETLLPLLQASSDGRIVNVSSHFGQLRLFRNEELKRELNDIDNLTPERLDGLLDMFLNDLEAGEVESSNGWPMYFSAYKVAKAAMNAYSRILARRHPELRVNCVHPGYVRTDMTIHSGLLTPEEGGSRVAMVALLPGGGPTGAFFEDFQQSSFV

SEQ ID NO: 13184 - protein, 100 aa, Zea mays subsp. mays
  peptide (1)..(100): Ceres Seq. ID no. 12411388
MFLNDLEAGEVESSNGWPMYFSAYKVAKAAMNAYSRILARRHPELRVNCVHPGYVRTDMTIHSGLLTPEEGGSRVAMVALLPGGGPTGAFFEDFQQSSFV

SEQ ID NO: 13185 - DNA, 1444 bp, Zea mays subsp. mays
  misc_feature (1)..(1444): Ceres Seq. ID no. 13502459
  misc_feature (1)..(1444): Ortholog of  Ceres SEQ ID NO 14304148 as cited in SEQ ID NO 57313
  misc_feature (1)..(1444): Ortholog of  Ceres SEQ ID NO 13598513 as cited in SEQ ID NO 64102
  misc_feature (1)..(1444): Ortholog of  Ceres SEQ ID NO 14302224 as cited in SEQ ID NO 64268
gcacgagaccattacctagaacatcctaatcgaaaagtcatcaatcaaatactcagacaaccatggggcaccagcaggcgcagcacggcaaggacgacaccgaggagctgcttgcagcccaccggcagctgtggtgccatgccctgggctacgtcaagtccatggcgctcaagtgcgccctggacctgcgcatccccgacaccatcgaccgctgcggcgggagcgccaccctgggcgagctgctcgccgccagcgagatcccggcgtccaaccacgactacctccggcgggtcatgcgcacgctgacagccatgcgcatcttcgcggccagccacgaccccgccaaggccgacgacgcggccgccatctcctaccagctgaccccggcgtcccggctgctcgtcagcagcagcagcagcgtcgacgacgccgccggcgcctcgaaggagaacactactaccccgagcatcctccccaacatcgcccacctggtccgccccaacaccatctccctgctgttcagcatgggcgagtggatgaaggacgagagcgcggcgtccgtgtcgctgtacgagacggtgcaccggcaggggatgtgggcgtgcgtggaggacgacgcggccaacagggccagcttctacgagagcatggacgccgacacccggctcgtgatgcaggccgtggtccgccggtgcccgcacgtgttcgacggcgtcaagtcgctcgtcgacgtcggcggcggccgcggcaccgccgccgccgccgtcgtcgccgccttcccgcacatccagaggtgcaccgtcatggacctcccccacgtcgtcgccgaggctcccgccggcaccgccggcctgtccttccacggcggcgacatgttcgagcacatcccgtcggctgacgcactcatgctcaagtggatcctgcacgactgggatgaggacaagtgcatcaagataatggagcgctgcaaggaagcgatcggtggcaaggaagcaggggggaaggtgattataatagacacggtgctcggatctcgggcagacgacgacgacgacgacaagacgtgcagggagacgtatgtgttggatctccacatactgagcttcgtgaacggggcggagcgggaggagcaggagtggaggaggatcttcctggcggctgggttccgtgactacaagatcacgcacacccgaggcatcccgtccatcatcgaggtcttcccgtgatgatgatggatcgagagtcgatcatatatgcatgtttgtacgtgtttgtgtcataataaatcgatcgatcatgttgtttaccctttttatttcggtatgtagttgcatctgcgggcgggctaaaataaatcacggcaggctgggcttcatcaagcccatgtatccatctgtgtgtaataatgcaatggaaaacgaaccaaaaagaatgcttccattcc

SEQ ID NO: 13186 - protein, 387 aa, Zea mays subsp. mays
  peptide (1)..(387): Ceres Seq. ID no. 13502460
MGHQQAQHGKDDTEELLAAHRQLWCHALGYVKSMALKCALDLRIPDTIDRCGGSATLGELLAASEIPASNHDYLRRVMRTLTAMRIFAASHDPAKADDAAAISYQLTPASRLLVSSSSSVDDAAGASKENTTTPSILPNIAHLVRPNTISLLFSMGEWMKDESAASVSLYETVHRQGMWACVEDDAANRASFYESMDADTRLVMQAVVRRCPHVFDGVKSLVDVGGGRGTAAAAVVAAFPHIQRCTVMDLPHVVAEAPAGTAGLSFHGGDMFEHIPSADALMLKWILHDWDEDKCIKIMERCKEAIGGKEAGGKVIIIDTVLGSRADDDDDDKTCRETYVLDLHILSFVNGAEREEQEWRRIFLAAGFRDYKITHTRGIPSIIEVFP

SEQ ID NO: 13187 - protein, 354 aa, Zea mays subsp. mays
  peptide (1)..(354): Ceres Seq. ID no. 13502461
MALKCALDLRIPDTIDRCGGSATLGELLAASEIPASNHDYLRRVMRTLTAMRIFAASHDPAKADDAAAISYQLTPASRLLVSSSSSVDDAAGASKENTTTPSILPNIAHLVRPNTISLLFSMGEWMKDESAASVSLYETVHRQGMWACVEDDAANRASFYESMDADTRLVMQAVVRRCPHVFDGVKSLVDVGGGRGTAAAAVVAAFPHIQRCTVMDLPHVVAEAPAGTAGLSFHGGDMFEHIPSADALMLKWILHDWDEDKCIKIMERCKEAIGGKEAGGKVIIIDTVLGSRADDDDDDKTCRETYVLDLHILSFVNGAEREEQEWRRIFLAAGFRDYKITHTRGIPSIIEVFP

SEQ ID NO: 13188 - protein, 310 aa, Zea mays subsp. mays
  peptide (1)..(310): Ceres Seq. ID no. 13502462
MRTLTAMRIFAASHDPAKADDAAAISYQLTPASRLLVSSSSSVDDAAGASKENTTTPSILPNIAHLVRPNTISLLFSMGEWMKDESAASVSLYETVHRQGMWACVEDDAANRASFYESMDADTRLVMQAVVRRCPHVFDGVKSLVDVGGGRGTAAAAVVAAFPHIQRCTVMDLPHVVAEAPAGTAGLSFHGGDMFEHIPSADALMLKWILHDWDEDKCIKIMERCKEAIGGKEAGGKVIIIDTVLGSRADDDDDDKTCRETYVLDLHILSFVNGAEREEQEWRRIFLAAGFRDYKITHTRGIPSIIEVFP

SEQ ID NO: 13189 - DNA, 1715 bp, Zea mays subsp. mays
  misc_feature (1)..(1715): Ceres Seq. ID no. 12411377
  misc_feature (1)..(1715): Ortholog of  Ceres SEQ ID NO 13655298 as cited in SEQ ID NO 68914
  misc_feature (1)..(1715): Ortholog of  Ceres SEQ ID NO 13656501 as cited in SEQ ID NO 69206
gaaaaccaccatccccgttccccaacccccccaaagccgagagccatcccgcccgcagccgcaaccaggcaagcaagcgggagccgccaactcgtgcctctcggcagcggcgtctgaactctgaaccgaccgaccgttccgttcacccccaccatggaggcgccgccgggaccggggcccatggagctggacgccccacctcccgccgccgccgcggcgattcctcccgccggcagcgacaagcacaaggtggacggggaagggggagacgctgtgacgggccatatcatctccaccaccatcggcgggaagaacggcgagcccaatcggaccatcagttacatggcagaacgtgtcgtgggtacaggctcatttgggatcgtcttccaggctaagtgtctggaaacaggagagacctttgccatcaagaaggtgctgcaagatcggcgttacaagaaccgggagctgcaacttatgcgtgccatggagcaccccaacgtcatctgcctgaagcactgcttcttctcgacaacgagcagggacgaattgtttttaaaccttgtcatggaattcgtccctgagactctataccgggtcctgaagcactacagcaatgcgaaccagaggatgcctcttatctacgtcaagctctacatgtatcagctttttagaggcctagcttatattcataatgtaccaggagtctgccatagggatgtgaagccacaaaatgttttggttgatcctctcacccaccaggtcaagctctgtgactttggtagtgcaaaagttctgattcctggtgaaccgaacatatcttacatatgctctcgttactatcgtgcccctgagctcatatttggtgcgacggagtatacaagttcaatagacatatggtcagctggttgtgttctagctgagttgcttcttggacagccactatttccaggagagagcgctgttgatcagttggtagagatcatcaaggttcttggtactccaacccgtgaggagatacggtgcatgaatcccaactatactgagttcaggtttcctcagataaaggctcatccatggcacaagattttccacaagagaatgcctcctgaagccatagaccttgcttcccgtctccttcagtattcaccaagtcttcgctgctctgctcttgacgcatgtgctcatcccttcttcgatgagctgcggacaccgaatgcacgcctaccaaacggccgcccgttccctccgctctttaacttcaagcacgaactagcaaatgcctctccagaccttgtcagcaggcttgtgccggagcacattagacggcagatcggtgtcaacttcgggagcagctaggagggcaggcgctgcgatggtcggagttttcggtcttggtttccccttctggagagtgggaggggctcaagcagtacctgagaaaagtagtgaaaccgtgtatattatctgaccgtgaaggagtactaccgccagtaactggcgcatgttcgtccagtagttatggtaagaatgtaggaggtgaagactggttaatgtgtagggtcgtttttttttgttttgatattactaccattttgttgtaatgttcgtcggtacttccagcagtagtgtagctggccacgttttgttcgtccgccatgatgtaaatgatcatcgcccaactgtaatgcatgttctctctgatcgtttcgtagtcc

SEQ ID NO: 13190 - protein, 400 aa, Zea mays subsp. mays
  peptide (1)..(400): Ceres Seq. ID no. 12411378
MEAPPGPGPMELDAPPPAAAAAIPPAGSDKHKVDGEGGDAVTGHIISTTIGGKNGEPNRTISYMAERVVGTGSFGIVFQAKCLETGETFAIKKVLQDRRYKNRELQLMRAMEHPNVICLKHCFFSTTSRDELFLNLVMEFVPETLYRVLKHYSNANQRMPLIYVKLYMYQLFRGLAYIHNVPGVCHRDVKPQNVLVDPLTHQVKLCDFGSAKVLIPGEPNISYICSRYYRAPELIFGATEYTSSIDIWSAGCVLAELLLGQPLFPGESAVDQLVEIIKVLGTPTREEIRCMNPNYTEFRFPQIKAHPWHKIFHKRMPPEAIDLASRLLQYSPSLRCSALDACAHPFFDELRTPNARLPNGRPFPPLFNFKHELANASPDLVSRLVPEHIRRQIGVNFGSS

SEQ ID NO: 13191 - protein, 391 aa, Zea mays subsp. mays
  peptide (1)..(391): Ceres Seq. ID no. 12411379
MELDAPPPAAAAAIPPAGSDKHKVDGEGGDAVTGHIISTTIGGKNGEPNRTISYMAERVVGTGSFGIVFQAKCLETGETFAIKKVLQDRRYKNRELQLMRAMEHPNVICLKHCFFSTTSRDELFLNLVMEFVPETLYRVLKHYSNANQRMPLIYVKLYMYQLFRGLAYIHNVPGVCHRDVKPQNVLVDPLTHQVKLCDFGSAKVLIPGEPNISYICSRYYRAPELIFGATEYTSSIDIWSAGCVLAELLLGQPLFPGESAVDQLVEIIKVLGTPTREEIRCMNPNYTEFRFPQIKAHPWHKIFHKRMPPEAIDLASRLLQYSPSLRCSALDACAHPFFDELRTPNARLPNGRPFPPLFNFKHELANASPDLVSRLVPEHIRRQIGVNFGSS

SEQ ID NO: 13192 - protein, 337 aa, Zea mays subsp. mays; identical to SEQ ID NO: 1597
  peptide (1)..(337): Ceres Seq. ID no. 12411380

SEQ ID NO: 13193 - DNA, 1262 bp, Zea mays subsp. mays
  misc_feature (1)..(1262): Ceres Seq. ID no. 12351854
  misc_feature (1)..(1262): Ortholog of  Ceres SEQ ID NO 14303542 as cited in SEQ ID NO 63539
  misc_feature (1)..(1262): Ortholog of  Ceres SEQ ID NO 12407937 as cited in SEQ ID NO 0
aatcactccattcatcgccggagtcccgaccaaattatccacacacgcgcctcgcctcccactcccccgaactcacacgccgcggcggagcaccaccgcggccgcccaccatgacctccgcctccaccttcctctctctgcgcctgcccactccctcccacgccacttcgtccctttccttccccccgtctctgctccggcaggcgcgtggcggtgtggcgtcctcgacgctggtggcgcgggcggcagggccaacgggagcggcgggagctccatcgccgctattcaacccccggggagacccgttcctgtctaccctcgcagccgcctcaccggaggaccttgcggccgccgctggtggcgagcgccgtggagaggaccacctgccgttcctcgagatcttccagaacaccaaactcatggcctcgcccgcgcaggtggaacggtctagcagctcgtatagtcagcacagacctagaaggcctcctccagatttgccttcattgcttcttcacggccgaatcgtttatattggcatgccgttggtaccagcagtgactgagctcattgttgcccagttgatgtaccttgaatggatgaacagtaaagaacctgtttatatatacatcaactcaactggaacggctcgcgatgatggtgaaccggtcgggatggagagcgaaggttttgcaatctatgatgcaatgatgcgtatgaaaactgagatccacacactttgtataggagctgcagcaggcccatgcatgtcttgtgcttgcagctggaaaaaaaggcaaacgttatatgttccctcatgccaaagctatgattcagcaaccacgtattccttcttatgggatgatgcaagcatcagatgttgttattcgtgcaaaggaggttgtgcacaacaggaacacattggtcaaacttttagcaaggcatactggaaatccaccagagaaaatagacaaggtaatgagaggaccattttacatggactccttgaaggcaaaggagtttggagtcattgacaagatcctttggcgcggtcaggagaagtacatggctgacatgctctccccagatgagtgggacaaagttgccggagtcagacatcctgatctaatgtaatgttattcattgaaagttcaacatttggttaggttaatagcttccagggggcagaaacaggtgacgctgaacaataatgcttgattatcaatgataatggttggtaagagccaaggagtacttgtttaact

SEQ ID NO: 13194 - protein, 342 aa, Zea mays subsp. mays
  peptide (1)..(342): Ceres Seq. ID no. 12351855
SLHSSPESRPNYPHTRLASHSPELTRRGGAPPRPPTMTSASTFLSLRLPTPSHATSSLSFPPSLLRQARGGVASSTLVARAAGPTGAAGAPSPLFNPRGDPFLSTLAAASPEDLAAAAGGERRGEDHLPFLEIFQNTKLMASPAQVERSSSSYSQHRPRRPPPDLPSLLLHGRIVYIGMPLVPAVTELIVAQLMYLEWMNSKEPVYIYINSTGTARDDGEPVGMESEGFAIYDAMMRMKTEIHTLCIGAAAGPCMSCACSWKKRQTLYVPSCQSYDSATTYSFLWDDASIRCCYSCKGGCAQQEHIGQTFSKAYWKSTRENRQGNERTILHGLLEGKGVWSH

SEQ ID NO: 13195 - protein, 306 aa, Zea mays subsp. mays
  peptide (1)..(306): Ceres Seq. ID no. 12351856
MTSASTFLSLRLPTPSHATSSLSFPPSLLRQARGGVASSTLVARAAGPTGAAGAPSPLFNPRGDPFLSTLAAASPEDLAAAAGGERRGEDHLPFLEIFQNTKLMASPAQVERSSSSYSQHRPRRPPPDLPSLLLHGRIVYIGMPLVPAVTELIVAQLMYLEWMNSKEPVYIYINSTGTARDDGEPVGMESEGFAIYDAMMRMKTEIHTLCIGAAAGPCMSCACSWKKRQTLYVPSCQSYDSATTYSFLWDDASIRCCYSCKGGCAQQEHIGQTFSKAYWKSTRENRQGNERTILHGLLEGKGVWSH

SEQ ID NO: 13196 - protein, 203 aa, Zea mays subsp. mays
  peptide (1)..(203): Ceres Seq. ID no. 12351857
MASPAQVERSSSSYSQHRPRRPPPDLPSLLLHGRIVYIGMPLVPAVTELIVAQLMYLEWMNSKEPVYIYINSTGTARDDGEPVGMESEGFAIYDAMMRMKTEIHTLCIGAAAGPCMSCACSWKKRQTLYVPSCQSYDSATTYSFLWDDASIRCCYSCKGGCAQQEHIGQTFSKAYWKSTRENRQGNERTILHGLLEGKGVWSH

SEQ ID NO: 13197 - DNA, 1344 bp, Zea mays subsp. mays
  misc_feature (1)..(1344): Ceres Seq. ID no. 13498889
  misc_feature (1)..(1344): Ortholog of  Ceres SEQ ID NO 12626036 as cited in SEQ ID NO 69091
agaactagcagttgttccccttttccctccccacgccgaacgcacccgatcgcaaacaaagcgagcagcagaaacatgcgagacatgccggttgtccgccgccaggaacccaccgtcgtcaggacggaggacgacgtggtttccggcggtgaggactcggacggcgagttcgagttcccctccgtgagccgggagtccgcggcgggcgttggnnggnnccgcgtctagccgacganntnntnngcgggcggnnacgcccgggcgttctacccggtgtttgnncgagtgctggacgaggccgcagcgccggcaccgagggcgccactagggcggctgttccagctggagcaggngcggacctcgtccgtngcgtccacgtcctcctcctcctcatcatcatcggcgtcgacggcggcgggcacgggcgcggacctcgacggcgtcggcgcgtcgccggacagntactgcgtctggacgcccgggtcgtcgccggcgtcctcgccctcgcggccgccgcggaagagcgggtccacgggctccatcgcgcggtggcgccgcatcggtgagctcgtcgtcggccgcagccgcagcgacggcaaggacaagttcctcttcctctcggcgccgccgtccccggccagggacagggagcacgcccccgcctccaaggccaaggccaagctgccgcccaaaggaagcaaagccgccgcaaccgagctagacacggtctccgcgggccgccggttgtcatatggcggcggcggcgccaaggcctccaccnncggccggcgcacgttcctgccgtaccggcaggacctcgtggggctgttcgccagcgtgcacgggctcagcaggagcccacacccgttntganccggtgagccacgaccacgacgcgccgtggaggacccgttccaaacagtgagacttcaggtttgaaatcgggatttgaaatttcagacatttgacttggagatctcctgcgagccgagtcaaaaagacaaggtgtgaagtcagagaaagcaggggaaatgtgagccttctttcaggattcggctcggaatcgtgctctgcagtcggtggctaaccacctgccatgcgatttgtgtaggcgggtacacatatactacgacaaattggacaagaagtttacatgtgattgttcgtatatgttggtatatatgtagctgtgtacatactgtacattgtatagtattgcaatttaggtatacaggagtaggtgtttgcgaggaattcagaattcctcgtttgcattctacagtttcgtttatctgcgtgttgtcgcatctctaatgtctaatctaactaattgcttttctgcct

SEQ ID NO: 13198 - protein, 75 aa, Zea mays subsp. mays
  peptide (1)..(75): Ceres Seq. ID no. 13498890
  misc_feature (71)..(71): Xaa is any aa, unknown or other
  misc_feature (72)..(72): Xaa is any aa, unknown or other
  misc_feature (73)..(73): Xaa is any aa, unknown or other
RTSSCSPFPSPRRTHPIANKASSRNMRDMPVVRRQEPTVVRTEDDVVSGGEDSDGEFEFPSVSRESAAGVXXXRV

SEQ ID NO: 13199 - protein, 61 aa, Zea mays subsp. mays
  peptide (1)..(61): Ceres Seq. ID no. 13498891
ELAVVPLFPPHAERTRSQTKRAAETCETCRLSAARNPPSSGRRTTWFPAVRTRTASSSSPP

SEQ ID NO: 13200 - protein, 57 aa, Zea mays subsp. mays
  peptide (1)..(57): Ceres Seq. ID no. 13498892
  misc_feature (10)..(10): Xaa is any aa, unknown or other
  misc_feature (11)..(11): Xaa is any aa, unknown or other
  misc_feature (40)..(40): Xaa is any aa, unknown or other
  misc_feature (41)..(41): Xaa is any aa, unknown or other
MAAAAPRPPXXAGARSCRTGRTSWGCSPACTGSAGAHTRXXPVSHDHDAPWRTRSKQ

SEQ ID NO: 13201 - protein, 50 aa, Zea mays subsp. mays
  peptide (1)..(50): Ceres Seq. ID no. 13498893
  misc_feature (46)..(46): Xaa is any aa, unknown or other
  misc_feature (47)..(47): Xaa is any aa, unknown or other
  misc_feature (48)..(48): Xaa is any aa, unknown or other
MRDMPVVRRQEPTVVRTEDDVVSGGEDSDGEFEFPSVSRESAAGVXXXRV

SEQ ID NO: 13202 - DNA, 1654 bp, Zea mays subsp. mays
  misc_feature (1)..(1654): Ceres Seq. ID no. 13492518
  misc_feature (1)..(1654): Ortholog of  Ceres SEQ ID NO 13655298 as cited in SEQ ID NO 68914
catttccgcgtcgtctccgcccgcagccggcagccccaccacccaccacatcggccgccatgccgggtggggcccacggcgccggcgccgcggacccgatgcaggtggaccagccgctcccccctgccgccgcaggcacagcacacgcccccgccgacgccaagcatgctggttctatgattgaagggagtgatccggtcacaggccatataatctcgacaaccattggagggaagaatggagagcctaaaaggactatcagctacatggcagagagagttgtgggaactggatcatttggaatcgtcttccaggcaaaatgtctggagactggtgagactgttgcgattaagaaggttttgcaggacaagcgctacaagaacagggagctacaaatcatgcgatccatggatcactgcaatgttgtttccttgaagcattgcttcttctctaccacaagcagagatgaacttttccttaacttagtgatggagtttgttcccgagtcattatatcgggtgttgaaacattacagcaatatgaaccagaggatgccactcatttatgtcaaattatatacctaccagatatttcgaggcttagcctatattcacacagtacctggagtttgccacagggatgtgaaaccacaaaatcttttggttgatccaccgactcaccaagtgaagatatgtgattttgggagtgccaaaatgttggtcaaaggtgaagcaaacatatcatatatatgttcacgttattaccgtgctccagagctcatatttggggcaactgagtacacaacatcaattgatatttggtcagctggatgtgttcttgctgagctgcttcttggccagcctctcttccctggtgaaagtgctgtggatcagcttgttgagataataaaggttcttggtaccccaacgcgcgaggaaatccgatgtatgaatccaaactacaccgagtttagatttcctcagatcaaagctcacccatggcacaagattttccacaagcggatgcctccagaagctatagatctcgcttcacgcttgctccagtattcaccaaatctaagatgcactgctcttgaagcgtgtgcacatccattctttgacgatttgcgagaaccacatgcgaggttgccaaatggacggccatttcctccactgttcaactttaaacaggaactagcaaatgcctccccagagctcatcaacaggttgatcccagaccatgctaggcggcatcttgggctcacattattgcccgctactggaccataggcgaaggctctatggtggtgcttcgttgtgcggaaggcaacctgcattcaaggtgtagaatctgacaattattggaaggtcaaacatgagctggcgcgtaaggagaggtggtatgttctcgtgcagccagccttaatttgtcgcatgtcttaatgcaaaaatctgatttttgcccaagtagtgagaggagggaagggggtggtcggtgtattgttaagctattgaaggaattcgatccctgctattgtgttactttctccaacgtttaaacgttgtagtgcgcctgtaagtgttccatatatcccctgttgtcagtcagtgtaattctgtaaatgttattaatgggaaattatttcgtgcttttc

SEQ ID NO: 13203 - protein, 428 aa, Zea mays subsp. mays
  peptide (1)..(428): Ceres Seq. ID no. 13492519
FPRRLRPQPAAPPPTTSAAMPGGAHGAGAADPMQVDQPLPPAAAGTAHAPADAKHAGSMIEGSDPVTGHIISTTIGGKNGEPKRTISYMAERVVGTGSFGIVFQAKCLETGETVAIKKVLQDKRYKNRELQIMRSMDHCNVVSLKHCFFSTTSRDELFLNLVMEFVPESLYRVLKHYSNMNQRMPLIYVKLYTYQIFRGLAYIHTVPGVCHRDVKPQNLLVDPPTHQVKICDFGSAKMLVKGEANISYICSRYYRAPELIFGATEYTTSIDIWSAGCVLAELLLGQPLFPGESAVDQLVEIIKVLGTPTREEIRCMNPNYTEFRFPQIKAHPWHKIFHKRMPPEAIDLASRLLQYSPNLRCTALEACAHPFFDDLREPHARLPNGRPFPPLFNFKQELANASPELINRLIPDHARRHLGLTLLPATGP

SEQ ID NO: 13204 - protein, 409 aa, Zea mays subsp. mays
  peptide (1)..(409): Ceres Seq. ID no. 13492520
MPGGAHGAGAADPMQVDQPLPPAAAGTAHAPADAKHAGSMIEGSDPVTGHIISTTIGGKNGEPKRTISYMAERVVGTGSFGIVFQAKCLETGETVAIKKVLQDKRYKNRELQIMRSMDHCNVVSLKHCFFSTTSRDELFLNLVMEFVPESLYRVLKHYSNMNQRMPLIYVKLYTYQIFRGLAYIHTVPGVCHRDVKPQNLLVDPPTHQVKICDFGSAKMLVKGEANISYICSRYYRAPELIFGATEYTTSIDIWSAGCVLAELLLGQPLFPGESAVDQLVEIIKVLGTPTREEIRCMNPNYTEFRFPQIKAHPWHKIFHKRMPPEAIDLASRLLQYSPNLRCTALEACAHPFFDDLREPHARLPNGRPFPPLFNFKQELANASPELINRLIPDHARRHLGLTLLPATGP

SEQ ID NO: 13205 - protein, 396 aa, Zea mays subsp. mays
  peptide (1)..(396): Ceres Seq. ID no. 13492521
MQVDQPLPPAAAGTAHAPADAKHAGSMIEGSDPVTGHIISTTIGGKNGEPKRTISYMAERVVGTGSFGIVFQAKCLETGETVAIKKVLQDKRYKNRELQIMRSMDHCNVVSLKHCFFSTTSRDELFLNLVMEFVPESLYRVLKHYSNMNQRMPLIYVKLYTYQIFRGLAYIHTVPGVCHRDVKPQNLLVDPPTHQVKICDFGSAKMLVKGEANISYICSRYYRAPELIFGATEYTTSIDIWSAGCVLAELLLGQPLFPGESAVDQLVEIIKVLGTPTREEIRCMNPNYTEFRFPQIKAHPWHKIFHKRMPPEAIDLASRLLQYSPNLRCTALEACAHPFFDDLREPHARLPNGRPFPPLFNFKQELANASPELINRLIPDHARRHLGLTLLPATGP

SEQ ID NO: 13206 - DNA, 1176 bp, Zea mays subsp. mays
  misc_feature (1)..(1176): Ceres Seq. ID no. 12347474
  misc_feature (1)..(1176): Ortholog of  Ceres SEQ ID NO 13597333 as cited in SEQ ID NO 63974
  misc_feature (1)..(1176): Ortholog of  Ceres SEQ ID NO 13599307 as cited in SEQ ID NO 0
aaacatccccaacccacgaccctccgccaccggccatcgcctgcatcagatctcccgcccgtccgttacatctcagcgcgacgcggccgcggccatgacgccatcctccgctctcgccctcgcgcaccacgccgcggcatccccgctcccgtcctccacgccgcggccctcccccaggtccagctctctgagcctgggcccgggctccgccgggctcgggccgcgccggctcgtcgcggcagcgcccccacgggcgttcttctcctcgtccccctaccagccgccccagccggaggggttctcgcagcaccgcgagtacggcctggtccccatggtcatcgagaccacctcccggggggagcgcgcctacgacatcttctcgcgcctgcttaaggagcgcatcgtctgcatccacgggcccatcgccgacgacacggcctcgctcgtcgtcgcgcagctgctcttcctcgagtccgagaacccgctcaagcccgtccacctctacatcaactcccccgggggcgtcgtcaccgcggggctcgccatctacgacaccatgcagtacatccgctgccccgtcaccaccctctgcatcggccaggcggcctccatgggctcgctcctcctcgcggctggggcgccgggtgagaggcgcgcgcttcccaacgccagggtcatgatccaccagccctcgggcggcgcgcaggggcaagccaccgacatcgcccatccaggccaaggagatcctcaaaatgcgcgaccgcctcaacaagatctaccagaagcacacgcgccagcccatcgataagattgagcagtgcatggagagggacctcttcatggaccctgaagaggcgcgcgactggggcctcatcgacgaggtcatcgagaatcgacctgcctcgttcatgcccgacggaatcggtggaggcctcgatgtgcccaggctcggtggcgttggcggcggacgggggagggacgtcgaggaaccttccgcggtgtgaggattggcctcaaaggtgaaatccttcctcatccggtggatgtgttgtttgttgttagatccaaaggttcaattcttactatacaaggttaaccttgttattatggttatggaaacgtccggctccccattgtccttgttgcttaaattgcttcaattgagctattggggat

SEQ ID NO: 13207 - protein, 268 aa, Zea mays subsp. mays
  peptide (1)..(268): Ceres Seq. ID no. 12347475
NIPNPRPSATGHRLHQISRPSVTSQRDAAAAMTPSSALALAHHAAASPLPSSTPRPSPRSSSLSLGPGSAGLGPRRLVAAAPPRAFFSSSPYQPPQPEGFSQHREYGLVPMVIETTSRGERAYDIFSRLLKERIVCIHGPIADDTASLVVAQLLFLESENPLKPVHLYINSPGGVVTAGLAIYDTMQYIRCPVTTLCIGQAASMGSLLLAAGAPGERRALPNARVMIHQPSGGAQGQATDIAHPGQGDPQNARPPQQDLPEAHAPAHR

SEQ ID NO: 13208 - protein, 237 aa, Zea mays subsp. mays
  peptide (1)..(237): Ceres Seq. ID no. 12347476
MTPSSALALAHHAAASPLPSSTPRPSPRSSSLSLGPGSAGLGPRRLVAAAPPRAFFSSSPYQPPQPEGFSQHREYGLVPMVIETTSRGERAYDIFSRLLKERIVCIHGPIADDTASLVVAQLLFLESENPLKPVHLYINSPGGVVTAGLAIYDTMQYIRCPVTTLCIGQAASMGSLLLAAGAPGERRALPNARVMIHQPSGGAQGQATDIAHPGQGDPQNARPPQQDLPEAHAPAHR

SEQ ID NO: 13209 - protein, 158 aa, Zea mays subsp. mays
  peptide (1)..(158): Ceres Seq. ID no. 12347477
MVIETTSRGERAYDIFSRLLKERIVCIHGPIADDTASLVVAQLLFLESENPLKPVHLYINSPGGVVTAGLAIYDTMQYIRCPVTTLCIGQAASMGSLLLAAGAPGERRALPNARVMIHQPSGGAQGQATDIAHPGQGDPQNARPPQQDLPEAHAPAHR

SEQ ID NO: 13210 - DNA, 1623 bp, Zea mays subsp. mays
  misc_feature (1)..(1623): Ceres Seq. ID no. 12345183
  misc_feature (1)..(1623): Ortholog of  Ceres SEQ ID NO 12784228 as cited in SEQ ID NO 66111
acctcacaagtccaaatcagtttgtctgctccgcccgttgcccgtggcccgtcggtctctcttgcagtctcgccgctccccttcctcccccgcaggaatccgaatcagtaagtccggcgacctaggtctctcggcttgtccgcagcccgccggtcagtaatggcgcaggatgatccggttgtttctgctcagtggctgcacgagcacctagggatgcctgatgttaaggtaaaaaaaaaacatctagtttgcgtgttcatattcacttcagagacacttcagtaatgcttccttcatcgaagaagaaagttcagagatatacttcttctatcccctgcgttactggtatgtggagaatataacagtttggttgtctatcaatttgatattcccttttatgtgttgtgttcttattactcccagaaataattagagggttagggacatatgtgctttgtgacagttatcagcttgttttaggttttggatgcttcctggtacatgccggtagagaacagggatccatggaaagaatatcaggtggcacacatccccggtgcgctattcttcgacttagatggcatagttgatcggacaactgatttaccgcacatgctgccatcagaagaggcttttgcagcagcaatttctgagctggatataaaaaaccaggataaagttattgtctatgatggaaagggattcttcagtgcacctcgtgtttggtggatgtttagagtgtttgggcacaagaaagtctgggtactagacggcggtttgcctcagtggcaagcttctgggttcaacgtggaaaaggccagccctgacgatgacgcagttctgaaatcaatcgctgcaaacagggctgtcaaaagggtttataatggtgaacagacaaatacaatctcgtttcagactgaatttcagcctaatctattctgggcactggaaaaggtcgcacaaaacgtcactgctaagacgtaccaacagatagatgccagagcaaagggcagattcgacggcgtggcgccagagccacgggaaggggtaaggagtgggcatataccaggaagcgtctgcgttccgttccccgagatgttcgacggcgcaccaccgagccttctcctccccgccgacgagctgcggcggaagtttcagcacgcaggaatctccctggaccgacccatcgtcgtgacctgcggatccggcgtgactgcctgcatactcgctctggggctgtacaggatcggaaagcgtgatgtgccagtctacgatgggtcctcgacggagtgggagggtcagtcggactccgattaccccaaagtcaccgctcctggtacagcttgagcgtctgggactgggagttggcagttttagactgccagcatgatggcattgtgtttgcgacaggctgaaccgattttatcgagcactggaagcattgtattcgctactggtaggcctgctaatggcaaaaattccaacccacgcccacccatacccaaatctaataacttgatattcatcccactcccacccaaaaatataagaagaaaattaaacctaacccatccaatgatattattgatccctaaaccaacccgtaattgggtggaaacccgt

SEQ ID NO: 13211 - protein, 281 aa, Zea mays subsp. mays
  peptide (1)..(281): Ceres Seq. ID no. 12345184
MPVENRDPWKEYQVAHIPGALFFDLDGIVDRTTDLPHMLPSEEAFAAAISELDIKNQDKVIVYDGKGFFSAPRVWWMFRVFGHKKVWVLDGGLPQWQASGFNVEKASPDDDAVLKSIAANRAVKRVYNGEQTNTISFQTEFQPNLFWALEKVAQNVTAKTYQQIDARAKGRFDGVAPEPREGVRSGHIPGSVCVPFPEMFDGAPPSLLLPADELRRKFQHAGISLDRPIVVTCGSGVTACILALGLYRIGKRDVPVYDGSSTEWEGQSDSDYPKVTAPGTA

SEQ ID NO: 13212 - protein, 244 aa, Zea mays subsp. mays
  peptide (1)..(244): Ceres Seq. ID no. 12345185
MLPSEEAFAAAISELDIKNQDKVIVYDGKGFFSAPRVWWMFRVFGHKKVWVLDGGLPQWQASGFNVEKASPDDDAVLKSIAANRAVKRVYNGEQTNTISFQTEFQPNLFWALEKVAQNVTAKTYQQIDARAKGRFDGVAPEPREGVRSGHIPGSVCVPFPEMFDGAPPSLLLPADELRRKFQHAGISLDRPIVVTCGSGVTACILALGLYRIGKRDVPVYDGSSTEWEGQSDSDYPKVTAPGTA

SEQ ID NO: 13213 - protein, 205 aa, Zea mays subsp. mays
  peptide (1)..(205): Ceres Seq. ID no. 12345186
MFRVFGHKKVWVLDGGLPQWQASGFNVEKASPDDDAVLKSIAANRAVKRVYNGEQTNTISFQTEFQPNLFWALEKVAQNVTAKTYQQIDARAKGRFDGVAPEPREGVRSGHIPGSVCVPFPEMFDGAPPSLLLPADELRRKFQHAGISLDRPIVVTCGSGVTACILALGLYRIGKRDVPVYDGSSTEWEGQSDSDYPKVTAPGTA

SEQ ID NO: 13214 - DNA, 1883 bp, Zea mays subsp. mays
  misc_feature (1)..(1883): Ceres Seq. ID no. 13494565
  misc_feature (1)..(1883): Ortholog of  Ceres SEQ ID NO 14312208 as cited in SEQ ID NO 54845
  misc_feature (1)..(1883): Ortholog of  Ceres SEQ ID NO 15171755 as cited in SEQ ID NO 57047
  misc_feature (1)..(1883): Ortholog of  Ceres SEQ ID NO 13597613 as cited in SEQ ID NO 65334
  misc_feature (1)..(1883): Ortholog of  Ceres SEQ ID NO 14303664 as cited in SEQ ID NO 65892
  misc_feature (1)..(1883): Ortholog of  Ceres SEQ ID NO 15178832 as cited in SEQ ID NO 0
ctaatcactagtataaagcaggcggagacagccggcccctctggcctcgctgctcccccttcctccccgtccccacccacatgccctgcctccgccccgccccgccctgcccaaggtgattgattgattggttgcttggttgcttgcttcgtttcacgctttccccttcctttgctgagatccaaaagctgagactcagcttgtcgatccatctgttctgtgcgcctactcgtatcttaggatccatctgtatgttgtttacttgttttcctgattgaatcgcgcattggatgcctggtggttggccttgctcctagtcttttcatttacacgagctttcgacgaagccgcgtctggtctgtctgctccatcacaagagcacgcaaatggttcgatctgccgtgccagatgattgctgcattcagtgggacgtcatgcacatccacgatggattgtagcgtcagcactctgatctttccttgtcgatttgtttgtcgcagctgagttcccccaccccccaacaaacaattactagagtagctgcattggcggggaaattaaagcgctagaagctcagcagcaatggcggagcaggcgggcgccggaaggtactggtgccacatgtgcgccgcggccgttagccccgcggagggcgaggtggagatgaagtgcccgttctgccacagcggcttcctcgaggagatggagaccgcccgcggggccgcgaccgacgacggtgacggcgacggcgcggtggctcaggtgcaccccggcgccgaccgcccgagctccatctgggcgcacgctatcctcagcacggtcgacagctccgcccgtcgccgccgcaaccggcggcagcaggaggccgccagcgacgtctacgactggaacgaccccgagttctcgctgcgccggcggcgcgtcaccgcgttcctgcggctcctgcacgagctccgggaccgccagctgcagcggctggagtccgctgccggcgtcgccctcgaaggcgaccagctgaccccgttcggccggagcctcttcatcggcgcagctggcggcgagcatggcgtggcgctgggcgactacttcctcggccccagcctcgacgccttggtacagcagctcgccgagaacgatgcggcgcggcacggaacgccgccggccaagaaggaggccgtggaggcaatgccgaccgtggaaatcgccggcggcaacgatggcgacgacgcggccagctgcccggtctgcctggaggactacgcggccggcgagcgcgcccgcgagatgccctgcaggcacaggttccacgccaattgcatcgtgccgtggctcgagatgcacagctcctgccctgtctgccggttccagctgccggccaccgacgacaagagctcatgcaacggcggcgacggtggtttcgtcagtgtcgatgcggatcgtgaaggcagtgacaacggcgggggtgatggtagggcaagctctcggggcaatgccgagctagctgaagctgaagagagtggcaggcggttgccgccatccttgcagtggctcaacagcctgttctcgccgtcggcgcagtcctccggtagcggcggcagcagttcgcatcattgggagaactaagcaatattgccatggttgctgccgcttgaaagcttggcccgttggttggtcccaatgtacataggaaggagcaggagcgcatgccgggttggtgccatggaaaaatctggacccttttttctctgatatgtatcatggctgtaaaaaagaacagaaatgggcaaatgtatgaacttgccgcgctcttgcgtgaactgggtgctaatcatcgtcttactactcaattttggtttttattaacaaaactatagtatttatgc

SEQ ID NO: 13215 - protein, 346 aa, Zea mays subsp. mays
  peptide (1)..(346): Ceres Seq. ID no. 13494566
MAEQAGAGRYWCHMCAAAVSPAEGEVEMKCPFCHSGFLEEMETARGAATDDGDGDGAVAQVHPGADRPSSIWAHAILSTVDSSARRRRNRRQQEAASDVYDWNDPEFSLRRRRVTAFLRLLHELRDRQLQRLESAAGVALEGDQLTPFGRSLFIGAAGGEHGVALGDYFLGPSLDALVQQLAENDAARHGTPPAKKEAVEAMPTVEIAGGNDGDDAASCPVCLEDYAAGERAREMPCRHRFHANCIVPWLEMHSSCPVCRFQLPATDDKSSCNGGDGGFVSVDADREGSDNGGGDGRASSRGNAELAEAEESGRRLPPSLQWLNSLFSPSAQSSGSGGSSSHHWEN

SEQ ID NO: 13216 - protein, 333 aa, Zea mays subsp. mays
  peptide (1)..(333): Ceres Seq. ID no. 13494567
MCAAAVSPAEGEVEMKCPFCHSGFLEEMETARGAATDDGDGDGAVAQVHPGADRPSSIWAHAILSTVDSSARRRRNRRQQEAASDVYDWNDPEFSLRRRRVTAFLRLLHELRDRQLQRLESAAGVALEGDQLTPFGRSLFIGAAGGEHGVALGDYFLGPSLDALVQQLAENDAARHGTPPAKKEAVEAMPTVEIAGGNDGDDAASCPVCLEDYAAGERAREMPCRHRFHANCIVPWLEMHSSCPVCRFQLPATDDKSSCNGGDGGFVSVDADREGSDNGGGDGRASSRGNAELAEAEESGRRLPPSLQWLNSLFSPSAQSSGSGGSSSHHWEN

SEQ ID NO: 13217 - protein, 319 aa, Zea mays subsp. mays
  peptide (1)..(319): Ceres Seq. ID no. 13494568
MKCPFCHSGFLEEMETARGAATDDGDGDGAVAQVHPGADRPSSIWAHAILSTVDSSARRRRNRRQQEAASDVYDWNDPEFSLRRRRVTAFLRLLHELRDRQLQRLESAAGVALEGDQLTPFGRSLFIGAAGGEHGVALGDYFLGPSLDALVQQLAENDAARHGTPPAKKEAVEAMPTVEIAGGNDGDDAASCPVCLEDYAAGERAREMPCRHRFHANCIVPWLEMHSSCPVCRFQLPATDDKSSCNGGDGGFVSVDADREGSDNGGGDGRASSRGNAELAEAEESGRRLPPSLQWLNSLFSPSAQSSGSGGSSSHHWEN

SEQ ID NO: 13218 - DNA, 1376 bp, Zea mays subsp. mays; identical to SEQ ID NO: 12530
  misc_feature (1)..(1376): Ceres Seq. ID no. 12404602
  misc_feature (1)..(1376): Ortholog of  Ceres SEQ ID NO 14309755 as cited in SEQ ID NO 20741
  misc_feature (1)..(1376): Ortholog of  Ceres SEQ ID NO 13594727 as cited in SEQ ID NO 52169
  misc_feature (1)..(1376): Ortholog of  Ceres SEQ ID NO 14314050 as cited in SEQ ID NO 59952
  misc_feature (1)..(1376): Ortholog of  Ceres SEQ ID NO 13596474 as cited in SEQ ID NO 62169
  misc_feature (1)..(1376): Ortholog of  Ceres SEQ ID NO 13598714 as cited in SEQ ID NO 62656
  misc_feature (1)..(1376): Ortholog of  Ceres SEQ ID NO 13596969 as cited in SEQ ID NO 63375
  misc_feature (1)..(1376): Ortholog of  Ceres SEQ ID NO 15225685 as cited in SEQ ID NO 63616
  misc_feature (1)..(1376): Ortholog of  Ceres SEQ ID NO 13597519 as cited in SEQ ID NO 64759

SEQ ID NO: 13219 - protein, 264 aa, Zea mays subsp. mays; identical to SEQ ID NO: 12531
  peptide (1)..(264): Ceres Seq. ID no. 12404603

SEQ ID NO: 13220 - protein, 212 aa, Zea mays subsp. mays; identical to SEQ ID NO: 12532
  peptide (1)..(212): Ceres Seq. ID no. 12404604

SEQ ID NO: 13221 - protein, 194 aa, Zea mays subsp. mays; identical to SEQ ID NO: 12533
  peptide (1)..(194): Ceres Seq. ID no. 12404605

SEQ ID NO: 13222 - DNA, 1393 bp, Zea mays subsp. mays
  misc_feature (1)..(1393): Ceres Seq. ID no. 12351858
  misc_feature (1)..(1393): Ortholog of  Ceres SEQ ID NO 12781552 as cited in SEQ ID NO 51997
  misc_feature (1)..(1393): Ortholog of  Ceres SEQ ID NO 15176548 as cited in SEQ ID NO 53387
  misc_feature (1)..(1393): Ortholog of  Ceres SEQ ID NO 15169228 as cited in SEQ ID NO 55423
  misc_feature (1)..(1393): Ortholog of  Ceres SEQ ID NO 14312196 as cited in SEQ ID NO 56984
  misc_feature (1)..(1393): Ortholog of  Ceres SEQ ID NO 13597237 as cited in SEQ ID NO 64136
  misc_feature (1)..(1393): Ortholog of  Ceres SEQ ID NO 13598601 as cited in SEQ ID NO 69129
aagggtggccagctagccgaagaaacacccagacgaagcggccgtttttggcatctcgtatgtgcaacttcgctggaaccctcctcgactgattttaccgcacagcagaaaaggagataaaacacgacaaaaattgaaggaaaacgcattcacatcttctcttcgtccgccgccgccgcctctcttcattggtagcaccttaatccgaccccagtccagcccgccgccatggaggcgctgacggccacggacaaatgcttctccccggccagggcgatgttcccgatgccgattgtgaggccacctgcatcaccagaccatgccagtcagtatctggaggacttgttgcaggagcaacagaagctcgggccattcgtgcaggtgctcccaatctgcggcaggctgttgaatcaagagataatgagaacatcaaacctgctttctaactttggagttagaggaaatgagaggttgccaccaattgcaagtccgaaccacatgcatccattgccccggggacctgatttctgtggaaacggtttcggtccatggaatgagatgcatcctgagagaagtggttttcctaggggagccatgggttggcaaggtgctgtacagaaccattcctcctacattgtcaagaagatcgtgcgattggaagttccaacagatgcttaccccaattttaacttcattggccgtttgcttgggccgaggggacactcactaaagagaatcgaagctactacaggttgccgtgttttcatcagagggaaaggctccataaaagatcctgtgaaagaggaacagctcaagggaagacctggctatgaacacttggatgatccaacacatatcttgattgaggccgaattacctgctgatgttattgatgctagactggcacaagcacaggagatactagaggagtcgctgaaaccagtggatgagtcacaagacaacatcaagagacaacaacttcgagaacttgccatgttgaactctgtatatcgagagggtagcctgcatcagaacggcagcgcctctccgttcagcaatggggcacaaaacagtgacagggaggagattcagctctgatccttcccggaaactctcgcgttagtcctgctctcatgacagacatagcttctctgatgctcaagctcccgtgatggtattggaattcatgccattgctaactggtgaattttgatatcccttgtgacattgacctgcggatgagaagactagcgagaaaaaactcccccatggctgtgtacttaggatatttcgtttattgcttgcgcccactattagtgcagagatgtctaagttctagtattttgagctctttgattatctataaagttatgactccgcaaaatatttgatt

SEQ ID NO: 13223 - protein, 289 aa, Zea mays subsp. mays
  peptide (1)..(289): Ceres Seq. ID no. 12351859
MEALTATDKCFSPARAMFPMPIVRPPASPDHASQYLEDLLQEQQKLGPFVQVLPICGRLLNQEIMRTSNLLSNFGVRGNERLPPIASPNHMHPLPRGPDFCGNGFGPWNEMHPERSGFPRGAMGWQGAVQNHSSYIVKKIVRLEVPTDAYPNFNFIGRLLGPRGHSLKRIEATTGCRVFIRGKGSIKDPVKEEQLKGRPGYEHLDDPTHILIEAELPADVIDARLAQAQEILEESLKPVDESQDNIKRQQLRELAMLNSVYREGSLHQNGSASPFSNGAQNSDREEIQL

SEQ ID NO: 13224 - protein, 273 aa, Zea mays subsp. mays
  peptide (1)..(273): Ceres Seq. ID no. 12351860
MFPMPIVRPPASPDHASQYLEDLLQEQQKLGPFVQVLPICGRLLNQEIMRTSNLLSNFGVRGNERLPPIASPNHMHPLPRGPDFCGNGFGPWNEMHPERSGFPRGAMGWQGAVQNHSSYIVKKIVRLEVPTDAYPNFNFIGRLLGPRGHSLKRIEATTGCRVFIRGKGSIKDPVKEEQLKGRPGYEHLDDPTHILIEAELPADVIDARLAQAQEILEESLKPVDESQDNIKRQQLRELAMLNSVYREGSLHQNGSASPFSNGAQNSDREEIQL

SEQ ID NO: 13225 - protein, 270 aa, Zea mays subsp. mays
  peptide (1)..(270): Ceres Seq. ID no. 12351861
MPIVRPPASPDHASQYLEDLLQEQQKLGPFVQVLPICGRLLNQEIMRTSNLLSNFGVRGNERLPPIASPNHMHPLPRGPDFCGNGFGPWNEMHPERSGFPRGAMGWQGAVQNHSSYIVKKIVRLEVPTDAYPNFNFIGRLLGPRGHSLKRIEATTGCRVFIRGKGSIKDPVKEEQLKGRPGYEHLDDPTHILIEAELPADVIDARLAQAQEILEESLKPVDESQDNIKRQQLRELAMLNSVYREGSLHQNGSASPFSNGAQNSDREEIQL

SEQ ID NO: 13226 - DNA, 1475 bp, Zea mays subsp. mays
  misc_feature (1)..(1475): Ceres Seq. ID no. 12352669
  misc_feature (1)..(1475): Ortholog of  Ceres SEQ ID NO 12608620 as cited in SEQ ID NO 60192
  misc_feature (1)..(1475): Ortholog of  Ceres SEQ ID NO 13662898 as cited in SEQ ID NO 66199
  misc_feature (1)..(1475): Ortholog of  Ceres SEQ ID NO 14313358 as cited in SEQ ID NO 67347
  misc_feature (1)..(1475): Ortholog of  Ceres SEQ ID NO 13654314 as cited in SEQ ID NO 67914
cccaagaaggcagctgctagctgagagcctccagctcaggtagtgagcaagctcctctctgccctggcctcttcttcgttcattcttgtccactcgaggactgcccgtttgacgactgctcgatcagtgtgctagctagctagagcaagagaagggctgtaagcgaggagatcgatcgagatggctttcctcaacatggagcagcagacctgggccttcacctttggtatcctaggtaacatagtctcactgatggtgtttctttcgccgctgccgacgttctaccgcgtgtaccgcaacaagtcgacggaggggttccagtcgacgccgtacgtggtgaccctcttcagctgcatgctgtggatcttgtacgccctgctcaagcccggcgccgagctgctggtcaccatcaacggcgtgggctgcgtcgtcgagaccgtgtacctggccatgtacctggtgtacgcgcccaaggccgcccgggtgctggcggccaagatgctgctggggctcaacgtcgccgtcttcggcctcgtcgcgctcgtcaccatgcttctctccgacgccggcctccgcgtgcacgtgctcggctggatctgcgtcagcgtctcgctcagcgtcttcgccgcgccgctcagcataatgcggcaggtgatccggaccaagagcgtggagttcatgcccatctcgctctccttcttcctggtgctcagcgcggtggtctggttcgcgtacggcgcgctgaagaaggacgtgttcgtggcgttccccaacgtgctgggcttcgtcttcggcctcgcacagatggcgctgtacatggcgtacagcaggaacaggaagcccgcggcggcgctggtgatactaccggagcagtccaaggaggaggcggccgagggcaaggccagctgcggcggcgccgaggtgcaccccatcgacatcgcggaggtccacgacctgcaggccgtggtcgtcgacgtagacgtggagcctgtcacctacgccgctgcgtccggtatggtcgacggcagtgtcggcaggcctagggcgccggagcagctggtgatcaagcccgacatggtcaccgtcattgcggcggaggcgtaggttggttaagtagtagcagagtgagtcgatatcgatctgcctacctacagtacagccgcggcggccagatgtactggcagcgttcatgcaggctcgttgacttgaccggtcgagatggttggagtagccgggccgagtagcccagacgtactggcctgtgtcatgaaccggcaagctgataacgcgagcgagagggacgttggttcatcacattcagaagacggcaagctgatagtttctgtctctaggtctgtgtgtgtgtgtctgtaatcgactccatcagcttgccgcctttcctgtcctattctgattgttttcatccattgatgccgtcgtcgcagtaataaacttggaacgaacgattccacact

SEQ ID NO: 13227 - protein, 307 aa, Zea mays subsp. mays
  peptide (1)..(307): Ceres Seq. ID no. 12352670
MAFLNMEQQTWAFTFGILGNIVSLMVFLSPLPTFYRVYRNKSTEGFQSTPYVVTLFSCMLWILYALLKPGAELLVTINGVGCVVETVYLAMYLVYAPKAARVLAAKMLLGLNVAVFGLVALVTMLLSDAGLRVHVLGWICVSVSLSVFAAPLSIMRQVIRTKSVEFMPISLSFFLVLSAVVWFAYGALKKDVFVAFPNVLGFVFGLAQMALYMAYSRNRKPAAALVILPEQSKEEAAEGKASCGGAEVHPIDIAEVHDLQAVVVDVDVEPVTYAAASGMVDGSVGRPRAPEQLVIKPDMVTVIAAEA

SEQ ID NO: 13228 - protein, 302 aa, Zea mays subsp. mays
  peptide (1)..(302): Ceres Seq. ID no. 12352671
MEQQTWAFTFGILGNIVSLMVFLSPLPTFYRVYRNKSTEGFQSTPYVVTLFSCMLWILYALLKPGAELLVTINGVGCVVETVYLAMYLVYAPKAARVLAAKMLLGLNVAVFGLVALVTMLLSDAGLRVHVLGWICVSVSLSVFAAPLSIMRQVIRTKSVEFMPISLSFFLVLSAVVWFAYGALKKDVFVAFPNVLGFVFGLAQMALYMAYSRNRKPAAALVILPEQSKEEAAEGKASCGGAEVHPIDIAEVHDLQAVVVDVDVEPVTYAAASGMVDGSVGRPRAPEQLVIKPDMVTVIAAEA

SEQ ID NO: 13229 - protein, 283 aa, Zea mays subsp. mays
  peptide (1)..(283): Ceres Seq. ID no. 12352672
MVFLSPLPTFYRVYRNKSTEGFQSTPYVVTLFSCMLWILYALLKPGAELLVTINGVGCVVETVYLAMYLVYAPKAARVLAAKMLLGLNVAVFGLVALVTMLLSDAGLRVHVLGWICVSVSLSVFAAPLSIMRQVIRTKSVEFMPISLSFFLVLSAVVWFAYGALKKDVFVAFPNVLGFVFGLAQMALYMAYSRNRKPAAALVILPEQSKEEAAEGKASCGGAEVHPIDIAEVHDLQAVVVDVDVEPVTYAAASGMVDGSVGRPRAPEQLVIKPDMVTVIAAEA

SEQ ID NO: 13230 - DNA, 1415 bp, Zea mays subsp. mays
  misc_feature (1)..(1415): Ceres Seq. ID no. 12358173
  misc_feature (1)..(1415): Ortholog of  Ceres SEQ ID NO 14310443 as cited in SEQ ID NO 54695
  misc_feature (1)..(1415): Ortholog of  Ceres SEQ ID NO 13596354 as cited in SEQ ID NO 68027
acggccgaccttatgtgacagttcgggcaccgacgtccgtctccgtacttccggctgtgtgcgaaactgcgaacgcgtgatatctccgcgtacgcaaacgcgacgcgaaggtcagcacggacaactctacccctccgcctcgaccctgaccccccacctcgtcggcgatgagttcctcttccaacggcgggaagaagccggctcccggcggcggccgcagggggtcccgccatccgcacgctcgctgacataagccgtgggcccaccggcttcccaggtgccggaggcggcgacagcggcagcgacgacgacgagccacaggaatactacaccggtggcgagaagagtggaatgcttgttcaagatccaacaagaagaaatgatgtggatgcgatatttgaacaagccagacaagcgggtatcaaaggaatgcctcctcctcttgatggcgagtcttccagctctaggagctttacagggactggccgacttcttacaggggagacaatatcatctgctgcacctcaggaaccagtaccaattcgagtacgccacaatatacatttgtggaacaatggctttagtgtggatgatggtccactgagatactacgacgatcctgaaaatgcagagttccttgagagccttaagatgtcaaagtgccccaaggagctggtgcctactgatggagaacatgttgatgcgtctgttattagaaggatggaagattacagggaacctgtaaggcctcgatcagctttccagggtgttggaagaacccttggtggtggaccttccccagatgagagcgcaacagctgctcctgcatcagcggcccctgctgcttcgaggtccgctggcgttgtcgtggatgactcccagccatttacgtccatacagctgaggctggctgacggcactcgcatgggtcgcccggttcaacatgcaccacaccgtgggagacatcaggtcctttatagacgcagctcggcctggagctgcaaggccttatcagctgcagacgggtttccctcccaagcagctggctgacccaacgcagaccgtggagcaagctgggcttgcaaactctgttatcatgcagaagatgtaaatgcttcggctggcaacctggggagctcggatgcatcgtactgcatcttctgaaaaccgtaatattatggttgatcatgttatcagatactgctctggtgcatcattctcagtcatggttacttacagtagcatctggtgcctcgttgggagcacaggagtttataattcatctaggaactgaagtatgctttcttgcatcactattgcatcacttttttcatttttaatattggtgttatgatatttcgtgtttccatggccgcttccttgcaagttgaagcgcgactcgcaagtcgcagcat

SEQ ID NO: 13231 - protein, 232 aa, Zea mays subsp. mays
  peptide (1)..(232): Ceres Seq. ID no. 12358174
MLVQDPTRRNDVDAIFEQARQAGIKGMPPPLDGESSSSRSFTGTGRLLTGETISSAAPQEPVPIRVRHNIHLWNNGFSVDDGPLRYYDDPENAEFLESLKMSKCPKELVPTDGEHVDASVIRRMEDYREPVRPRSAFQGVGRTLGGGPSPDESATAAPASAAPAASRSAGVVVDDSQPFTSIQLRLADGTRMGRPVQHAPHRGRHQVLYRRSSAWSCKALSAADGFPSQAAG

SEQ ID NO: 13232 - protein, 206 aa, Zea mays subsp. mays
  peptide (1)..(206): Ceres Seq. ID no. 12358175
MPPPLDGESSSSRSFTGTGRLLTGETISSAAPQEPVPIRVRHNIHLWNNGFSVDDGPLRYYDDPENAEFLESLKMSKCPKELVPTDGEHVDASVIRRMEDYREPVRPRSAFQGVGRTLGGGPSPDESATAAPASAAPAASRSAGVVVDDSQPFTSIQLRLADGTRMGRPVQHAPHRGRHQVLYRRSSAWSCKALSAADGFPSQAAG

SEQ ID NO: 13233 - protein, 132 aa, Zea mays subsp. mays
  peptide (1)..(132): Ceres Seq. ID no. 12358176
MSKCPKELVPTDGEHVDASVIRRMEDYREPVRPRSAFQGVGRTLGGGPSPDESATAAPASAAPAASRSAGVVVDDSQPFTSIQLRLADGTRMGRPVQHAPHRGRHQVLYRRSSAWSCKALSAADGFPSQAAG

SEQ ID NO: 13234 - DNA, 760 bp, Zea mays subsp. mays
  misc_feature (1)..(760): Ceres Seq. ID no. 12413713
  misc_feature (1)..(760): Ortholog of  Ceres SEQ ID NO 15172660 as cited in SEQ ID NO 68708
gcacgagaccattacctagaacatcctaatcgaaaagccactgcaaccccggaacagagcgaggcgacgccgaggcacctcatctccgttgatattttcgactatttaggcgaagggaaatggcgaccgttccaggggatctgatctggcagattgtgaggaagaacaactccttcctggtgaagcagtttggcaacggcaatgccaaggtgcagttcaccaaggagcccaacaacctctacaatttacactcctacaagtactctggcttagcaaacaagaaaactgtaacgatccagccagctgctggaaaggactcggctgtggtcctctctactaccaagaccaagaagcagaacacacccgcgaagctcagccacaagtctgtgatgcgcaaggagttccgcaagatggccaaggctgtgaaaaaccaggttggcgacaactattacaggcctgatctgaccaagtcggcccttggtaggctgagctctgtgtaccgcagcctccaggttgccaagtctggtgtcaagaagaagaacaggcagcctacgcactaagcctgtgttctgtcgttggtgcccatagtctcagcttatatttatccaatgtctccaacagttttgagacttgttagaactagagcaaatcgtgttaagatgttgccgtttgtcattctatagcaagaattccatgacaaagattgcttggcacttgattgctgctttgtttgcaagctggctggccgggattacccctg

SEQ ID NO: 13235 - protein, 146 aa, Zea mays subsp. mays
  peptide (1)..(146): Ceres Seq. ID no. 12413714
MATVPGDLIWQIVRKNNSFLVKQFGNGNAKVQFTKEPNNLYNLHSYKYSGLANKKTVTIQPAAGKDSAVVLSTTKTKKQNTPAKLSHKSVMRKEFRKMAKAVKNQVGDNYYRPDLTKSALGRLSSVYRSLQVAKSGVKKKNRQPTH

SEQ ID NO: 13236 - DNA, 1675 bp, Zea mays subsp. mays; identical to SEQ ID NO: 8539
  misc_feature (1)..(1675): Ceres Seq. ID no. 12545410
  misc_feature (1)..(1675): Ortholog of  Ceres SEQ ID NO 15176440 as cited in SEQ ID NO 53697
  misc_feature (1)..(1675): Ortholog of  Ceres SEQ ID NO 14314717 as cited in SEQ ID NO 54224
  misc_feature (1)..(1675): Ortholog of  Ceres SEQ ID NO 14313429 as cited in SEQ ID NO 55662

SEQ ID NO: 13237 - protein, 425 aa, Zea mays subsp. mays; identical to SEQ ID NO: 8540
  peptide (1)..(425): Ceres Seq. ID no. 12545411

SEQ ID NO: 13238 - protein, 356 aa, Zea mays subsp. mays; identical to SEQ ID NO: 8541
  peptide (1)..(356): Ceres Seq. ID no. 12545412

SEQ ID NO: 13239 - protein, 310 aa, Zea mays subsp. mays; identical to SEQ ID NO: 8542
  peptide (1)..(310): Ceres Seq. ID no. 12545413

SEQ ID NO: 13240 - DNA, 1077 bp, Zea mays subsp. mays
  misc_feature (1)..(1077): Ceres Seq. ID no. 13495185
  misc_feature (1)..(1077): Ortholog of  Ceres SEQ ID NO 14304536 as cited in SEQ ID NO 53436
  misc_feature (1)..(1077): Ortholog of  Ceres SEQ ID NO 14315438 as cited in SEQ ID NO 57205
cccccactgtcgccgctcctcgtcttccactctctccactttgctgcttcttctcccttattaatgctcgtgggctcctatgatccgccctccgccgcgggtttcttgatccatccccggcccaaggaagcggaccccggcgaacactcctgacagattcgcccgtccgccgctccctcgattcggtcctccccgtcagcggcaggtgtttaggacctctgcagcatagcatctggtccgtccctggagatgtccggcgtacaggagcagttcgagatcaagttccggctgccggacggcaccgacatcggacccaggcggttcccgccggcgtccaccgtcgccacgctcaaggagaccatcatcgcccagtggcccaaagataaggaaaaaggtcctaggactgtgaatgatcttaagcttattaatgctgggaagatactggagaacaacaaaaccctatcagaatgcaaaagcccgatttgcgacttctctgcgatgacaacaatgcatgtcgtcatccgcgcaccgacttcaagcaaacagtctgataaaagagcagaaaagaaagcgaaaaatttcaggtgcggttgtgccattatgtgacagcattgtgaatagtagcagagagaacgtggccatttcagttttctccctttttttttcctgctctcgctggagtgttgtattatgttcgaggcgctttctcctttcattttgttttgaagtaccgcgtgcaagcttcaacagctgtcaagtgccctttaatcgtgagtgtgcatcaagcacagaattagaaggcggttggctgctaattacccttaatcttgagtttgtcaagcacacaatttgaaggcagtcattagcgtcgaaactacgatgtccaccctatccaatcttccatggtttcacgcttctcttctatatttatgctaccctgggtgacaaatgtttaatgtatgccttccatgctagatgaactttttggaacgccattctaactcatcaatttctattctgtaaaactaaaaccagttgtaatctgccatagatcagtatgcttgctatatgggagtc

SEQ ID NO: 13241 - protein, 118 aa, Zea mays subsp. mays
  peptide (1)..(118): Ceres Seq. ID no. 13495186
MSGVQEQFEIKFRLPDGTDIGPRRFPPASTVATLKETIIAQWPKDKEKGPRTVNDLKLINAGKILENNKTLSECKSPICDFSAMTTMHVVIRAPTSSKQSDKRAEKKAKNFRCGCAIM

SEQ ID NO: 13242 - protein, 113 aa, Zea mays subsp. mays
  peptide (1)..(113): Ceres Seq. ID no. 13495187
MSSSAHRLQANSLIKEQKRKRKISGAVVPLCDSIVNSSRENVAISVFSLFFSCSRWSVVLCSRRFLLSFCFEVPRASFNSCQVPFNRECASSTELEGGWLLITLNLEFVKHTI

SEQ ID NO: 13243 - DNA, 1406 bp, Zea mays subsp. mays
  misc_feature (1)..(1406): Ceres Seq. ID no. 12352673
  misc_feature (1)..(1406): Ortholog of  Ceres SEQ ID NO 14314312 as cited in SEQ ID NO 57283
aaacaccgccgcccccacatctatccacccgcccgcccgtccgtccgttcgttcgtctccacgcgcaaacgagagagagaaggctaggtcgtcgtcgtcgtgaggcggagagatctgggaggaggaggagcgatggacgggaagctacccccgccgaacccgaacctgccgtaccgggaggactgctggagcgagggcgagacggcggcgctcgtcgacgcctggggctcgcgctacctcgacctcaaccgcgggagcctccgccagccgcagtggcgggaggtcgccgacgccgtcaactcccgcccgggggcctccgcgcgcggccgcccgccgcgcaccgacatccagtgcaagaaccgcgtcgacacgctcaagaagaagtacaaggccgagcgcgcgcgcggcgggccgtcgccgtggtccttctacggccagctcgacatcctcgtcgggcccacgctcaacggcaccaagaaaccgtccccgccgcgcgccgcgctgcccgtgttccggaggcgccagacgccgccgcgctccccgtcgccgcaatcgccgccgccgcttcccgtggccctcccgctgcacaattaccgccgtggctccgacctcccttccgcaaacttcatccataagggccgccgcggcggccgccgccgccgccgccgccgcggagtccgactcggaagatggctacaacaacaacgagtacgacgatgacgaaggctctcagcagtcgccgtcacgttctgtatcttctcgctccggtggtgctcctgctgttggcaccaagaggaagatgcgcagcgggagcggtggattcggggagctagcgagggcaatcgagaccttcgcggatatgtacgagcgcatggaagcggccaagcagcgacacgcggaggagatggagaggcagcgaatcaagttcctcaaggatctggagctgaagcggatgcggtcttttgtggacatgcagctgcagctttcgagggcaaagcacgccaggaagggtgatgcttcctcggagatgctcatgtctctcgctgcactgcccttcctcagcagctctgcttatctttaagggcatgttcggttagggatggattcttccatcccctcaatccacccctatccgaacaagcttaaattggaagaatttggtaaatgaatattttgaccttcaattaggaatttaggatacagtgagttggttgctgtgctagacttgttcgtggattgtttgtgtttcctaagatactgtaatttttcatacgaaccatggaggtattgcaggtcttcaaaatttaaatgtaccttgcaatgcattatgcccaagttttttcttagatggaatgaaatttactggtttacaacacttactgtcagtgtaatacgaatctcatctc

SEQ ID NO: 13244 - protein, 210 aa, Zea mays subsp. mays
  peptide (1)..(210): Ceres Seq. ID no. 12352674
TPPPPHLSTRPPVRPFVRLHAQTRERRLGRRRREAERSGRRRSDGREATPAEPEPAVPGGLLERGRDGGARRRLGLALPRPQPREPPPAAVAGGRRRRQLPPGGLRARPPAAHRHPVQEPRRHAQEEVQGRARARRAVAVVLLRPARHPRRAHAQRHQETVPAARRAARVPEAPDAAALPVAAIAAAASRGPPAAQLPPWLRPPFRKLHP

SEQ ID NO: 13245 - protein, 195 aa, Zea mays subsp. mays
  peptide (1)..(195): Ceres Seq. ID no. 12352675
MDGKLPPPNPNLPYREDCWSEGETAALVDAWGSRYLDLNRGSLRQPQWREVADAVNSRPGASARGRPPRTDIQCKNRVDTLKKKYKAERARGGPSPWSFYGQLDILVGPTLNGTKKPSPPRAALPVFRRRQTPPRSPSPQSPPPLPVALPLHNYRRGSDLPSANFIHKGRRGGRRRRRRRGVRLGRWLQQQRVRR

SEQ ID NO: 13246 - DNA, 1100 bp, Zea mays subsp. mays
  misc_feature (1)..(1100): Ceres Seq. ID no. 13498885
  misc_feature (1)..(1100): Ortholog of  Ceres SEQ ID NO 13597839 as cited in SEQ ID NO 64260
caggacacggtcgccacacgacgactcccacgcgcagccaccgcacggccgtgttgccaccaaaccgcgtggcggtgttacgctcttcgcccagatcaaaatcgaatcgatcccccaacccgatcgcctcgtcgtcaaaaaatccccattcgttccccttctcgcctccacgaaccttcacaaattgccctctcagatcttctcctaatctcactcaagccctagccaaatcccagccctagcgacaccaaccagctcgccagcgaccatggggaacccggagaagctgatgaatcagatcttcgacctcaagttcacctccaagtcgctgcagcggcaggcgcgcaagtgcgagaaggaggagaaggagcagaagctcaaggtcaagaaggcgatcgagaagggcaacatggacggcgcccgcatctacgccgagaacgccatccgcaagcgcaccgagcacatgaactacctccgcctcgcctctcgcctcgacgccgtcgtggcccgcctcgacacgcaggccaagatgcaggtcatcggcaagtccatgcagtccatcgtcaagtcgctcgactccgcgctcgccaccgggaacctccagaagatgtccgagaccatggacaatttcgagcgccagttcgtcaacatggaggtccaggccgagttcatggagggcgccatggccggctccacctccctctccacgcccgagaccgaggtcaacagcctcatgcagcaggtcgcggacgactacgggctcgaggtctccgtcggtctgccgcaggcagccgcccacgccatccctgccgccaaggataaggagaaagtcgacgaggatgacctttctcgccgcctcgccgagcttaaggcccgcggctgagagggtgtttcaggctttatcagatgcgattcatgcttatgctgttgagccgcaatgacccattgtgctgtggactgctactcatgtttggtagattcgtaaatactactgttatatgcttgaagccgtgttggcattgccatgtgggtctgtgtgactcgatggaaactttgctgtcttattgtactatcaaatccaataatttgcgcgattgagg

SEQ ID NO: 13247 - protein, 204 aa, Zea mays subsp. mays
  peptide (1)..(204): Ceres Seq. ID no. 13498886
MGNPEKLMNQIFDLKFTSKSLQRQARKCEKEEKEQKLKVKKAIEKGNMDGARIYAENAIRKRTEHMNYLRLASRLDAVVARLDTQAKMQVIGKSMQSIVKSLDSALATGNLQKMSETMDNFERQFVNMEVQAEFMEGAMAGSTSLSTPETEVNSLMQQVADDYGLEVSVGLPQAAAHAIPAAKDKEKVDEDDLSRRLAELKARG

SEQ ID NO: 13248 - protein, 197 aa, Zea mays subsp. mays
  peptide (1)..(197): Ceres Seq. ID no. 13498887
MNQIFDLKFTSKSLQRQARKCEKEEKEQKLKVKKAIEKGNMDGARIYAENAIRKRTEHMNYLRLASRLDAVVARLDTQAKMQVIGKSMQSIVKSLDSALATGNLQKMSETMDNFERQFVNMEVQAEFMEGAMAGSTSLSTPETEVNSLMQQVADDYGLEVSVGLPQAAAHAIPAAKDKEKVDEDDLSRRLAELKARG

SEQ ID NO: 13249 - protein, 157 aa, Zea mays subsp. mays
  peptide (1)..(157): Ceres Seq. ID no. 13498888
MDGARIYAENAIRKRTEHMNYLRLASRLDAVVARLDTQAKMQVIGKSMQSIVKSLDSALATGNLQKMSETMDNFERQFVNMEVQAEFMEGAMAGSTSLSTPETEVNSLMQQVADDYGLEVSVGLPQAAAHAIPAAKDKEKVDEDDLSRRLAELKARG

SEQ ID NO: 13250 - DNA, 678 bp, Zea mays subsp. mays
  misc_feature (1)..(678): Ceres Seq. ID no. 12413709
  misc_feature (1)..(678): Ortholog of  Ceres SEQ ID NO 13661521 as cited in SEQ ID NO 61309
gtaagaaccactttcacctgaactcctgaagcaaaagcaatggccatgagagcgcttccgctgaccccttccaggagctcctcgtttggagctcaccaaaccaggccgagcggcggcggccccagatcagtgagagcttatgcgaagggagacgaggagggcgacaagcagtccctcttcggaagcatcaccgaggcgctggacttctcgcaggtccggtcggagaaggacgccgagctgctgtacgaggccagggagtccaccagaggtggagggaggatgacgagggagcagtacggagcacttaggcggaagattggtggcacctaccaggatttcttcaagtcatatgttgaagtcgacgggcaatacgtggaggagggttgggtcgacaagacctgcaagatctgcaagaaggacacaaggggggagccgaggcaggttgacaagctaggaagatacgctcacgttgcgtgcctggagaaccccaaaccgacgaactttttcgccaaaatcttcgccagatgaactatgctgcgtccgtcgaaagcgttgtctcgctcgctcgtggttagagagtacaatatataggtagtgttgttgtggcttcaaaggggacaagattgtgcacaattttccaaatggattggtatgtactgatgagcatcagcgcgttcc

SEQ ID NO: 13251 - protein, 162 aa, Zea mays subsp. mays
  peptide (1)..(162): Ceres Seq. ID no. 12413710
MAMRALPLTPSRSSSFGAHQTRPSGGGPRSVRAYAKGDEEGDKQSLFGSITEALDFSQVRSEKDAELLYEARESTRGGGRMTREQYGALRRKIGGTYQDFFKSYVEVDGQYVEEGWVDKTCKICKKDTRGEPRQVDKLGRYAHVACLENPKPTNFFAKIFAR

SEQ ID NO: 13252 - protein, 160 aa, Zea mays subsp. mays
  peptide (1)..(160): Ceres Seq. ID no. 12413711
MRALPLTPSRSSSFGAHQTRPSGGGPRSVRAYAKGDEEGDKQSLFGSITEALDFSQVRSEKDAELLYEARESTRGGGRMTREQYGALRRKIGGTYQDFFKSYVEVDGQYVEEGWVDKTCKICKKDTRGEPRQVDKLGRYAHVACLENPKPTNFFAKIFAR

SEQ ID NO: 13253 - protein, 82 aa, Zea mays subsp. mays
  peptide (1)..(82): Ceres Seq. ID no. 12413712
MTREQYGALRRKIGGTYQDFFKSYVEVDGQYVEEGWVDKTCKICKKDTRGEPRQVDKLGRYAHVACLENPKPTNFFAKIFAR

SEQ ID NO: 13254 - DNA, 1806 bp, Zea mays subsp. mays
  misc_feature (1)..(1806): Ceres Seq. ID no. 12411349
  misc_feature (1)..(1806): Ortholog of  Ceres SEQ ID NO 15177414 as cited in SEQ ID NO 57242
  misc_feature (1)..(1806): Ortholog of  Ceres SEQ ID NO 13594151 as cited in SEQ ID NO 58886
cttcctctctgttctctctctctctctcttcctccagtagtccagtcctcctccttcgaatcccaaggtggcggccagagagtagagatagagagagagtgggactatagagacgttaagaacatcctaatcgaaaaccgttgctgcttgttattattaacgccgccgccgcctcctgcattcgtatggtccgcgtcgtcacggggctcctgcgttcgtaaggcaccgccgcagcgtctcggctggatcaacaggccggccgatccgtcttctccccctcctcctgcgggtcggcgtttggggatcatggcggcgcgggcggctgacgagaacaggagaccggcggcagggaagcccgcgccaggcgtccgagacatggcgagccggcgcgcgctcacggacatcaagaacctcgtcggggctgccccgtacccctgcgccatcgccaagaagcccatgctgcagaagagcagaagggacgaaaagcagccagcgttggcaagcagccggcccatgacaaggaaattcgccgcctccttggcgagcaagggccaacctgaatgtcagccgatcgtagctgatccagaacccgaattttgtcaacagaaggaatcagtaggcgatggcaccgttgatattgacgtggaactctacgagctggtcgacgatagtgatagtgacatcgacatgggtgcgacagagaacaaggacattatgaacgaagatgaattgctcatggatattgacagtgcagactcggggaacccgcttgctgcaacagaatatgttgaagagctttacaccttttacagagaaaatgaggctaagagttgtgtaaggccagattacatgtccagccaacaagacataaactcaaagatgagagcaattctgattgactggctgattgaggttcactacaagtttgaactgatggatgagacgctctttcttatggtaaacataatagatagattcttggaaaaggaagtggttccaaggaagaagctacaactggttggagtcacagctatgctgctcgcttgtaaatatgaggaggtatctgttccagttgttgaggaccttgtgctgatatctgaccgtgcctacacaaaagggcaaattctagaaatggaaaagttgattctgaacacgctgcagttcaacatgtctgttccaacaccttatgtcttcatgaagaggtttctgaaagctgcagatgcagataaacagcttgagctagcgtcatttttcatgctggagctctgcttggtagaataccaaatgctggattatcggccttcgcatctggctgctgctgcggtttatactgcgcagtgtgctatcaatcgttgccagcactggacaaaggtctgcgagtctcatagcagatacactagcgaccaactcctggagtgctcgaggatgatggtagattttcaccagaaggctggaaccagtaagctcactggcgtgcacaggaagtacagtacctacaagttcggttgcgtggccaagattttgcctgcgcagttcctgctggagtcgggagggacaccgcctccttcaggtgcaaactagttgaatcgacctattcaactgggtggattttttaaagtttttagaatactccatgaacaagatgcagaaaacatcgtgttgatgttgcccaaaagtgcatcgaatttctttggagagttatgattaacaactttttttttatctatgttgaatgacgagtgacggtcggtcacgttgtgcttgtgcagttatactgcggctaataacaaactgtccagttattct

SEQ ID NO: 13255 - protein, 526 aa, Zea mays subsp. mays
  peptide (1)..(526): Ceres Seq. ID no. 12411350
LPLCSLSLSLPPVVQSSSFESQGGGQRVEIEREWDYRDVKNILIENRCCLLLLTPPPPPAFVWSASSRGSCVRKAPPQRLGWINRPADPSSPPPPAGRRLGIMAARAADENRRPAAGKPAPGVRDMASRRALTDIKNLVGAAPYPCAIAKKPMLQKSRRDEKQPALASSRPMTRKFAASLASKGQPECQPIVADPEPEFCQQKESVGDGTVDIDVELYELVDDSDSDIDMGATENKDIMNEDELLMDIDSADSGNPLAATEYVEELYTFYRENEAKSCVRPDYMSSQQDINSKMRAILIDWLIEVHYKFELMDETLFLMVNIIDRFLEKEVVPRKKLQLVGVTAMLLACKYEEVSVPVVEDLVLISDRAYTKGQILEMEKLILNTLQFNMSVPTPYVFMKRFLKAADADKQLELASFFMLELCLVEYQMLDYRPSHLAAAAVYTAQCAINRCQHWTKVCESHSRYTSDQLLECSRMMVDFHQKAGTSKLTGVHRKYSTYKFGCVAKILPAQFLLESGGTPPPSGAN

SEQ ID NO: 13256 - protein, 424 aa, Zea mays subsp. mays
  peptide (1)..(424): Ceres Seq. ID no. 12411351
MAARAADENRRPAAGKPAPGVRDMASRRALTDIKNLVGAAPYPCAIAKKPMLQKSRRDEKQPALASSRPMTRKFAASLASKGQPECQPIVADPEPEFCQQKESVGDGTVDIDVELYELVDDSDSDIDMGATENKDIMNEDELLMDIDSADSGNPLAATEYVEELYTFYRENEAKSCVRPDYMSSQQDINSKMRAILIDWLIEVHYKFELMDETLFLMVNIIDRFLEKEVVPRKKLQLVGVTAMLLACKYEEVSVPVVEDLVLISDRAYTKGQILEMEKLILNTLQFNMSVPTPYVFMKRFLKAADADKQLELASFFMLELCLVEYQMLDYRPSHLAAAAVYTAQCAINRCQHWTKVCESHSRYTSDQLLECSRMMVDFHQKAGTSKLTGVHRKYSTYKFGCVAKILPAQFLLESGGTPPPSGAN

SEQ ID NO: 13257 - protein, 401 aa, Zea mays subsp. mays
  peptide (1)..(401): Ceres Seq. ID no. 12411352
MASRRALTDIKNLVGAAPYPCAIAKKPMLQKSRRDEKQPALASSRPMTRKFAASLASKGQPECQPIVADPEPEFCQQKESVGDGTVDIDVELYELVDDSDSDIDMGATENKDIMNEDELLMDIDSADSGNPLAATEYVEELYTFYRENEAKSCVRPDYMSSQQDINSKMRAILIDWLIEVHYKFELMDETLFLMVNIIDRFLEKEVVPRKKLQLVGVTAMLLACKYEEVSVPVVEDLVLISDRAYTKGQILEMEKLILNTLQFNMSVPTPYVFMKRFLKAADADKQLELASFFMLELCLVEYQMLDYRPSHLAAAAVYTAQCAINRCQHWTKVCESHSRYTSDQLLECSRMMVDFHQKAGTSKLTGVHRKYSTYKFGCVAKILPAQFLLESGGTPPPSGAN

SEQ ID NO: 13258 - DNA, 1193 bp, Zea mays subsp. mays
  misc_feature (1)..(1193): Ceres Seq. ID no. 12406389
  misc_feature (1)..(1193): Ortholog of  Ceres SEQ ID NO 15170627 as cited in SEQ ID NO 52703
  misc_feature (1)..(1193): Ortholog of  Ceres SEQ ID NO 13597493 as cited in SEQ ID NO 64613
  misc_feature (1)..(1193): Ortholog of  Ceres SEQ ID NO 13596175 as cited in SEQ ID NO 68297
  misc_feature (1)..(1193): Ortholog of  Ceres SEQ ID NO 14301898 as cited in SEQ ID NO 69243
actcggagtcggaggcgccacgcgcgcgtgtataaataactgcgcctcactgctgcggtgcacggtgtccccctccctccccgctgtctgtggctgcaggccacccccatagcccccgagctctgtgtgcgatggactactcgggcaccaaggagtcgcctcctgccggggcttggtggtcgagggagacggtggccgtggtgaccggcgcgaaccgcggcatcggccacgcgctcgccgcccgcctggccgagcacggcctcaccgtggtgctcaccgcgcgggacggcgagcgcggggaggccgccgcggcgccgctcctcgcgcgcgggctcgcagtcgtcttccgcaggctcgacgtctccgannnngcctccgtcgccgagttcgccgcgtggatccgcgacgccctcggcgngcctcgacatcctggtgaacaacgcagccgtgtcgtttaacgagatngacaccaacctccgtggagcacgccgaggctgtcctcaggaccaacttctacggggccaagatgctcaccgaagcgctcctgccgctgttccggcagtcgtcggcgaccagcaggatcctcaacgtcagctcccagcttggccttctcaacaaggtgagcgacccgtcgctgagggcgctgctgctggacgaggacgggctgacggaggcggggatagaggcgatggtgtcgcggttcctggcgcaggtgaaggacgggacgtggggcgggcagggttggcccaaggtgtggacggactactcggtctccaagctggccctgaacgcctactcgcggctgctggcgcggcggctgncnangngccggcgcgcgcgtgagcgtcaactgcttctgccccgggttcacgcgcacgggcatgaccaagggctgggggaagcgcaccgccgaggaggcggccgacgtcgccgcgcggctcgcgctgctggcgcccgccgagctccccacggggaccttcttcaagtggtgcacgccgcagctctactccaagctgtgactgtgactggatagctacgcctaccgtcgtcggcagtgtgtgcgtgcgctccgtgaacgctggagtatatatatatagttcggttcctttagctactctgatcagaagtcagaaacgggagtgtcgatctgccaaggtgctttcggttgaacacagctcgtttgtgacctctcg

SEQ ID NO: 13259 - protein, 168 aa, Zea mays subsp. mays
  peptide (1)..(168): Ceres Seq. ID no. 12406390
  misc_feature (99)..(99): Xaa is any aa, unknown or other
  misc_feature (100)..(100): Xaa is any aa, unknown or other
  misc_feature (101)..(101): Xaa is any aa, unknown or other
MLTEALLPLFRQSSATSRILNVSSQLGLLNKVSDPSLRALLLDEDGLTEAGIEAMVSRFLAQVKDGTWGGQGWPKVWTDYSVSKLALNAYSRLLARRLXXXRRARERQLLLPRVHAHGHDQGLGEAHRRGGGRRRRAARAAGARRAPHGDLLQVVHAAALLQAVTVTG

SEQ ID NO: 13260 - protein, 114 aa, Zea mays subsp. mays
  peptide (1)..(114): Ceres Seq. ID no. 12406391
  misc_feature (45)..(45): Xaa is any aa, unknown or other
  misc_feature (46)..(46): Xaa is any aa, unknown or other
  misc_feature (47)..(47): Xaa is any aa, unknown or other
MVSRFLAQVKDGTWGGQGWPKVWTDYSVSKLALNAYSRLLARRLXXXRRARERQLLLPRVHAHGHDQGLGEAHRRGGGRRRRAARAAGARRAPHGDLLQVVHAAALLQAVTVTG

SEQ ID NO: 13261 - protein, 108 aa, Zea mays subsp. mays
  peptide (1)..(108): Ceres Seq. ID no. 12406392
  misc_feature (79)..(79): Xaa is any aa, unknown or other
  misc_feature (80)..(80): Xaa is any aa, unknown or other
  misc_feature (96)..(96): Xaa is any aa, unknown or other
MDYSGTKESPPAGAWWSRETVAVVTGANRGIGHALAARLAEHGLTVVLTARDGERGEAAAAPLLARGLAVVFRRLDVSXXASVAEFAAWIRDALGXPRHPGEQRSRVV

SEQ ID NO: 13262 - DNA, 1988 bp, Zea mays subsp. mays
  misc_feature (1)..(1988): Ceres Seq. ID no. 12411341
  misc_feature (1)..(1988): Ortholog of  Ceres SEQ ID NO 14307257 as cited in SEQ ID NO 54628
aaactagtgtgtgaaatatctcctacaatatatatccggctctctctgtgtgcgtgctctaactgcagcggagcctcacagttgttcgtgtgctgtgtatttgtcactggtggtgctgtgcagaccaagctactgcgggagggagaagggtgtgtgccggcccgccgccaagcactgctacccggccggcggccatggaggtgagctccgtggagttcggtcatcacgcggcggccgcctcaaagtgctttgacgacgacggtcgcctcaagcgcacagggacgatgtggacggcgagcgcgcacattatcacggccgtgatagggtccggggtgctgtcgctcgcgtgggccatcgcgcagctcggctgggtggcaggccccaccgtcatgctgctcttctccttcgtcacctactacacatcggccctactcgccgactgctaccgctccggcgacgcctgcaccggcaagcgcaactacacgtacatggacgcggttaacgccaatctcagtggcgtcaaggtctggttctgcggcttcctgcagtacgccaacatcgtcggagtcgccataggctacaccattgccgcctctattagcatgctggcgatccagagggcgaactgcttccacgtggaggggcacggggacccctgcaacatctccagcacgccctacatgatcatcttcggcgtcgtgcagattttcttctcgcagatcccggacttcgaccagatatcgtggctctccatcctcgccgccgtcatgtccttcacctactccaccatcggcctgggcctgggcatcgcgcaggtggtgtccaacaagggcgtgcagggcagcctgacggggatcagcgtcggcgcggtcaccccggtcgacaagatgtggcgcagcctgcaggcgttcggcgacatcgccttcgcctactcctactccctcatcctcatcgagatccaggacaccatccgcgcgccgccgccgtccgagtccaaggtcatgcggcgcgccaccgtcgtcagcgtggccgtcaccacgttcttctacatgctgtgcgggtgcatggggtacgccgcgttcggggacaacgcccccgggaacctcctcacgggcttcggcttctacgagcccttctggctcctcgacgtcgccaacgccgccatcgccgtgcacctcgtcggcgcctaccaggtctactgccagcccctgttcgccttcgtcgagaagtgggcgcgccagaggtggcccaagtcccgctacatcacgggcgaggtcgacgtcccgctcccgctcgggaccgccggcggccggtgctacaagctcagcctgttccggctgacgtggcggacggcgttcgtggtggccacgacggtggtgtccatgctgctgcccttcttcaacgacgtggtcgggctcctgggcgcgctggggttctggccgctcaccgtctacttccccgtggagatgtacatcgtgcagaagaaggtgcccaggtggagcacgcggtgggtgtgcctgcagctgctcagcgtcgcctgcctcgtcatcaccgtcgcctccgccgcaggctccgttgccgggatcgtctctgacctcaaagtgtacaaaccgttcgtcaccacctcctgatggaccggcctagcttccgtgcagttcaaaacacacatacgcacgaacagatcattaattggcgcctagtatatatgtgcagtctttaattaaattaactaggcattaatcgatcgatcaccactacgcgtcgttctagtgatgcgcgtagcttgcatcaccgctcgctgatttaatttccattgtttttctttgatgatctggttagccgaaatggctagtgaattaagagaaaacaaatagtagcagtactgtgtgagtaatcccaagtcaaatacgttattgaagttgtcggcggtacaaaacgcttgtaaaatgtttgtgtttcaattaatcaagaagaattgtacgtgtttc

SEQ ID NO: 13263 - protein, 478 aa, Zea mays subsp. mays
  peptide (1)..(478): Ceres Seq. ID no. 12411342
MEVSSVEFGHHAAAASKCFDDDGRLKRTGTMWTASAHIITAVIGSGVLSLAWAIAQLGWVAGPTVMLLFSFVTYYTSALLADCYRSGDACTGKRNYTYMDAVNANLSGVKVWFCGFLQYANIVGVAIGYTIAASISMLAIQRANCFHVEGHGDPCNISSTPYMIIFGVVQIFFSQIPDFDQISWLSILAAVMSFTYSTIGLGLGIAQVVSNKGVQGSLTGISVGAVTPVDKMWRSLQAFGDIAFAYSYSLILIEIQDTIRAPPPSESKVMRRATVVSVAVTTFFYMLCGCMGYAAFGDNAPGNLLTGFGFYEPFWLLDVANAAIAVHLVGAYQVYCQPLFAFVEKWARQRWPKSRYITGEVDVPLPLGTAGGRCYKLSLFRLTWRTAFVVATTVVSMLLPFFNDVVGLLGALGFWPLTVYFPVEMYIVQKKVPRWSTRWVCLQLLSVACLVITVASAAGSVAGIVSDLKVYKPFVTTS

SEQ ID NO: 13264 - protein, 448 aa, Zea mays subsp. mays
  peptide (1)..(448): Ceres Seq. ID no. 12411343
MWTASAHIITAVIGSGVLSLAWAIAQLGWVAGPTVMLLFSFVTYYTSALLADCYRSGDACTGKRNYTYMDAVNANLSGVKVWFCGFLQYANIVGVAIGYTIAASISMLAIQRANCFHVEGHGDPCNISSTPYMIIFGVVQIFFSQIPDFDQISWLSILAAVMSFTYSTIGLGLGIAQVVSNKGVQGSLTGISVGAVTPVDKMWRSLQAFGDIAFAYSYSLILIEIQDTIRAPPPSESKVMRRATVVSVAVTTFFYMLCGCMGYAAFGDNAPGNLLTGFGFYEPFWLLDVANAAIAVHLVGAYQVYCQPLFAFVEKWARQRWPKSRYITGEVDVPLPLGTAGGRCYKLSLFRLTWRTAFVVATTVVSMLLPFFNDVVGLLGALGFWPLTVYFPVEMYIVQKKVPRWSTRWVCLQLLSVACLVITVASAAGSVAGIVSDLKVYKPFVTTS

SEQ ID NO: 13265 - protein, 413 aa, Zea mays subsp. mays
  peptide (1)..(413): Ceres Seq. ID no. 12411344
MLLFSFVTYYTSALLADCYRSGDACTGKRNYTYMDAVNANLSGVKVWFCGFLQYANIVGVAIGYTIAASISMLAIQRANCFHVEGHGDPCNISSTPYMIIFGVVQIFFSQIPDFDQISWLSILAAVMSFTYSTIGLGLGIAQVVSNKGVQGSLTGISVGAVTPVDKMWRSLQAFGDIAFAYSYSLILIEIQDTIRAPPPSESKVMRRATVVSVAVTTFFYMLCGCMGYAAFGDNAPGNLLTGFGFYEPFWLLDVANAAIAVHLVGAYQVYCQPLFAFVEKWARQRWPKSRYITGEVDVPLPLGTAGGRCYKLSLFRLTWRTAFVVATTVVSMLLPFFNDVVGLLGALGFWPLTVYFPVEMYIVQKKVPRWSTRWVCLQLLSVACLVITVASAAGSVAGIVSDLKVYKPFVTTS

SEQ ID NO: 13266 - DNA, 902 bp, Zea mays subsp. mays
  misc_feature (1)..(902): Ceres Seq. ID no. 12377811
  misc_feature (1)..(902): Ortholog of  Ceres SEQ ID NO 15226744 as cited in SEQ ID NO 61720
gagtagtaattagtttgtgcccgtgtccgtgtttggttgaataataaattgacgaaagagggccaagtatagcttagagagagaagctagctagctgaaatggaggctagcagccgccgccgcgtctctcttgtgccactgctggtggtgatcatcgggtgctgtgcctgccgcgcccagatcccgatcccggcgaggacggacgggttcgtgtacggcgggaagccgccggcgtggggcgagacggtggtggtagaggcgttcttggacccagtgtgccccgacagccgcgacgcgtggccggcgctcaagatggtcgtcgagcactatagctcacgcgtgtccgtcgtcgttcacctcttcccgctgccttaccacagctatgccttcattgcgtgccggtcaattcatgcggtgaacaaactaaatccgtcgttcgtgtaccctctgctggagaagttcttcaaataccagaaacgttactataatcagccaacatacgaaaaatcaagagctacagtggttgatgaaataaccaagaaccttgttgtgcccatcatcggtgaaactaatttggcggcattcagagcaggtttcaacgattcacattctgatcaggctacaaggatatctttcaagaacggctgtgcacgaggtgtgaccgggacnccctacttctttgtgaatggcatacccatcaacgattcaggttctcctctggaanacaaggactggatttctatcctgcgtcccttggttggaaagatgtaacgcggttgctagtttgttcatcaataaagtcctagtagagtaaacaaacaaaagctgaataataaataacattaatcagcatcgtcattctcaggaaaaaaaaagagtgctaactcagnaactctcctcgc

SEQ ID NO: 13267 - protein, 223 aa, Zea mays subsp. mays
  peptide (1)..(223): Ceres Seq. ID no. 12377812
  misc_feature (190)..(190): Xaa is any aa, unknown or other
  misc_feature (209)..(209): Xaa is any aa, unknown or other
MEASSRRRVSLVPLLVVIIGCCACRAQIPIPARTDGFVYGGKPPAWGETVVVEAFLDPVCPDSRDAWPALKMVVEHYSSRVSVVVHLFPLPYHSYAFIACRSIHAVNKLNPSFVYPLLEKFFKYQKRYYNQPTYEKSRATVVDEITKNLVVPIIGETNLAAFRAGFNDSHSDQATRISFKNGCARGVTGXPYFFVNGIPINDSGSPLEXKDWISILRPLVGKM

SEQ ID NO: 13268 - protein, 152 aa, Zea mays subsp. mays
  peptide (1)..(152): Ceres Seq. ID no. 12377813
  misc_feature (119)..(119): Xaa is any aa, unknown or other
  misc_feature (138)..(138): Xaa is any aa, unknown or other
MVVEHYSSRVSVVVHLFPLPYHSYAFIACRSIHAVNKLNPSFVYPLLEKFFKYQKRYYNQPTYEKSRATVVDEITKNLVVPIIGETNLAAFRAGFNDSHSDQATRISFKNGCARGVTGXPYFFVNGIPINDSGSPLEXKDWISILRPLVGKM

SEQ ID NO: 13269 - DNA, 1619 bp, Zea mays subsp. mays
  misc_feature (1)..(1619): Ceres Seq. ID no. 12369137
  misc_feature (1)..(1619): Ortholog of  Ceres SEQ ID NO 14302836 as cited in SEQ ID NO 65013
gtgcccgtttcgcctcgcgcctgcgttgctctgctatttccatttccattgcacccatttccggggtcgcctgcgttgcttcgcgtgggagcgtgattcgtttaggcctctcgccaatttcggagggcgacggcgacgtgctttcggcgggcgggcagagaaaatctagagtcttgggtttgccagacgcgcctttgtgggagacagacacttgctctcgcctccaatggccgagatctgctgcgaggaagccaagtcgacgccggcaaccgccgtggctgcggcttcagtctccgccacggccgcagcggccgcagccgtggcagtggcctcctcggcgttagagaggaggcgacgcaggctggagatgaggaggttccgcgtcgcgagcgatcccgaggagctggtcgcggatgacgtccgcgctgccaagcggcagaggctggcgcgcacgctgtccggctcctgccccgacgcgggctcggactccgacaggccggccctgcccaggtacggggtcacctccgtctgcggccgacggcgcgagatggaggacacggtctccatcaggccggacttcctgcccggcaccagcaagcacaacttcttcggcgtcttcgacggccacggctgctcccacgtagcgacgatgtgccaggacaacatgcacgaggttgtcgcggacgagcacacgaaggctgcctntggcgaggagacggcgtggaagggcgtgatggagaggagcttctcgcgattggatgagcaggccgccagctgggcgaccagccgcagccgcgacgagcctgcctgcaggtgcgagcagcagatgcccttgcgctgcgatcacgtggggtccaccgccgtggtcgccgtcgttagccccagccacgtagtcgtcgccaacgccggcgactcgcgcgccgtcctctcccgcggcggcgtccccgttccgctctccgtcgaccacaagcctgaccgacctgacgagctggctcgcatcgaggcggcgggtggccgcgtcatttactgggatggtgcccgtgttctcggcgtcctcgccatgtctcgagccataggggataggtacctaaagccgtttgtgtcgtcggagccggaggtaacggtgacggagcgcaccgacgacgacgagtgtctgatcctggccagcgacggcctgtgggacgtcgtgaccaacgagatggcgtgcgaggtcgtccgggcgtgcttccgtagcaacggtccgccggcgccggccgctcgcccgaacggcgtggccctcccggcagccggcgcgggcgccgaggacggatcggcggttgtcaagggtgtgggcaaggaggactccgacaaggcgtgctccgacgcggccatgctgctggcaaagctggcgctggcccggcggagcgccgacaatgttagcgtggtcgtcgtggatctccgccggggcatatgattctcggagcgaagcagagcagggcaaaatcatatgctccatgcttgaaactagctcttctgaaatccacgctaatttctcccccattttgaccatccttctattttgatgtagtattagtagtagatcctgatcagatgaatataatagacgcttttcttctctc

SEQ ID NO: 13270 - protein, 408 aa, Zea mays subsp. mays
  peptide (1)..(408): Ceres Seq. ID no. 12369138
  misc_feature (160)..(160): Xaa is any aa, unknown or other
MAEICCEEAKSTPATAVAAASVSATAAAAAAVAVASSALERRRRRLEMRRFRVASDPEELVADDVRAAKRQRLARTLSGSCPDAGSDSDRPALPRYGVTSVCGRRREMEDTVSIRPDFLPGTSKHNFFGVFDGHGCSHVATMCQDNMHEVVADEHTKAAXGEETAWKGVMERSFSRLDEQAASWATSRSRDEPACRCEQQMPLRCDHVGSTAVVAVVSPSHVVVANAGDSRAVLSRGGVPVPLSVDHKPDRPDELARIEAAGGRVIYWDGARVLGVLAMSRAIGDRYLKPFVSSEPEVTVTERTDDDECLILASDGLWDVVTNEMACEVVRACFRSNGPPAPAARPNGVALPAAGAGAEDGSAVVKGVGKEDSDKACSDAAMLLAKLALARRSADNVSVVVVDLRRGI

SEQ ID NO: 13271 - protein, 361 aa, Zea mays subsp. mays
  peptide (1)..(361): Ceres Seq. ID no. 12369139
  misc_feature (113)..(113): Xaa is any aa, unknown or other
MRRFRVASDPEELVADDVRAAKRQRLARTLSGSCPDAGSDSDRPALPRYGVTSVCGRRREMEDTVSIRPDFLPGTSKHNFFGVFDGHGCSHVATMCQDNMHEVVADEHTKAAXGEETAWKGVMERSFSRLDEQAASWATSRSRDEPACRCEQQMPLRCDHVGSTAVVAVVSPSHVVVANAGDSRAVLSRGGVPVPLSVDHKPDRPDELARIEAAGGRVIYWDGARVLGVLAMSRAIGDRYLKPFVSSEPEVTVTERTDDDECLILASDGLWDVVTNEMACEVVRACFRSNGPPAPAARPNGVALPAAGAGAEDGSAVVKGVGKEDSDKACSDAAMLLAKLALARRSADNVSVVVVDLRRGI

SEQ ID NO: 13272 - protein, 301 aa, Zea mays subsp. mays
  peptide (1)..(301): Ceres Seq. ID no. 12369140
  misc_feature (53)..(53): Xaa is any aa, unknown or other
MEDTVSIRPDFLPGTSKHNFFGVFDGHGCSHVATMCQDNMHEVVADEHTKAAXGEETAWKGVMERSFSRLDEQAASWATSRSRDEPACRCEQQMPLRCDHVGSTAVVAVVSPSHVVVANAGDSRAVLSRGGVPVPLSVDHKPDRPDELARIEAAGGRVIYWDGARVLGVLAMSRAIGDRYLKPFVSSEPEVTVTERTDDDECLILASDGLWDVVTNEMACEVVRACFRSNGPPAPAARPNGVALPAAGAGAEDGSAVVKGVGKEDSDKACSDAAMLLAKLALARRSADNVSVVVVDLRRGI

SEQ ID NO: 13273 - DNA, 2115 bp, Zea mays subsp. mays
  misc_feature (1)..(2115): Ceres Seq. ID no. 12365140
  misc_feature (1)..(2115): Ortholog of  Ceres SEQ ID NO 13656138 as cited in SEQ ID NO 65492
  misc_feature (1)..(2115): Ortholog of  Ceres SEQ ID NO 14301542 as cited in SEQ ID NO 66246
ataagaaattcgattttcacccaaccctaagcccctcctccctcgtaatcccactccagccgccgccgcgccgccgcctctagcctccggatccaatccagcatcgccgccgcaaaccatgggcttcgacgtgggcgtcgtcccgttcaaccccgacggctggggtcctcctgacgtcccggcgattccgcagtctctggggcgcggtgcctccatccccttcgcgcccttctcccgctccgacaagctgggccgcatcgccgactggacgcgcaaccacgccggtcccgccgccttcgccgcggcgtcacgggactccgtattcgacttcacctccgcggacgactcgctcgtcgccggggccgaggactcctcgttccgcctcgtcgatgctaagccgcagccgcggccgcaacggttcggccccaagtggcgcttcaaccagcgccagcagctcccacagcgccaagacgaggaggtggaggcgcgccgccgcttggccgagaaggagcgcgcacgccgcgatcgccacttccagaacaaccgctcacatcaccaccctggcttccggggcaaccagccctcgtcgtcagccaagccctccgtcgacatccagcccgactggaccatgcgcgagcagatccccttcgccaacttcaccaagctctccttctccgtgtccgaccagcccgaggatctcctcttatgcggcgccgtcgagtcctacgatcgggcctatgaccgtgtcaaccccaaggccgcgcgccgtctcgagcgcttcaagtcccgcaacttcttcaaggtcaccaccaccgacgaccctgtcatccgccgcctcgctgaggaggacaaagccacggtgttcgcgactgatgccatcctcgccgctctcatgtgcacgccccgcagcatcctgtcgtgggacattgtcgtgcagcgtgtgggcaacaagctgttccttgacaagcgtgatggctcccagctcgacctgctcactgtcaatgagactgcgcaggagcagcttcctgagaacaaggatgacatcaactccgcacactcgctcgctgttgaggccacctacatcaaccagaacttctctcagcaggtgctgcaccgcaatggtgagaaggttaactttgacgagcccaacccatttgcttctgagggtgaagaggctgcatctgttggctaccgctaccgccgttggaagttgaatgatgagatcagccttgttgctcgctgtgaggtgcatgctgtcagtgttgatcaaagtggtactcgccagtttattaccgtcaatgccctaaatgagtttgattcaaagattactggtgttgactggaggcagaagcttgagacccagcgtggagctgtccttgctacagagctcaagaacaatgccaacaaacttgctcgctggactgcccaggctttgcttgctggtgctgacatgatgaagttgggctatgtgtcacgggtgaacccccgtgatcagtacaaccattctgtgctcactgtgatgggatacaagccaagggattttgctgcacagatcaacctcaacactgcaaacatgtggggaatcgtcaagtcaattgtggacatctgcatgaagtttgaagagggcaagtatgtgtttgtcaaagatccagcaaagccacagttgaggatctatgaggtaccatctgatgcgtttgagaatgattatgttgaagagccacttccagaggaggagcaggttcgcccgcttggagaagttgacgccactgcagaggaaatggatgcagttgctgaggcagaggccaacaatgtatcttctgctaatggtggtgagggtgggaagagtgcagaagcgacccttgcttgaagggaatagagggttcttttaccctttgcaagaaaattcccttttttggttaattatctgtgtcgtggaagacatgatccgctggtattgatacatgtcttcttatggctaatgcgaaaactatcacatttgtttttttttctctttcatgcttagacatgctatagtttttttaagcacccctcgatcgtttctgctgcaatgtttctgtgtaagaactattgaatctgattctgtgtttttttgtt

SEQ ID NO: 13274 - protein, 582 aa, Zea mays subsp. mays
  peptide (1)..(582): Ceres Seq. ID no. 12365141
MGFDVGVVPFNPDGWGPPDVPAIPQSLGRGASIPFAPFSRSDKLGRIADWTRNHAGPAAFAAASRDSVFDFTSADDSLVAGAEDSSFRLVDAKPQPRPQRFGPKWRFNQRQQLPQRQDEEVEARRRLAEKERARRDRHFQNNRSHHHPGFRGNQPSSSAKPSVDIQPDWTMREQIPFANFTKLSFSVSDQPEDLLLCGAVESYDRAYDRVNPKAARRLERFKSRNFFKVTTTDDPVIRRLAEEDKATVFATDAILAALMCTPRSILSWDIVVQRVGNKLFLDKRDGSQLDLLTVNETAQEQLPENKDDINSAHSLAVEATYINQNFSQQVLHRNGEKVNFDEPNPFASEGEEAASVGYRYRRWKLNDEISLVARCEVHAVSVDQSGTRQFITVNALNEFDSKITGVDWRQKLETQRGAVLATELKNNANKLARWTAQALLAGADMMKLGYVSRVNPRDQYNHSVLTVMGYKPRDFAAQINLNTANMWGIVKSIVDICMKFEEGKYVFVKDPAKPQLRIYEVPSDAFENDYVEEPLPEEEQVRPLGEVDATAEEMDAVAEAEANNVSSANGGEGGKSAEATLA

SEQ ID NO: 13275 - protein, 412 aa, Zea mays subsp. mays
  peptide (1)..(412): Ceres Seq. ID no. 12365142
MREQIPFANFTKLSFSVSDQPEDLLLCGAVESYDRAYDRVNPKAARRLERFKSRNFFKVTTTDDPVIRRLAEEDKATVFATDAILAALMCTPRSILSWDIVVQRVGNKLFLDKRDGSQLDLLTVNETAQEQLPENKDDINSAHSLAVEATYINQNFSQQVLHRNGEKVNFDEPNPFASEGEEAASVGYRYRRWKLNDEISLVARCEVHAVSVDQSGTRQFITVNALNEFDSKITGVDWRQKLETQRGAVLATELKNNANKLARWTAQALLAGADMMKLGYVSRVNPRDQYNHSVLTVMGYKPRDFAAQINLNTANMWGIVKSIVDICMKFEEGKYVFVKDPAKPQLRIYEVPSDAFENDYVEEPLPEEEQVRPLGEVDATAEEMDAVAEAEANNVSSANGGEGGKSAEATLA

SEQ ID NO: 13276 - protein, 324 aa, Zea mays subsp. mays
  peptide (1)..(324): Ceres Seq. ID no. 12365143
MCTPRSILSWDIVVQRVGNKLFLDKRDGSQLDLLTVNETAQEQLPENKDDINSAHSLAVEATYINQNFSQQVLHRNGEKVNFDEPNPFASEGEEAASVGYRYRRWKLNDEISLVARCEVHAVSVDQSGTRQFITVNALNEFDSKITGVDWRQKLETQRGAVLATELKNNANKLARWTAQALLAGADMMKLGYVSRVNPRDQYNHSVLTVMGYKPRDFAAQINLNTANMWGIVKSIVDICMKFEEGKYVFVKDPAKPQLRIYEVPSDAFENDYVEEPLPEEEQVRPLGEVDATAEEMDAVAEAEANNVSSANGGEGGKSAEATLA

SEQ ID NO: 13277 - DNA, 1248 bp, Zea mays subsp. mays
  misc_feature (1)..(1248): Ceres Seq. ID no. 12411333
  misc_feature (1)..(1248): Ortholog of  Ceres SEQ ID NO 13581804 as cited in SEQ ID NO 51424
  misc_feature (1)..(1248): Ortholog of  Ceres SEQ ID NO 14307559 as cited in SEQ ID NO 54006
gagccaattgagtggcagccagaaaaacccagagcgcgagcagcgagcgagcgcgggctcctgtgtgcagtgtgtctgcgctagagggcgaagggcacggaccgccttcgtcaataattgcggtacgaacggggcaaatccgtcgtttaaagaggtcgctgatagcgcctgctggtggcgagagagagaaagcagcagaatcgctgagggatcgtcgatccggagaggcaaaaaagccgagagatcaggcagggcaccatggggcgcgggaaggtggtgctgcagcggatcgagaacaagatcagccggcaggtgaccttcgccaagcgccggaacggcctgctcaagaaggcgtacgagctctccatcctctgcgacgccgaggtcgcgctcgtcctcttctcccacgccggccgcctctaccagttctcatcctcctccaatctgcttaagactctagagcggtaccagaggtacatctatggcttcagccgatgctgcagtgccatctagcgatcagatgcagaataactatcaagaatatgtgaagctgaaggcacgagttgaggttttacagcactcacaaaggaatcttcttggtgaagatctggccctacttagcccaagtgaacttgaccagcttgagaatcaagtagacaagaccttgaagcaaataagatcaagaaagactcaagtgttacttgatgaactttgtgacttaaagagaaaggaacaaatgctgcaagatgcaaacagggttctgaaaaggaagctgggcgagtttgaggcagaggcggcttctcccccgcagttagcgtggcaaggcgaaggcggcatgttgtcccatgaccctccacagccagaacacttcttccaggctctggagagcaacccatgtctgcaacctacataccatacgatggacatgaaccagcagccagtgccagcgccgggcggctgctatcctgcatggatgtcttagccagtgcttcattccattgccttgagaagtgtcctgaccttcacagatccctacgagctttattactgcttttgcctgcccctttgctgcttgcggtgcttactgaactgtccaaatgaccacatggtcatatataggttattgctgtctttatcttatgttgatcacggcctgctcagctgctttagcgccatgcaaaatggcttgggcgatgcacgcttgaatgggtcgaactgcttatgttttgggagtataaatcacttagc

SEQ ID NO: 13278 - protein, 166 aa, Zea mays subsp. mays
  peptide (1)..(166): Ceres Seq. ID no. 12411334
MASADAAVPSSDQMQNNYQEYVKLKARVEVLQHSQRNLLGEDLALLSPSELDQLENQVDKTLKQIRSRKTQVLLDELCDLKRKEQMLQDANRVLKRKLGEFEAEAASPPQLAWQGEGGMLSHDPPQPEHFFQALESNPCLQPTYHTMDMNQQPVPAPGGCYPAWMS

SEQ ID NO: 13279 - protein, 153 aa, Zea mays subsp. mays; identical to SEQ ID NO: 5098
  peptide (1)..(153): Ceres Seq. ID no. 12411335

SEQ ID NO: 13280 - protein, 104 aa, Zea mays subsp. mays
  peptide (1)..(104): Ceres Seq. ID no. 12411336
SQLSGSQKNPEREQRASAGSCVQCVCARGRRARTAFVNNCGTNGANPSFKEVADSACWWRERESSRIAEGSSIRRGKKAERSGRAPWGAGRWCCSGSRTRSAGR

SEQ ID NO: 13281 - DNA, 1233 bp, Zea mays subsp. mays; identical to SEQ ID NO: 2545
  misc_feature (1)..(1233): Ceres Seq. ID no. 13564187
  misc_feature (1)..(1233): Ortholog of  Ceres SEQ ID NO 15172729 as cited in SEQ ID NO 56037
  misc_feature (1)..(1233): Ortholog of  Ceres SEQ ID NO 13584899 as cited in SEQ ID NO 64830
  misc_feature (1)..(1233): Ortholog of  Ceres SEQ ID NO 13654441 as cited in SEQ ID NO 67814
  misc_feature (1)..(1233): Ortholog of  Ceres SEQ ID NO 13596128 as cited in SEQ ID NO 67831
  misc_feature (1)..(1233): Ortholog of  Ceres SEQ ID NO 12585194 as cited in SEQ ID NO 68878
  misc_feature (1)..(1233): Ortholog of  Ceres SEQ ID NO 12589186 as cited in SEQ ID NO 0

SEQ ID NO: 13282 - protein, 267 aa, Zea mays subsp. mays; identical to SEQ ID NO: 2546
  peptide (1)..(267): Ceres Seq. ID no. 13564188

SEQ ID NO: 13283 - protein, 251 aa, Zea mays subsp. mays; identical to SEQ ID NO: 2547
  peptide (1)..(251): Ceres Seq. ID no. 13564189

SEQ ID NO: 13284 - DNA, 1479 bp, Zea mays subsp. mays
  misc_feature (1)..(1479): Ceres Seq. ID no. 12355763
  misc_feature (1)..(1479): Ortholog of  Ceres SEQ ID NO 15171293 as cited in SEQ ID NO 51744
actgccactgtacttgtgttgtgttgtgctgtgctgtgctgcgagaagaaggagaagcagaggaagagcaggtgctgagaagcctgccggcgcgcgttacgacaagcatatatgggggagatcaccaatgtcatggagtaccaggccatcgccaagcagaagcttccgaagatggcctacgactactacgcgtccggcgccgaggacgagtggacgctgcaggagaacagggaggccttctccaggatcttgttccgtccgcgcatactgatcgacgtgtccaagatcgacatgaccaccaccgtgctggggttcaagatctccatgcccatcatggtcgcccccactgctatgcagaagatggctcacccagatggggagaacgccactgcgcgcgcggcggctgcggcaggcaccataatgacactgtcgtcctgggcaacttcaagcgtcgaggaggttgcctcgaccgggccagggatccgcttcttccagctatacgtctacaaggacaggaaggtggtggagcagctggtgaggcgagctgaaagagctgggttcaaggccatcgcgctcaccgtcgacacgccgcgccttggccgcagggaagctgacatcaagaacagattcgtcctgccaccacacctgacgctcaagaacttcgaaggtctggacctcggcaaaatggaccaggctgctgattcagggctggcttcctatgtcgccggccaagtcgaccgcaccctgagctggaaagacgtcaagtagttgcagaccatcaccacgctgccgatcctcgtcaagggagtgctcaccgctgaagacacgaggcttgcggtggcgaacggcgcggcggggatcatcgtgtcgaaccacggcgcgcggcagctggactacgtgccggcgaccatcagcgcgctggaggaggtcgtgaaggccgcccggggccacctccccgtgttcgtcgacggtggcgtccgccgcggcaccgacgtcttcaaggcgctcgcgctcggcgccgccggcgtattcgtcgggaggccggtggtgttctccctggcggcggcgggcgaggccggcgtgtccaacgtcctgcgcatgctgcgggacgagttcgagctcaccatggcgctcagcggctgcacctccctcgccgaaatcacccgcaagcacatcatcaccgagtccgacaagctcagcgccatcccgtcgcgcttgtagatgaggcaaaatcaatcgcctgctacgccgccggtcgatcggggatagtcagctcgtgcatggatgcatgcatgcgtgctcgatgtcgatgacgatgatgataccatatataatctaggactgcgcatatatatattttgttccagaaatgatcgatcactgtactgtactgtaaaatcttatagattattacacgcatggtgtgcgctgcatcttcattagttgttaataatggcgcacacatggtgatctctctgc

SEQ ID NO: 13285 - protein, 218 aa, Zea mays subsp. mays
  peptide (1)..(218): Ceres Seq. ID no. 12355764
MGEITNVMEYQAIAKQKLPKMAYDYYASGAEDEWTLQENREAFSRILFRPRILIDVSKIDMTTTVLGFKISMPIMVAPTAMQKMAHPDGENATARAAAAAGTIMTLSSWATSSVEEVASTGPGIRFFQLYVYKDRKVVEQLVRRAERAGFKAIALTVDTPRLGRREADIKNRFVLPPHLTLKNFEGLDLGKMDQAADSGLASYVAGQVDRTLSWKDVK

SEQ ID NO: 13286 - protein, 211 aa, Zea mays subsp. mays
  peptide (1)..(211): Ceres Seq. ID no. 12355765
MEYQAIAKQKLPKMAYDYYASGAEDEWTLQENREAFSRILFRPRILIDVSKIDMTTTVLGFKISMPIMVAPTAMQKMAHPDGENATARAAAAAGTIMTLSSWATSSVEEVASTGPGIRFFQLYVYKDRKVVEQLVRRAERAGFKAIALTVDTPRLGRREADIKNRFVLPPHLTLKNFEGLDLGKMDQAADSGLASYVAGQVDRTLSWKDVK

SEQ ID NO: 13287 - protein, 198 aa, Zea mays subsp. mays
  peptide (1)..(198): Ceres Seq. ID no. 12355766
MAYDYYASGAEDEWTLQENREAFSRILFRPRILIDVSKIDMTTTVLGFKISMPIMVAPTAMQKMAHPDGENATARAAAAAGTIMTLSSWATSSVEEVASTGPGIRFFQLYVYKDRKVVEQLVRRAERAGFKAIALTVDTPRLGRREADIKNRFVLPPHLTLKNFEGLDLGKMDQAADSGLASYVAGQVDRTLSWKDVK

SEQ ID NO: 13288 - DNA, 992 bp, Zea mays subsp. mays
  misc_feature (1)..(992): Ceres Seq. ID no. 12412778
  misc_feature (1)..(992): Ortholog of  Ceres SEQ ID NO 13594966 as cited in SEQ ID NO 56152
  misc_feature (1)..(992): Ortholog of  Ceres SEQ ID NO 12582457 as cited in SEQ ID NO 57530
  misc_feature (1)..(992): Ortholog of  Ceres SEQ ID NO 13655804 as cited in SEQ ID NO 64881
aatccaaatccggctcctcctcctcctcctcctggcactggcagcgaagatccaaagatagcacaatcgcatctcacacgccgagctatttctacttgagagaatcccccttctcccacaaggagcgagtaatttgaggcagagaccgacagagatggcagcagttatggtgtctcgccaaggccgggagctgcagcggtacagcgcgagcacgggcgggcgcgtggtggtgggctgcgtcccgtaccgcgtgcgcgggggcgacggcgaggtggaggtcctggtgatcagctcgcagaagaagggccccgcggggggcgtgctgatccccaagggcgggtgggagctggacgagtccatggacgaggcggcccggcgcgaggccgcggaggaggccggcgtgctcggcgagacgggccccgcgctgggccgctggtgctaccgcagccgcagctacgacgccacgtacgagggcttcgtgctcccgctgcgcgtcaccgcggagctggaccggtggcccgagatggccgcgcgccgcagggagtgggtctccgccgccgaggccatcgcgcgctgcccccacccgtggatgcgcgaggcgctgcagcggttctccgacaccgtcgcggtcgcggcggagacgatgcacctcgcctccgccctctagctctaggcccggccggccgtcgatcgcttccctcttcccgccgcggtctcgtcggaccgcgggcggcctcgcgcgttttttcggccgccgcgcacggacgcggcgcgtgcggggctgccgccgcctgctctgctcgctggattggacggaacacgccatcattcagtcagacaaatctggacgtcgtcgagctgtggcaccaggacgcggcctgtacattgttcttgggggggtctcgttttgaaatacaaacttgtaaatgtcacggagtttaacgagatccactgtggtactctactagtatacaatacacgaagaagaaatg

SEQ ID NO: 13289 - protein, 170 aa, Zea mays subsp. mays
  peptide (1)..(170): Ceres Seq. ID no. 12412779
MAAVMVSRQGRELQRYSASTGGRVVVGCVPYRVRGGDGEVEVLVISSQKKGPAGGVLIPKGGWELDESMDEAARREAAEEAGVLGETGPALGRWCYRSRSYDATYEGFVLPLRVTAELDRWPEMAARRREWVSAAEAIARCPHPWMREALQRFSDTVAVAAETMHLASAL

SEQ ID NO: 13290 - protein, 166 aa, Zea mays subsp. mays
  peptide (1)..(166): Ceres Seq. ID no. 12412780
MVSRQGRELQRYSASTGGRVVVGCVPYRVRGGDGEVEVLVISSQKKGPAGGVLIPKGGWELDESMDEAARREAAEEAGVLGETGPALGRWCYRSRSYDATYEGFVLPLRVTAELDRWPEMAARRREWVSAAEAIARCPHPWMREALQRFSDTVAVAAETMHLASAL

SEQ ID NO: 13291 - protein, 102 aa, Zea mays subsp. mays
  peptide (1)..(102): Ceres Seq. ID no. 12412781
MDEAARREAAEEAGVLGETGPALGRWCYRSRSYDATYEGFVLPLRVTAELDRWPEMAARRREWVSAAEAIARCPHPWMREALQRFSDTVAVAAETMHLASAL

SEQ ID NO: 13292 - DNA, 1648 bp, Zea mays subsp. mays
  misc_feature (1)..(1648): Ceres Seq. ID no. 12355441
  misc_feature (1)..(1648): Ortholog of  Ceres SEQ ID NO 15177320 as cited in SEQ ID NO 52645
  misc_feature (1)..(1648): Ortholog of  Ceres SEQ ID NO 15171359 as cited in SEQ ID NO 57279
  misc_feature (1)..(1648): Ortholog of  Ceres SEQ ID NO 14313840 as cited in SEQ ID NO 59568
acacagctagcaggccggcctgcgtatttcggcactgctagcacaatcacttcacagccatgccgcttgttctgctagtgctgctgctgctcttgtcctgttcttctccagttgccctgctagcagcagcgcatgaacatgacgagtacacactcgtggcgaagagctcgctgaaacccaaagctacgtgcaccggatacagggtgtctccaccccagaacatcacgtgggttccattgaacgcccctcacgggccgtgctcgccattgccgggctcggcggcgccgtccttggccgcgctgctcctccacgaccagctccgcgtcgacggcatcgagaggaggctctctgacaatccccatgatagtaagttggttccggctggcggagaggatttccaaacgaacggcaatttacttcaagtcaactacggcaattcaggacagcctatgagctccgaggcccagcagagcggcgtggttaatgcgtcggctgccggcggcggaagcagatccaagctgcccggagtgatccagacggtggttctggactcggcgagcgacgtgccgtgggtgcagtgcgtgccgtgccccatcccgccgtgccacccccaggtggacagcttctacgacccgagcaggtctcccagctctgcccccttctcgtgcagctccccgacctgcacggctctcggcccctacgccaatggctgcgccaacaaccagtgccagtacctggtccgctaccccgacgggtcgtccacgtcgggggcctacatcgccgacctgctcaccttggacgccggcaacgccgtgtcgggcttcaagttcgggtgcagccacgccgagcagggcagcttcgacgcccgggcagccggcatcatggcgctcggcggcgggcctgagtcgctgctgtcccagaccgcgtcccgctacgggaacgccttctcctactgcatcccggccacggctagtgactccggcttcttcaccctcggcgtgcccaggcgagcctcctccaggtacgtcgtcacgcccatggtcaggttcaggcaggcggccacgttctacggcgtgctcctccgcaccatcaccgtcggcggccagcggctcggcgtggcccccgcggtgttcgccgcgggctcggtactagactcccgcacggccatcacgcgcctgccgccgacggcgtaccaggccctgcgctccgcgttcaggagcagcatgaccatgtaccgctccgccccacccaaggggtatctggacacgtgctacgacttcactggcgtcgtcaacatcaggctgcccaagatctccctggtgttcgaccggaacgccgtgctgccgctcgacccgtcgggcatcctcttcaacgactgcctcgccttcaccncgaatgccgacgatcgcatgccgggcgtcctaggcagcntgcngcagcagaccatcgaggtgctatacgacgtcggcggcggcgccgtgggattccgccaaggcgcgtgctaagagatccatgtgaaggagacaataagctatactatatatatatatatatactatactatctagtgctaatttgcttggcaaccgagaacaaataaatcnnnnncaagacatgtaaaaggacatttgaagtatgtcaagaaatt

SEQ ID NO: 13293 - protein, 481 aa, Zea mays subsp. mays
  peptide (1)..(481): Ceres Seq. ID no. 12355442
  misc_feature (445)..(445): Xaa is any aa, unknown or other
  misc_feature (458)..(458): Xaa is any aa, unknown or other
  misc_feature (459)..(459): Xaa is any aa, unknown or other
MPLVLLVLLLLLSCSSPVALLAAAHEHDEYTLVAKSSLKPKATCTGYRVSPPQNITWVPLNAPHGPCSPLPGSAAPSLAALLLHDQLRVDGIERRLSDNPHDSKLVPAGGEDFQTNGNLLQVNYGNSGQPMSSEAQQSGVVNASAAGGGSRSKLPGVIQTVVLDSASDVPWVQCVPCPIPPCHPQVDSFYDPSRSPSSAPFSCSSPTCTALGPYANGCANNQCQYLVRYPDGSSTSGAYIADLLTLDAGNAVSGFKFGCSHAEQGSFDARAAGIMALGGGPESLLSQTASRYGNAFSYCIPATASDSGFFTLGVPRRASSRYVVTPMVRFRQAATFYGVLLRTITVGGQRLGVAPAVFAAGSVLDSRTAITRLPPTAYQALRSAFRSSMTMYRSAPPKGYLDTCYDFTGVVNIRLPKISLVFDRNAVLPLDPSGILFNDCLAFTXNADDRMPGVLGSXXQQTIEVLYDVGGGAVGFRQGAC

SEQ ID NO: 13294 - protein, 351 aa, Zea mays subsp. mays
  peptide (1)..(351): Ceres Seq. ID no. 12355443
  misc_feature (315)..(315): Xaa is any aa, unknown or other
  misc_feature (328)..(328): Xaa is any aa, unknown or other
  misc_feature (329)..(329): Xaa is any aa, unknown or other
MSSEAQQSGVVNASAAGGGSRSKLPGVIQTVVLDSASDVPWVQCVPCPIPPCHPQVDSFYDPSRSPSSAPFSCSSPTCTALGPYANGCANNQCQYLVRYPDGSSTSGAYIADLLTLDAGNAVSGFKFGCSHAEQGSFDARAAGIMALGGGPESLLSQTASRYGNAFSYCIPATASDSGFFTLGVPRRASSRYVVTPMVRFRQAATFYGVLLRTITVGGQRLGVAPAVFAAGSVLDSRTAITRLPPTAYQALRSAFRSSMTMYRSAPPKGYLDTCYDFTGVVNIRLPKISLVFDRNAVLPLDPSGILFNDCLAFTXNADDRMPGVLGSXXQQTIEVLYDVGGGAVGFRQGAC

SEQ ID NO: 13295 - DNA, 1238 bp, Zea mays subsp. mays
  misc_feature (1)..(1238): Ceres Seq. ID no. 13498318
  misc_feature (1)..(1238): Ortholog of  Ceres SEQ ID NO 15168355 as cited in SEQ ID NO 57246
  misc_feature (1)..(1238): Ortholog of  Ceres SEQ ID NO 13597094 as cited in SEQ ID NO 63626
acgacacccaacggcagctgcagcacagcagaggaaggcaggaaggaagaagatatcagaccagtgtgaagccaagccagcgcgtctctctctctctctctctggtcgcttggtcggtccatcggaggatcagctcggcggtggccatggcaatggcgcagcaagcgagcctcccctgctcgactgccaccacatggagagagctcacgaacacgagctggagggacgacgactacaggcggatggtgatggcgtacctgatcgaggcggtgtacctgctggagctggagcggcaggagcgccgggacgcggcggcggtggcgcagcagtggtggaagccgttccacttccgcctggcgcacgagctggtggacgaccgcgacggctccgtgttcggcgccgtcttcgagcgcgaccaccacggcgccaggccggggccggggccgagcccgagcggcgcgcccagcgccgtcatcgcgttccggggcacgctgctgcgcgcgcccaccatccgccgcgacgtcgaggacgagctccgcctgctggcacgcaacagcctgcggggctccgccaggctggcgcgcgccgcgcaggcgctgcgcgccaccatcgaccgcttcggctccgagaacgtctgcgtctgcggccactccctgggcgccggcttcgcgcgccaggtcgtccggacgctcgtggcctcctcctcctcctcctcctcctcgccgcggcaaccgcgccagcaggccgccgccttcgccgccgcgacgctcgagtcccacctcttcaacgcgccctacctgtcgctgcccatgggcgtcaggagcgtggtcaggacggcggactgcctggtcaaggcgctccgctccggcgtcgccaccgtcggcaagtggcacggcaaggcgctccggaacgtggcctacgccagctgcgtcctcggatacaccaggctcgagagcaccaggaagttgtgaggatcgatcggatcgaatgcctccgccacctcgcgtcctcctcgatgctgcctctggcttcaacggttgaaccgtcctgccagtgccagccaaactgtatctatgctcgatcaccttgtagtaggaagtactcggaaattaattcaattctagcaggagacgaataaagcatctgaccggaggatgcaaggccttgcgtgcatatgctttgctttgcttttgtacaatctttttaaatgtgaattacagtagcnctaagttgatctc

SEQ ID NO: 13296 - protein, 378 aa, Zea mays subsp. mays
  peptide (1)..(378): Ceres Seq. ID no. 13498319
RHPTAAAAQQRKAGRKKISDQCEAKPARLSLSLSGRLVGPSEDQLGGGHGNGAASEPPLLDCHHMERAHEHELEGRRLQADGDGVPDRGGVPAGAGAAGAPGRGGGGAAVVEAVPLPPGARAGGRPRRLRVRRRLRARPPRRQAGAGAEPERRAQRRHRVPGHAAARAHHPPRRRGRAPPAGTQQPAGLRQAGARRAGAARHHRPLRLRERLRLRPLPGRRLRAPGRPDARGLLLLLLLLAAATAPAGRRLRRRDARVPPLQRALPVAAHGRQERGQDGGLPGQGAPLRRRHRRQVARQGAPERGLRQLRPRIHQAREHQEVVRIDRIECLRHLASSSMLPLASTVEPSCQCQPNCIYARSPCSRKYSEINSILAGDE

SEQ ID NO: 13297 - protein, 322 aa, Zea mays subsp. mays
  peptide (1)..(322): Ceres Seq. ID no. 13498320
DTQRQLQHSRGRQEGRRYQTSVKPSQRVSLSLSLVAWSVHRRISSAVAMAMAQQASLPCSTATTWRELTNTSWRDDDYRRMVMAYLIEAVYLLELERQERRDAAAVAQQWWKPFHFRLAHELVDDRDGSVFGAVFERDHHGARPGPGPSPSGAPSAVIAFRGTLLRAPTIRRDVEDELRLLARNSLRGSARLARAAQALRATIDRFGSENVCVCGHSLGAGFARQVVRTLVASSSSSSSSPRQPRQQAAAFAAATLESHLFNAPYLSLPMGVRSVVRTADCLVKALRSGVATVGKWHGKALRNVAYASCVLGYTRLESTRKL

SEQ ID NO: 13298 - protein, 314 aa, Zea mays subsp. mays
  peptide (1)..(314): Ceres Seq. ID no. 13498321
MERAHEHELEGRRLQADGDGVPDRGGVPAGAGAAGAPGRGGGGAAVVEAVPLPPGARAGGRPRRLRVRRRLRARPPRRQAGAGAEPERRAQRRHRVPGHAAARAHHPPRRRGRAPPAGTQQPAGLRQAGARRAGAARHHRPLRLRERLRLRPLPGRRLRAPGRPDARGLLLLLLLLAAATAPAGRRLRRRDARVPPLQRALPVAAHGRQERGQDGGLPGQGAPLRRRHRRQVARQGAPERGLRQLRPRIHQAREHQEVVRIDRIECLRHLASSSMLPLASTVEPSCQCQPNCIYARSPCSRKYSEINSILAGDE

SEQ ID NO: 13299 - protein, 274 aa, Zea mays subsp. mays
  peptide (1)..(274): Ceres Seq. ID no. 13498322
MAMAQQASLPCSTATTWRELTNTSWRDDDYRRMVMAYLIEAVYLLELERQERRDAAAVAQQWWKPFHFRLAHELVDDRDGSVFGAVFERDHHGARPGPGPSPSGAPSAVIAFRGTLLRAPTIRRDVEDELRLLARNSLRGSARLARAAQALRATIDRFGSENVCVCGHSLGAGFARQVVRTLVASSSSSSSSPRQPRQQAAAFAAATLESHLFNAPYLSLPMGVRSVVRTADCLVKALRSGVATVGKWHGKALRNVAYASCVLGYTRLESTRKL

SEQ ID NO: 13300 - DNA, 1422 bp, Zea mays subsp. mays
  misc_feature (1)..(1422): Ceres Seq. ID no. 12365071
  misc_feature (1)..(1422): Ortholog of  Ceres SEQ ID NO 12615296 as cited in SEQ ID NO 62724
  misc_feature (1)..(1422): Ortholog of  Ceres SEQ ID NO 15225093 as cited in SEQ ID NO 65177
  misc_feature (1)..(1422): Ortholog of  Ceres SEQ ID NO 15179532 as cited in SEQ ID NO 0
atctttaccactagtcgccgtgccgtcccctccccttctctctctcctctctccccacgccacgcatcgcctcgtcggaacggaaggcggcagcgctgcgagcaagggagggagggagcggggatgaggatgctgtcgaaggcgtgctcgattgtggcctcctccctcccgcgctgctcctcctccgccgccgcccccacgatgagggggcagccgtccttgctgccaagcgtgcggaagcaatggcccgcgaagccactgctgtatggaatcggcaccctgttggtcatgccactgaggacactgtatggagtgggtcgtgtttttggcgcaggacggtttctctgcaacatgaccaacgtctcttcgtcgctgcaaattgagcttgtatcatgccttcgagataactatgcgtatatcctgcatgatgttgatactggaacagttggagtagtggatccttctgaggctatgcctattataaatgcattggaaaagagaaaccagaacttgacttatatactgaacacccatcatcactatgatcatactggtggaaacttggaattgaaggcaaaatatggtgcaaaggtaattggttctgagaaggataaggacagaatacctggcattgacatcacgcttaaggagggtgacacatggatgttcgctggccatcaagttcttgtactggaaactcctggacatacaacaggtcatgtgtgctattatttcgctggttctggagctatatttacaggtgacaccttgttcaatctatcatgcggaaagctttttgaagggactccacagcagatgtatgcctcactccagaaaattacagctctacccgatgatacaaaagtatactgtgggcatgaatataccttgagtaatgcaaagtttgccttgagtgtagaaccgggaaataaagcattgcaggaatatactgcaaatgcagctgagctgcgtaataagaatatacccacggtgccaacaacaattggaagggagaaggaatgcaatcctttcttgcggacctccaatccagaaattaagagaacactgtccgttccagatcatttcgatgaagatcgggtgcttggagttgtccgtcgagcaaaagataacttctgactaacaaaaggaaatgctcgtgacgtatgacccatatcttgttaaagttcagacagagaacctaagtcacaataaacataggaggaaatgaaggtatatatgtttgagctagattttgaaatgcttcggcaaaattatgtcgagtgtatgtagcttgggcagtgcagtgcttgtctatagcaaccaatgattcttttgaccactacaaataagcgtgttctgctatcatctactctctgtaaaaaaaacgccacgtagccgtttcatagtcgatcttcagttctt

SEQ ID NO: 13301 - protein, 378 aa, Zea mays subsp. mays
  peptide (1)..(378): Ceres Seq. ID no. 12365072
IFTTSRRAVPSPSLSPLSPRHASPRRNGRRQRCEQGREGAGMRMLSKACSIVASSLPRCSSSAAAPTMRGQPSLLPSVRKQWPAKPLLYGIGTLLVMPLRTLYGVGRVFGAGRFLCNMTNVSSSLQIELVSCLRDNYAYILHDVDTGTVGVVDPSEAMPIINALEKRNQNLTYILNTHHHYDHTGGNLELKAKYGAKVIGSEKDKDRIPGIDITLKEGDTWMFAGHQVLVLETPGHTTGHVCYYFAGSGAIFTGDTLFNLSCGKLFEGTPQQMYASLQKITALPDDTKVYCGHEYTLSNAKFALSVEPGNKALQEYTANAAELRNKNIPTVPTTIGREKECNPFLRTSNPEIKRTLSVPDHFDEDRVLGVVRRAKDNF

SEQ ID NO: 13302 - protein, 337 aa, Zea mays subsp. mays
  peptide (1)..(337): Ceres Seq. ID no. 12365073
MRMLSKACSIVASSLPRCSSSAAAPTMRGQPSLLPSVRKQWPAKPLLYGIGTLLVMPLRTLYGVGRVFGAGRFLCNMTNVSSSLQIELVSCLRDNYAYILHDVDTGTVGVVDPSEAMPIINALEKRNQNLTYILNTHHHYDHTGGNLELKAKYGAKVIGSEKDKDRIPGIDITLKEGDTWMFAGHQVLVLETPGHTTGHVCYYFAGSGAIFTGDTLFNLSCGKLFEGTPQQMYASLQKITALPDDTKVYCGHEYTLSNAKFALSVEPGNKALQEYTANAAELRNKNIPTVPTTIGREKECNPFLRTSNPEIKRTLSVPDHFDEDRVLGVVRRAKDNF

SEQ ID NO: 13303 - protein, 335 aa, Zea mays subsp. mays
  peptide (1)..(335): Ceres Seq. ID no. 12365074
MLSKACSIVASSLPRCSSSAAAPTMRGQPSLLPSVRKQWPAKPLLYGIGTLLVMPLRTLYGVGRVFGAGRFLCNMTNVSSSLQIELVSCLRDNYAYILHDVDTGTVGVVDPSEAMPIINALEKRNQNLTYILNTHHHYDHTGGNLELKAKYGAKVIGSEKDKDRIPGIDITLKEGDTWMFAGHQVLVLETPGHTTGHVCYYFAGSGAIFTGDTLFNLSCGKLFEGTPQQMYASLQKITALPDDTKVYCGHEYTLSNAKFALSVEPGNKALQEYTANAAELRNKNIPTVPTTIGREKECNPFLRTSNPEIKRTLSVPDHFDEDRVLGVVRRAKDNF

SEQ ID NO: 13304 - DNA, 980 bp, Zea mays subsp. mays
  misc_feature (1)..(980): Ceres Seq. ID no. 12378326
  misc_feature (1)..(980): Ortholog of  Ceres SEQ ID NO 12611293 as cited in SEQ ID NO 56191
aaaaaatagccttatagccacatcccggccagccgcagcaagtgcccagaaggccagaaccagaaccaggtagcccgtgcaacctcatatcatcccctgccacgcacctccgtccgccgcgccatggaatcgaggaggagggccgtgcccaccgtgacggcggttgcggtggcgacgctgctgctgctgctgatgtcgtcgggcgtgggcggcgacttcgcggcggaccgggcggagtgctcggagcagctggcgggggctggcgacgtgcctgacgtacgtgcaggagcaggcgacggcgacggcgccgacgcccgactgctgcgcgggcctgaaggcggtgctgcagagcagccgcaagtgcctgtgcgtgctggtcaaggaccgggacgaccccaacctaggcctcaagctcaacgtcgacaaggcgctcggcctccccgccgtctgccacgcgcccgccaacatctccgactgccccaggctgctggacctgccggccggctccaaggacgcgcaggtgttcgagcagtacgcgaagcagcaggcggcggcggcggcgcagggcggcggcgcacccaccagtggacgcagcagcgcggcggcgagcacgaccgcgggcgcgcagaagagcggagcctcagccgccggtcggtggttgggagtggggagggtcggtggtgctggtggcggcgcacgcgcggtggcgccgctcgccgtgcctttcctgctcctgctcgggtagataataataataactttacgcgcgcggccaacggccggagtcccggcggtttggttggcgccgcgcgttgccgacttgtgtgcttcgggtgcgtgcgtgtgtggtggggtacttttcacactatattggaaaaagaagctattatatatctttgactgaaaaaaagtgtcgttgtataattatctttttttcgtgtccgtgtatgcaacccctcctctcatagacccatagcgcc

SEQ ID NO: 13305 - protein, 258 aa, Zea mays subsp. mays
  peptide (1)..(258): Ceres Seq. ID no. 12378327
MESRRRAVPTVTAVAVATLLLLLMSSGVGGDFAADRAECSEQLAGAGDVPDVRAGAGDGDGADARLLRGPEGGAAEQPQVPVRAGQGPGRPQPRPQAQRRQGARPPRRLPRARQHLRLPQAAGPAGRLQGRAGVRAVREAAGGGGGAGRRRTHQWTQQRGGEHDRGRAEERSLSRRSVVGSGEGRWCWWRRTRGGAARRAFPAPARVDNNNNFTRAANGRSPGGLVGAARCRLVCFGCVRVWWGTFHTILEKEAIIYL

SEQ ID NO: 13306 - protein, 235 aa, Zea mays subsp. mays
  peptide (1)..(235): Ceres Seq. ID no. 12378328
MSSGVGGDFAADRAECSEQLAGAGDVPDVRAGAGDGDGADARLLRGPEGGAAEQPQVPVRAGQGPGRPQPRPQAQRRQGARPPRRLPRARQHLRLPQAAGPAGRLQGRAGVRAVREAAGGGGGAGRRRTHQWTQQRGGEHDRGRAEERSLSRRSVVGSGEGRWCWWRRTRGGAARRAFPAPARVDNNNNFTRAANGRSPGGLVGAARCRLVCFGCVRVWWGTFHTILEKEAIIYL

SEQ ID NO: 13307 - DNA, 1156 bp, Zea mays subsp. mays
  misc_feature (1)..(1156): Ceres Seq. ID no. 12355771
  misc_feature (1)..(1156): Ortholog of  Ceres SEQ ID NO 13594828 as cited in SEQ ID NO 56431
  misc_feature (1)..(1156): Ortholog of  Ceres SEQ ID NO 14316363 as cited in SEQ ID NO 57222
  misc_feature (1)..(1156): Ortholog of  Ceres SEQ ID NO 15177754 as cited in SEQ ID NO 57945
  misc_feature (1)..(1156): Ortholog of  Ceres SEQ ID NO 13594354 as cited in SEQ ID NO 58082
  misc_feature (1)..(1156): Ortholog of  Ceres SEQ ID NO 14316408 as cited in SEQ ID NO 58228
  misc_feature (1)..(1156): Ortholog of  Ceres SEQ ID NO 13528075 as cited in SEQ ID NO 60188
  misc_feature (1)..(1156): Ortholog of  Ceres SEQ ID NO 13600483 as cited in SEQ ID NO 0
acgaaaacaagcacagagagagagagaaccccagcgggcaaacgcctccctccccctgcctccaggccccagatccggccatccgggtagctccagaccttctccaatggcggtcaaggtctacgtcgtgttttactccacctacgggcacgttgccaagcttgctgaggagatgaagaaaggcgccgcttcagttgaaggcgtggaggtcaaagtatggcaggtcagtgtctgtcagcaacggtgcaatcttcgagttagctagaaccaatgtgttgtgtgagtctggaatggtcaccgccaaattcccatcggtttcactttcacacgcgaaggtcccggagattctgtccgaggaggtgctcggcaagatgggcgcgccacccaagaccgacgcgccggtcatcaccccgcaggagctggcggaggccgacggcgtcctcttcgggttccccacgcggttcggcatgatggcggcgcagatgaaggccttcttcgacgcgaccggcgggctgtggcgcgagcagagcctggccggcaagcccgccggcctcttcttcagcaccggctcccagggtggcggccaggagaccacgccgtgagcagccgtctcctctccttttttcacaacatgtttccttccccttgcagcaccaaccgatcgaatcgcagaagcagtgggtaacgtttcccccttggcgtggcggccaggctgacggcggtgacgcagctgacgcaccacgggatggtgttcgtgcctgtggggtacacgttcggcgccaagatattcgacatggagagcgtgcacggcggcagcccgtacggcgcgggcacgttcgccggggacgggtcgcggtggccgacggaactggagctggagcacgccttccaccagggcaagtacttcgccggcatcgccaagaggctcaagggcggctccgcctgatatcgctcgcaccctcctatacgtatacataattattatagggaacatatctggtgcatatataaatttagtgtacatggtgcatatattaaatcagcatcactcattttagatataatgtctctagttgttggtatattttgctaagaacaccctccgacgtggtgaagtatagcggtggaaaatattatttataaattgcaatgatcg

SEQ ID NO: 13308 - protein, 103 aa, Zea mays subsp. mays
  peptide (1)..(103): Ceres Seq. ID no. 12355772
MVTAKFPSVSLSHAKVPEILSEEVLGKMGAPPKTDAPVITPQELAEADGVLFGFPTRFGMMAAQMKAFFDATGGLWREQSLAGKPAGLFFSTGSQGGGQETTP

SEQ ID NO: 13309 - protein, 87 aa, Zea mays subsp. mays
  peptide (1)..(87): Ceres Seq. ID no. 12355773
RKQAQREREPQRANASLPLPPGPRSGHPGSSRPSPMAVKVYVVFYSTYGHVAKLAEEMKKGAASVEGVEVKVWQVSVCQQRCNLRVS

SEQ ID NO: 13310 - protein, 76 aa, Zea mays subsp. mays
  peptide (1)..(76): Ceres Seq. ID no. 12355774
MGAPPKTDAPVITPQELAEADGVLFGFPTRFGMMAAQMKAFFDATGGLWREQSLAGKPAGLFFSTGSQGGGQETTP

SEQ ID NO: 13311 - DNA, 1647 bp, Zea mays subsp. mays
  misc_feature (1)..(1647): Ceres Seq. ID no. 12411310
  misc_feature (1)..(1647): Ortholog of  Ceres SEQ ID NO 15168576 as cited in SEQ ID NO 57123
aaaaacacctgtggcagcggccgcgctgcttgcctcgccttgctctcggttcgtggggcatggcggcttcgccggcttgtgctccggggctcatctccggccccaccctccctcccctgcccgttgccttccgctgctactgggcccaaaagccctcctccgcgtcgacctcctccaggcgcccgtgccgcaggcggttcgttcccgttgcagctgcctccacccgcacctcctctgcggctgctcggggcctcgacgccgacgacttccgccacccgctcgacaagcagaacactcttctgctgagagcaattccagggctcaacgacgtgggcaaagctttgctaggacccgtctcggagcaagttatggtactccagaacattggaacatcagttctcgtctccccgaaccagcttccagatctccaccaactgctggttgaggctgcgaagctcttgaacaccgaagctcctgacttgtacataaggcagaatcctgttccaaatgcctacaccttagcaatcaacggcaaaaaaccattcattgtcgttcacacaagccttgtggagctgcttactccaagggaattgcaggctgttttggctcatgagctgggtcacctcaagtgcgatcatggtgtttggctcacttttgccaatatactcacaatgggagcatacactgtccctggttttggcatggttgctggcttcctggaagagcagctatacagatggctacgagctgcagagctgacttgtgacagggcagctcttcttgtggtgcaagatccgaaggtagtcatctctgttctgatgaaattggccggaggatgcccatctcttgccgacaagctaaatgtggatgccttcctggagcaagctcgttcgtacgacaaggctgcatcgaacccagttgggtggtacatccggaatgcacaaaccagagagctttcacaccctttgcctgtgatgcgagccagagagatcgatgagtggtcaagaagccaggagtacaaaaccgtaatgcaaaaaatgcttaagatggggctgaacagagtatagttagtgatgacacatacgaagaggtctgtacacggaatccatcatgtttctttgcaaggatttagctttagatcatgggcctgtttggttcagcttttttctaaccagcttttctgaaaatctggctgtggggagaatctgagtatcattacgattacatatgaaggaagataaagttgttcatagggctcaggatctagaaagtgacagattcctactattacaacgactgaaccgattatgtgtttatgttgattttggatggtttttgtcctcaacgaattttatagaagttggctgaaaagctgagcgtttggcagtctgcagcagcttttggtggtcagaagctaccagaagccgaaacaaacaggccccatgactgtcctttcctgtatatctgatcatgaatttgtgattttctcctgggtggctgggcaccgttttttttcaggactgtagagtctgtatatggagaatgtatgtatatggaagggaatgtctgtatatggagaaggctggtgtttctgaaaaaaaaacagatacaaacatagacatactgtatatatttgcagttgaattt

SEQ ID NO: 13312 - protein, 354 aa, Zea mays subsp. mays
  peptide (1)..(354): Ceres Seq. ID no. 12411311
KHLWQRPRCLPRLALGSWGMAASPACAPGLISGPTLPPLPVAFRCYWAQKPSSASTSSRRPCRRRFVPVAAASTRTSSAAARGLDADDFRHPLDKQNTLLLRAIPGLNDVGKALLGPVSEQVMVLQNIGTSVLVSPNQLPDLHQLLVEAAKLLNTEAPDLYIRQNPVPNAYTLAINGKKPFIVVHTSLVELLTPRELQAVLAHELGHLKCDHGVWLTFANILTMGAYTVPGFGMVAGFLEEQLYRWLRAAELTCDRAALLVVQDPKVVISVLMKLAGGCPSLADKLNVDAFLEQARSYDKAASNPVGWYIRNAQTRELSHPLPVMRAREIDEWSRSQEYKTVMQKMLKMGLNRV

SEQ ID NO: 13313 - protein, 335 aa, Zea mays subsp. mays
  peptide (1)..(335): Ceres Seq. ID no. 12411312
MAASPACAPGLISGPTLPPLPVAFRCYWAQKPSSASTSSRRPCRRRFVPVAAASTRTSSAAARGLDADDFRHPLDKQNTLLLRAIPGLNDVGKALLGPVSEQVMVLQNIGTSVLVSPNQLPDLHQLLVEAAKLLNTEAPDLYIRQNPVPNAYTLAINGKKPFIVVHTSLVELLTPRELQAVLAHELGHLKCDHGVWLTFANILTMGAYTVPGFGMVAGFLEEQLYRWLRAAELTCDRAALLVVQDPKVVISVLMKLAGGCPSLADKLNVDAFLEQARSYDKAASNPVGWYIRNAQTRELSHPLPVMRAREIDEWSRSQEYKTVMQKMLKMGLNRV

SEQ ID NO: 13314 - protein, 232 aa, Zea mays subsp. mays
  peptide (1)..(232): Ceres Seq. ID no. 12411313
MVLQNIGTSVLVSPNQLPDLHQLLVEAAKLLNTEAPDLYIRQNPVPNAYTLAINGKKPFIVVHTSLVELLTPRELQAVLAHELGHLKCDHGVWLTFANILTMGAYTVPGFGMVAGFLEEQLYRWLRAAELTCDRAALLVVQDPKVVISVLMKLAGGCPSLADKLNVDAFLEQARSYDKAASNPVGWYIRNAQTRELSHPLPVMRAREIDEWSRSQEYKTVMQKMLKMGLNRV

SEQ ID NO: 13315 - DNA, 1306 bp, Zea mays subsp. mays
  misc_feature (1)..(1306): Ceres Seq. ID no. 12405880
  misc_feature (1)..(1306): Ortholog of  Ceres SEQ ID NO 12336358 as cited in SEQ ID NO 20733
  misc_feature (1)..(1306): Ortholog of  Ceres SEQ ID NO 12623467 as cited in SEQ ID NO 60951
acccaaccccaccttcattgattgattacagcccgttcatccttccttcccccgtcgaatcccaccttccttcccccgcccgttaagcagccgagtcagcagcaatggcggccgtgctgaggagagccgtggcgcagtgcttcgcgtcgtcgtcgtcgtcgtcgccggcgacgttcgggctccggcggttcctgcaggagcagccggcgttccgccccgccgtgccgcccgaccgcttcatgcccctggccgaccggatccgggacctcggggtcggcgtcgcattcccgcggatcaacctcgacggcctcgtgccgcccgcgccggcgccggcgccggccaagcgggagccggacgcggcgctgcccgcggcgagcctcacggtggaggaggcgcgcaaggtgctgcgcgccacacagatggaggcggcccgcgcgcggattcgggagtccggcgccggcgccgtgccgtacgccgacttcctgcgcctctgctgcgacgccgccggcccggacgcgggcccctccgtcgcgcgcgcgctcgacgagtccggatccgtcatcgtgctcggaaagaccgtcttcctcaggcccgacatggtcgtgaaggcaatcgagaacgcgatccccgtgcggcacgccgccgccgccgccgccgcggagatcgaccccgcgagggaggaggagctgagggccatggaggcggagaaggcggagatcgaccgcgcggcggcggcgcgggtgcggcgggagctgtggtgcgggctgacgtacctggtgatccagacggccgggttcatgcggctcaccttctgggagctgtcgtgggacgtgatggagcccatctgcttctacgtcacgtccatgtacttcatggccggctacgccttcttcctccgcaccaagaaggagccgtcgttcgaaggcttcttcgagagccggttcgcggccaagcagaagcgcgtgatgcgcgcccggggcttcgacctccgcaggtacgaggagctccggagagcctgcggcgtggcggcgccgccgctccaggcccggaccccctgcgcgagccgggcgcggcgcgggagagcggccattgccactcctactgccattgccattgatcttggcctcgctcggttcattcctttctttttttctttgttgttcatgcccatttggtggggatgatgattcgtgtatccatctgatgcgcgcgcggatgcaaaaaaaaaagaagcatactgaattgaggtttaaacttggaaccagggcgtccaaatgatgcataagccatgtccgactgttcgtcc

SEQ ID NO: 13316 - protein, 359 aa, Zea mays subsp. mays
  peptide (1)..(359): Ceres Seq. ID no. 12405881
MAAVLRRAVAQCFASSSSSSPATFGLRRFLQEQPAFRPAVPPDRFMPLADRIRDLGVGVAFPRINLDGLVPPAPAPAPAKREPDAALPAASLTVEEARKVLRATQMEAARARIRESGAGAVPYADFLRLCCDAAGPDAGPSVARALDESGSVIVLGKTVFLRPDMVVKAIENAIPVRHAAAAAAAEIDPAREEELRAMEAEKAEIDRAAAARVRRELWCGLTYLVIQTAGFMRLTFWELSWDVMEPICFYVTSMYFMAGYAFFLRTKKEPSFEGFFESRFAAKQKRVMRARGFDLRRYEELRRACGVAAPPLQARTPCASRARRGRAAIATPTAIAIDLGLARFIPFFFSLLFMPIWWG

SEQ ID NO: 13317 - protein, 314 aa, Zea mays subsp. mays
  peptide (1)..(314): Ceres Seq. ID no. 12405882
MPLADRIRDLGVGVAFPRINLDGLVPPAPAPAPAKREPDAALPAASLTVEEARKVLRATQMEAARARIRESGAGAVPYADFLRLCCDAAGPDAGPSVARALDESGSVIVLGKTVFLRPDMVVKAIENAIPVRHAAAAAAAEIDPAREEELRAMEAEKAEIDRAAAARVRRELWCGLTYLVIQTAGFMRLTFWELSWDVMEPICFYVTSMYFMAGYAFFLRTKKEPSFEGFFESRFAAKQKRVMRARGFDLRRYEELRRACGVAAPPLQARTPCASRARRGRAAIATPTAIAIDLGLARFIPFFFSLLFMPIWWG

SEQ ID NO: 13318 - protein, 254 aa, Zea mays subsp. mays
  peptide (1)..(254): Ceres Seq. ID no. 12405883
MEAARARIRESGAGAVPYADFLRLCCDAAGPDAGPSVARALDESGSVIVLGKTVFLRPDMVVKAIENAIPVRHAAAAAAAEIDPAREEELRAMEAEKAEIDRAAAARVRRELWCGLTYLVIQTAGFMRLTFWELSWDVMEPICFYVTSMYFMAGYAFFLRTKKEPSFEGFFESRFAAKQKRVMRARGFDLRRYEELRRACGVAAPPLQARTPCASRARRGRAAIATPTAIAIDLGLARFIPFFFSLLFMPIWWG

SEQ ID NO: 13319 - DNA, 1482 bp, Zea mays subsp. mays
  misc_feature (1)..(1482): Ceres Seq. ID no. 12366791
  misc_feature (1)..(1482): Ortholog of  Ceres SEQ ID NO 13594345 as cited in SEQ ID NO 58043
  misc_feature (1)..(1482): Ortholog of  Ceres SEQ ID NO 13596180 as cited in SEQ ID NO 67941
  misc_feature (1)..(1482): Ortholog of  Ceres SEQ ID NO 14313563 as cited in SEQ ID NO 68700
cagtaggtggaccattctgtcgtgctcacccaatgccaatggagtcggttgcggtcgtggcggtgccgttcccggcgcagggccaccttaacgcgctgctgcacctgtcgctgcagctggcggcgcgcggggtacccgtacactacgcggcgcccatggagcacgtccgccaggcccggtcgcgcgttcaaggctggggcgacgacaccctctgccgcgtacacttccacgagctctccgtctccgcgtacgcctccccgccgccagaccctgccgccgaatcggccttcccctcgcacctcgtgcccatgtgggaggccttcaccaccgacgcgcccgccccgctcgcggcgctcctcggcgggatctccgcctcctgccgccgcttcgtcgtcctgtacgacatcgccaacgggttcgccgccgaagaggccgcgcggctgcccaacggcgaggggttcgggctggtgtgcaccgcggtgtcgtgcatcgtcgggcggacggacgccggcagccggctcgtgcgtgagcgcgggctcgacttcttccccgtcaactcctttgtgacggaggagtttctggctaccgtcggcaagcgggcgagatgggcgcagtccataccgtgcagcgtcggcatcctcgccaacacctgccgcgcgctcgagggtgagttcatcgatattttcgcgcagcagcttgccgccgccggcaagaacctctttgtcgtcggccccttgaacccactactgctgccggacgcgaggtcgcccaagcatggaattagcaaggagcgccacgagtgcctggactggctcgacctgcagccgccggcatcggtggtctacgtgtcgttgggttctacgtcgtcgctgcgagacgagcaagtcgaggagctcgcatctgcgctgcgcgacagcaagcagcggttcatctgggtgctgcgcgacgccgaccgggccaacatattcgcggaccacggcgagagcccccggcacgccaagttcctgcccgagttcgctgaacacacccaggacagggggctggtgatcaccgggtgggcgccgcagctggagatcctggcgcacggcgccacggcggcgttcctgagccactgcggctggaactcgatcatggagagcatgggacacgggaagcccatcctcgcctggcccatgcactccgaccagccatgggacgctgagctcgtatgcaagcaccacaaggcgggcatcctgatccgcccgatggagaagcaaagggaggtgatttcggcagcggccatacaggaggcaatcgagaagatgatggtctctgatgaaggctacaagatccaacagcgcgcaatggcgctgggccaagctatccgtgcgtcagcagcagtaggcggtgggtcagagaacaaggacctggataagttcattgcccacatctcaaggtgatttggggatttctggttggtttgggaaatgtcaagcatatttc

SEQ ID NO: 13320 - protein, 478 aa, Zea mays subsp. mays
  peptide (1)..(478): Ceres Seq. ID no. 12366792
VGGPFCRAHPMPMESVAVVAVPFPAQGHLNALLHLSLQLAARGVPVHYAAPMEHVRQARSRVQGWGDDTLCRVHFHELSVSAYASPPPDPAAESAFPSHLVPMWEAFTTDAPAPLAALLGGISASCRRFVVLYDIANGFAAEEAARLPNGEGFGLVCTAVSCIVGRTDAGSRLVRERGLDFFPVNSFVTEEFLATVGKRARWAQSIPCSVGILANTCRALEGEFIDIFAQQLAAAGKNLFVVGPLNPLLLPDARSPKHGISKERHECLDWLDLQPPASVVYVSLGSTSSLRDEQVEELASALRDSKQRFIWVLRDADRANIFADHGESPRHAKFLPEFAEHTQDRGLVITGWAPQLEILAHGATAAFLSHCGWNSIMESMGHGKPILAWPMHSDQPWDAELVCKHHKAGILIRPMEKQREVISAAAIQEAIEKMMVSDEGYKIQQRAMALGQAIRASAAVGGGSENKDLDKFIAHISR

SEQ ID NO: 13321 - protein, 468 aa, Zea mays subsp. mays
  peptide (1)..(468): Ceres Seq. ID no. 12366793
MPMESVAVVAVPFPAQGHLNALLHLSLQLAARGVPVHYAAPMEHVRQARSRVQGWGDDTLCRVHFHELSVSAYASPPPDPAAESAFPSHLVPMWEAFTTDAPAPLAALLGGISASCRRFVVLYDIANGFAAEEAARLPNGEGFGLVCTAVSCIVGRTDAGSRLVRERGLDFFPVNSFVTEEFLATVGKRARWAQSIPCSVGILANTCRALEGEFIDIFAQQLAAAGKNLFVVGPLNPLLLPDARSPKHGISKERHECLDWLDLQPPASVVYVSLGSTSSLRDEQVEELASALRDSKQRFIWVLRDADRANIFADHGESPRHAKFLPEFAEHTQDRGLVITGWAPQLEILAHGATAAFLSHCGWNSIMESMGHGKPILAWPMHSDQPWDAELVCKHHKAGILIRPMEKQREVISAAAIQEAIEKMMVSDEGYKIQQRAMALGQAIRASAAVGGGSENKDLDKFIAHISR

SEQ ID NO: 13322 - protein, 466 aa, Zea mays subsp. mays
  peptide (1)..(466): Ceres Seq. ID no. 12366794
MESVAVVAVPFPAQGHLNALLHLSLQLAARGVPVHYAAPMEHVRQARSRVQGWGDDTLCRVHFHELSVSAYASPPPDPAAESAFPSHLVPMWEAFTTDAPAPLAALLGGISASCRRFVVLYDIANGFAAEEAARLPNGEGFGLVCTAVSCIVGRTDAGSRLVRERGLDFFPVNSFVTEEFLATVGKRARWAQSIPCSVGILANTCRALEGEFIDIFAQQLAAAGKNLFVVGPLNPLLLPDARSPKHGISKERHECLDWLDLQPPASVVYVSLGSTSSLRDEQVEELASALRDSKQRFIWVLRDADRANIFADHGESPRHAKFLPEFAEHTQDRGLVITGWAPQLEILAHGATAAFLSHCGWNSIMESMGHGKPILAWPMHSDQPWDAELVCKHHKAGILIRPMEKQREVISAAAIQEAIEKMMVSDEGYKIQQRAMALGQAIRASAAVGGGSENKDLDKFIAHISR

SEQ ID NO: 13323 - DNA, 1299 bp, Zea mays subsp. mays
  misc_feature (1)..(1299): Ceres Seq. ID no. 12407378
  misc_feature (1)..(1299): Ortholog of  Ceres SEQ ID NO 15227018 as cited in SEQ ID NO 0
gcacgagaccattacctagaacatcctaatcgaaaaccccattgtttccatccgcaccggagggcggtcccgatacaagcaacggcaacgcctcccctctcctccacctccccacctatattgattctgattcatccacccagcaggcagcagctacagcaagatggtgcacccgatcgcggaggccgacgagcggagccccttcggccgcctgacgccggacgagttctacgcgcgccacggcgtgacccactccgnctcgtccttcgtcaacccgcgggggctccgcatcttcacccagcgctgggtgcccagtggggacgcccccgtcctgggcgccgtcgccgtcgtgcacggcttcaccggagagtctagctggacaatccagctcnccgccgtccacctcgccgccgcgggcttcgccgtcgccgcgctcgaccaccagggccacggcttctccgagggcctccagggccacctccccgacatcaaccccgtgctcgacgactgcgacgccgccttcgcgcccttccgcgccgactacccgccgccgctcccctgcttcctctacggggagtcgctcggcggcgccatcgcgctgctgctccacctgcggaacagggacctgtggcgggacggggccgtgctcaacggcgccatgtgcggggtcagcccgaggttcaagccgccgtggccgctcgagcacctgctcgccgcagccgccgccgtcgtccccacctggcgcgtcgccttcacgcggggcaacatccccgagcgctccttcaaggtggactggaagcgggcgctcgcgctcgcctccccgcgccgnaccacggcgccgcccagggcggncacggcgctcgagctcctccgcgtctgccgcgagctgcagcggcgattcgaggaggtgcagctgccgctcctcgtcgtgcacggcgccgaggacaccgtctgcgacccggcctgcgtcgaggagctctgcaggcgcgccgggagcaaggacaagacgcttcgcatctacccagggatgtggcaccagattgtcggcgagcccgaggagaacgtggagaaggtgttcgacgatatcatagactggctcaaggcacgcgccaccgctacagccgcgggcgcgcaccacggcgagcagtagtttgggcacgcctcctgcgtgcgtgcgtgccatggccaggcttgccttcaaccgcgcgtggtccattcaccatcccagattctatcctaggttccttccagctatattcgagtacggatccagcaataaacttgtgctgtctgctgatt

SEQ ID NO: 13324 - protein, 328 aa, Zea mays subsp. mays
  peptide (1)..(328): Ceres Seq. ID no. 12407379
  misc_feature (32)..(32): Xaa is any aa, unknown or other
  misc_feature (77)..(77): Xaa is any aa, unknown or other
  misc_feature (222)..(222): Xaa is any aa, unknown or other
  misc_feature (230)..(230): Xaa is any aa, unknown or other
MVHPIAEADERSPFGRLTPDEFYARHGVTHSXSSFVNPRGLRIFTQRWVPSGDAPVLGAVAVVHGFTGESSWTIQLXAVHLAAAGFAVAALDHQGHGFSEGLQGHLPDINPVLDDCDAAFAPFRADYPPPLPCFLYGESLGGAIALLLHLRNRDLWRDGAVLNGAMCGVSPRFKPPWPLEHLLAAAAAVVPTWRVAFTRGNIPERSFKVDWKRALALASPRXTTAPPRAXTALELLRVCRELQRRFEEVQLPLLVVHGAEDTVCDPACVEELCRRAGSKDKTLRIYPGMWHQIVGEPEENVEKVFDDIIDWLKARATATAAGAHHGEQ

SEQ ID NO: 13325 - DNA, 1614 bp, Zea mays subsp. mays
  misc_feature (1)..(1614): Ceres Seq. ID no. 12368767
  misc_feature (1)..(1614): Ortholog of  Ceres SEQ ID NO 15176230 as cited in SEQ ID NO 58796
  misc_feature (1)..(1614): Ortholog of  Ceres SEQ ID NO 14308156 as cited in SEQ ID NO 59006
  misc_feature (1)..(1614): Ortholog of  Ceres SEQ ID NO 13596321 as cited in SEQ ID NO 67976
acggatggttcccaggctcccagcacagaatccacctccgccgtcaccaccgagcaacgcgcgccggcgcccttctatttcttccagcccctgctccgccgccgccgctctcctccccgcacccccgccctgtttcgccatcggcccatcgcggcacctgcccgtgccacctgaggctgggaactccaaagaggaacagcgtccatggaggctggaggcgcaggaagtggtttgaatggggcggtgcaggcaaaggggactggggctgatggtggctctgccaaaccgctgccgccttgctgcgtcaaggccagagccgccgcgccggagtccgaggccaggtgccacgccaccgtcgtttcaggatggttcactgaaccgcgatcgcgctgtggcaaagccagcaaagttcagtattacaataacccgatgtggccaggagaggccaattctttgaaagtggagaagatcttgtaccaggggaaatcgccataccaagaagtcttagtcttcgagtcgtcgacctatggtaaagtccttgtgcttgatggtattgttcagttgactgacaaggatgaatgtgcataccaggaaatgattactcacctgccactttgctcaattccatcccctaaaaaagttttggttattggtggtggtgatggaggtgtacttcgagaggtatccaggcatagttcagtggagtccattgacatatgtgagattgatcagctggttattgatgtgtgcaaagatttcttcccacacttgtctgttggatttcaagatcctcgtgttcaacttcatgtcggcgatgctgtggagttcttgagaaatgctcctgaggggacatatgatgctatcattgttgattcgtcagatccaatagggcctgctcaggaacttgtagagaagcctttttttgatacgattgctagagctttgaggcctggaggcgttctttgtaatcaagctgagagtatgtggttacatacacatttggttcaggatatgctttcaatttgccgtgaaactttcaagggttctgtacgctatgcatggacaagtgtcccaacatacccgagtggggtgattggatttttactatgtgccaaagaaggtccattggtgaactttctgactcctataaatccaattgaaaagctggaaggagctacaaaagctggaagggagatcagattttataactcagagatgcatagggcagcatttgttctcccgacctttgcaaggagagagctagaagcatattgcgtttccactgaaacagagcaagcggaggaaacaccggcggcaccactgaagttgactcttgcatccaggagtgaaattttcgctacatcctagctagaccaggactcgcgatgtaccacaagatatcaagaaaccattccttccttcctggtgccgtacctccagtatcgccattggttcatagtcttactatcacatgctatgagacgcataatgaggcatcatgtcagtaattcagtatccaaacaatgagatgagattggcatgctaagaaaggacgagctgatattacaatgtactcccttcaccatgtcagtaatttattgtccaaacaattag

SEQ ID NO: 13326 - protein, 387 aa, Zea mays subsp. mays
  peptide (1)..(387): Ceres Seq. ID no. 12368768
MEAGGAGSGLNGAVQAKGTGADGGSAKPLPPCCVKARAAAPESEARCHATVVSGWFTEPRSRCGKASKVQYYNNPMWPGEANSLKVEKILYQGKSPYQEVLVFESSTYGKVLVLDGIVQLTDKDECAYQEMITHLPLCSIPSPKKVLVIGGGDGGVLREVSRHSSVESIDICEIDQLVIDVCKDFFPHLSVGFQDPRVQLHVGDAVEFLRNAPEGTYDAIIVDSSDPIGPAQELVEKPFFDTIARALRPGGVLCNQAESMWLHTHLVQDMLSICRETFKGSVRYAWTSVPTYPSGVIGFLLCAKEGPLVNFLTPINPIEKLEGATKAGREIRFYNSEMHRAAFVLPTFARRELEAYCVSTETEQAEETPAAPLKLTLASRSEIFATS

SEQ ID NO: 13327 - protein, 312 aa, Zea mays subsp. mays
  peptide (1)..(312): Ceres Seq. ID no. 12368769
MWPGEANSLKVEKILYQGKSPYQEVLVFESSTYGKVLVLDGIVQLTDKDECAYQEMITHLPLCSIPSPKKVLVIGGGDGGVLREVSRHSSVESIDICEIDQLVIDVCKDFFPHLSVGFQDPRVQLHVGDAVEFLRNAPEGTYDAIIVDSSDPIGPAQELVEKPFFDTIARALRPGGVLCNQAESMWLHTHLVQDMLSICRETFKGSVRYAWTSVPTYPSGVIGFLLCAKEGPLVNFLTPINPIEKLEGATKAGREIRFYNSEMHRAAFVLPTFARRELEAYCVSTETEQAEETPAAPLKLTLASRSEIFATS

SEQ ID NO: 13328 - protein, 257 aa, Zea mays subsp. mays
  peptide (1)..(257): Ceres Seq. ID no. 12368770
MITHLPLCSIPSPKKVLVIGGGDGGVLREVSRHSSVESIDICEIDQLVIDVCKDFFPHLSVGFQDPRVQLHVGDAVEFLRNAPEGTYDAIIVDSSDPIGPAQELVEKPFFDTIARALRPGGVLCNQAESMWLHTHLVQDMLSICRETFKGSVRYAWTSVPTYPSGVIGFLLCAKEGPLVNFLTPINPIEKLEGATKAGREIRFYNSEMHRAAFVLPTFARRELEAYCVSTETEQAEETPAAPLKLTLASRSEIFATS

SEQ ID NO: 13329 - DNA, 1364 bp, Zea mays subsp. mays
  misc_feature (1)..(1364): Ceres Seq. ID no. 12351866
  misc_feature (1)..(1364): Ortholog of  Ceres SEQ ID NO 13581804 as cited in SEQ ID NO 51424
  misc_feature (1)..(1364): Ortholog of  Ceres SEQ ID NO 14307797 as cited in SEQ ID NO 54802
  misc_feature (1)..(1364): Ortholog of  Ceres SEQ ID NO 15168374 as cited in SEQ ID NO 55652
  misc_feature (1)..(1364): Ortholog of  Ceres SEQ ID NO 15169703 as cited in SEQ ID NO 59628
  misc_feature (1)..(1364): Ortholog of  Ceres SEQ ID NO 13663874 as cited in SEQ ID NO 67003
  misc_feature (1)..(1364): Ortholog of  Ceres SEQ ID NO 13624654 as cited in SEQ ID NO 0
gtgtctctcgcgtcgcgcccggccgtcgcctcccctccctccctgcaccgaccgatccctcccctgatcccctcttcacatcctaccacctctttaaagctacccagctacctgcctgcctcgcctcaacctcgccggcggccgcagccgcatagaccggaagagaaaggaagcagagatcggaggcaggcgaagatggggcgcggcaaggtgcagctgaagcggatagagaacaagataaaccggcaggtgaccttctccaagcgccggaacgggctgctgaagaaggcgcacgagatctccgtcctctgcgacgccgaggtcgccgtcatcgtcttctcccccaagggcaagctctacgagtacgcctccgactcccgcatggacaaaattctagaacgttatgagcgatattcctatgctgaaaaggctcttatttcagctgaatctgaaagtgagggaaattggtgccacgaatacaggaaactgaaggccaaaattgagaccatacaaagatgccacaagcacctgatgggagaggatctagagtctttgaatccaaaagagctccaacaactagagcagcagctggagagctcactgaagcacatcagatcaagaaagagccaccttatggccgagtcaatttctgagctacagaagaaggagaggtcactgcaggaggagaacaagattctacagaaggaactttcagagaggcagaaggcggtcgctagccggcagcagcagcagcagcaggtgcagtgggaccagcagacacaggtccaggtccagacaagctcatcgtcttcttccttcatgatgaggcaggatcagcagggactgccacctccacaaaacatctgcttcccgccgttgagcatcggagagagaggcgaagaggtggctgcggcggcgcagcagcagctgcctcctccggggcaggcgcaaccacagctccgcatcgcaggtctgccgccatggatgctgagccacctcaatgcataaggagggcgagcaaatggcgtgcgaagtgattgattgctcaccgttgattgaacgctagcctaagttcatggcggcagcaaactaagctaaaactattgttatgtttgcaaggaagggtagggtaacccgctgtgtaatctttgtccagctagcatgtaccaactgagatgcatgcatgcttattattgtccaattacccgtgaatctagcggtgcttttggtgagaggccggccggacgggtgcagtttacttcaaatatggtttgtgattttgtgtaaatagtattaactaggagtcctatggtaagtaaattaattaatgggaggatgcatgaataaaacctctcttgtgctgc

SEQ ID NO: 13330 - protein, 335 aa, Zea mays subsp. mays
  peptide (1)..(335): Ceres Seq. ID no. 12351867
VSLASRPAVASPPSLHRPIPPLIPSSHPTTSLKLPSYLPASPQPRRRPQPHRPEEKGSRDRRQAKMGRGKVQLKRIENKINRQVTFSKRRNGLLKKAHEISVLCDAEVAVIVFSPKGKLYEYASDSRMDKILERYERYSYAEKALISAESESEGNWCHEYRKLKAKIETIQRCHKHLMGEDLESLNPKELQQLEQQLESSLKHIRSRKSHLMAESISELQKKERSLQEENKILQKELSERQKAVASRQQQQQQVQWDQQTQVQVQTSSSSSSFMMRQDQQGLPPPQNICFPPLSIGERGEEVAAAAQQQLPPPGQAQPQLRIAGLPPWMLSHLNA

SEQ ID NO: 13331 - protein, 270 aa, Zea mays subsp. mays
  peptide (1)..(270): Ceres Seq. ID no. 12351868
MGRGKVQLKRIENKINRQVTFSKRRNGLLKKAHEISVLCDAEVAVIVFSPKGKLYEYASDSRMDKILERYERYSYAEKALISAESESEGNWCHEYRKLKAKIETIQRCHKHLMGEDLESLNPKELQQLEQQLESSLKHIRSRKSHLMAESISELQKKERSLQEENKILQKELSERQKAVASRQQQQQQVQWDQQTQVQVQTSSSSSSFMMRQDQQGLPPPQNICFPPLSIGERGEEVAAAAQQQLPPPGQAQPQLRIAGLPPWMLSHLNA

SEQ ID NO: 13332 - protein, 208 aa, Zea mays subsp. mays
  peptide (1)..(208): Ceres Seq. ID no. 12351869
MDKILERYERYSYAEKALISAESESEGNWCHEYRKLKAKIETIQRCHKHLMGEDLESLNPKELQQLEQQLESSLKHIRSRKSHLMAESISELQKKERSLQEENKILQKELSERQKAVASRQQQQQQVQWDQQTQVQVQTSSSSSSFMMRQDQQGLPPPQNICFPPLSIGERGEEVAAAAQQQLPPPGQAQPQLRIAGLPPWMLSHLNA

SEQ ID NO: 13333 - DNA, 1697 bp, Zea mays subsp. mays
  misc_feature (1)..(1697): Ceres Seq. ID no. 12341336
  misc_feature (1)..(1697): Ortholog of  Ceres SEQ ID NO 13596803 as cited in SEQ ID NO 62267
acaaaccgagcggcggccgccgcctcccttttcgtctctgactttttctacaagctcattcttcctcccccgatctcgggagcagccgaagcatgtcctggcggtggactctcgcgcgccgcgtcgccacgctggccgcgatcggtggcggcggtgcccaggcgcagaggctcctgtccacctcgtcagccggcggtggcactggcctcctgggtcggcactacatacccctcgcctcccagattcggagcaaggtagttggttgcagaggagctgctcttgtgagctccagatggttgcatgaggcccaataccaggttcgccaggacggggcttccagggctcaggaacagcaagatccatttgaattagtcgccgatgagctatcacttcttgcaaataggttacgatccatggtggctgctgaggtccccaaactggcatcagcagctgagtactttttcaaggtgggagcagagggaaaaagattccgacctacggttttgttgctcatggcatcagctctgaaatttcctttgtcagagtcaacagaaggaagagttctcagtatattggcagataaactccgcacaaggcaacagaacattgctgagataactgaaatgattcatgtcgcaagccttctgcatgatgatgttcttgatgatgctgatactaggcgtggtgtcagttcattgaatctcatcatggggaacaagctttctgtgctggctggtgatttccttctgtctagagcatgtgtggcccttgcagcacttgggaacacagaggtggtttctctaatggcaactgctgtagaacatctagttactggtgaaactatgcagatctcaacaagcagagagcaacggcgaagcatggagtactacctgcagaagacatactacaaaacggcatcattgatatcaaatagttgcaaggctgttgctattcttgcagggcacacaactgaggtctcggtgcttgcatatgaatatggtcgaaacctgggtctagccttccagttaattgatgatgttcttgatttcaccggcacctctgcatcccttgggaagggttcattgtctgatattcgccacggaattattactgccccgatgctatatgcgatggaggaattcccacaactgcaagaagttgttgaccggggttttgataatcctgcaaatgttgaaattgcccttgactatctccagaagagccgtgggattgaaaagacaaaagagcttgcacgagaacatgctgatcgtgcagtcaaggctatagaatctctacctgatagcgacgacgaggatgttctgacttcaaggcgtgctcttattgatatcacagaaagagtcatcacacggacaaaataggaaggtgttcggcgtccataaggtgaatggagagctgaacctcgcctttggcctagtgtttcacttggattttcttttttgtatacttcggttcattgcattcttttcgcagccaaaaccccaagttttgtgtatcattgctgaaatttaggattaagaaatggccctgcatttctgggaagcttctagaggttttggctgcatgtggcaacaaaatatatgtcaccgattgcaatggcaccagatatcgtgtagccatataagtgtgggagcattgtacccaatatacactcccgtaaagactaagatagtactacc

SEQ ID NO: 13334 - protein, 428 aa, Zea mays subsp. mays
  peptide (1)..(428): Ceres Seq. ID no. 12341337
MSWRWTLARRVATLAAIGGGGAQAQRLLSTSSAGGGTGLLGRHYIPLASQIRSKVVGCRGAALVSSRWLHEAQYQVRQDGASRAQEQQDPFELVADELSLLANRLRSMVAAEVPKLASAAEYFFKVGAEGKRFRPTVLLLMASALKFPLSESTEGRVLSILADKLRTRQQNIAEITEMIHVASLLHDDVLDDADTRRGVSSLNLIMGNKLSVLAGDFLLSRACVALAALGNTEVVSLMATAVEHLVTGETMQISTSREQRRSMEYYLQKTYYKTASLISNSCKAVAILAGHTTEVSVLAYEYGRNLGLAFQLIDDVLDFTGTSASLGKGSLSDIRHGIITAPMLYAMEEFPQLQEVVDRGFDNPANVEIALDYLQKSRGIEKTKELAREHADRAVKAIESLPDSDDEDVLTSRRALIDITERVITRTK

SEQ ID NO: 13335 - protein, 321 aa, Zea mays subsp. mays
  peptide (1)..(321): Ceres Seq. ID no. 12341338
MVAAEVPKLASAAEYFFKVGAEGKRFRPTVLLLMASALKFPLSESTEGRVLSILADKLRTRQQNIAEITEMIHVASLLHDDVLDDADTRRGVSSLNLIMGNKLSVLAGDFLLSRACVALAALGNTEVVSLMATAVEHLVTGETMQISTSREQRRSMEYYLQKTYYKTASLISNSCKAVAILAGHTTEVSVLAYEYGRNLGLAFQLIDDVLDFTGTSASLGKGSLSDIRHGIITAPMLYAMEEFPQLQEVVDRGFDNPANVEIALDYLQKSRGIEKTKELAREHADRAVKAIESLPDSDDEDVLTSRRALIDITERVITRTK

SEQ ID NO: 13336 - protein, 288 aa, Zea mays subsp. mays
  peptide (1)..(288): Ceres Seq. ID no. 12341339
MASALKFPLSESTEGRVLSILADKLRTRQQNIAEITEMIHVASLLHDDVLDDADTRRGVSSLNLIMGNKLSVLAGDFLLSRACVALAALGNTEVVSLMATAVEHLVTGETMQISTSREQRRSMEYYLQKTYYKTASLISNSCKAVAILAGHTTEVSVLAYEYGRNLGLAFQLIDDVLDFTGTSASLGKGSLSDIRHGIITAPMLYAMEEFPQLQEVVDRGFDNPANVEIALDYLQKSRGIEKTKELAREHADRAVKAIESLPDSDDEDVLTSRRALIDITERVITRTK

SEQ ID NO: 13337 - DNA, 1511 bp, Zea mays subsp. mays
  misc_feature (1)..(1511): Ceres Seq. ID no. 12365082
  misc_feature (1)..(1511): Ortholog of  Ceres SEQ ID NO 15176941 as cited in SEQ ID NO 55559
gcacgagaccattacctagaacatcctaatcgaaaagagcaaaggccaaagaacacggagaggctaaggctatccacacccacacagagtctaatcaagcttacagcccagaagcgtcacagacatggggaacgcagcagttgcaatcatatcttcagtctcggcaactgcgacggtagtagtaatgatcgccctcatcagaaggtgccgcgtcgtgaggaagaagataaagaagaaaatcgtaaagaaagtcttggaggagatcgagcggaagaaccgcgtgggggcagcctgcgacgccttggaagacgtggtgatcgagatcgttcccgtggagaagttcctcaacgagatcctgaacgagaagccgatgcgtttcagctccgagcagctggcggcctgcaccaagaactactcgtcggagctggggtccggcggctacggcgtggtctacaagggtgagctgcccaacggcctgctggtggccgtgaaggtgctcaaggtgtccatgaacaagaaggtgcaggaggcgttcatggcggagatcggcaccatcgggcggacgtaccacgtgcacctcgtccgcctctacggcttctgcttcgacgcggacaccaaggcgctggtgtacgagttcctggagaaggggtcgctcgagaagtacctctactgtgacgagggcagcacggccacgcggctggagtgggcaacgctgcacggcatcgccgtcggcacggcgaaggggatcaggtacctgcacgaggagtgccagcagcggatcgtgcactacgacatcaagccggccaacatcctgctcacggccgactacaccccgaaggtggccgacttcgggctggcacggctgggcgagcgcgagaacacgcacatgtcactgaccggcggcggccgtgggacgcccgggtacgcggcgccggagctgtggatggcgctgccggcttcggagaagtgcgacgtgtacagctttggaatggtgttgttcgagatcctagggcggcgccggaactacgacccctgccagggcgagagcaaggagtggttcccgagatgggtctgggagaggtacgcgcagggtgagatcgaggacgtcgtggcctgcgacgggatcgttggagacgcggacagagagaaggcggagatgatgtgcaaggtggcgctgtggtgcgtgcagttccagccgtcggcgcgaccgacgatgagcagcgtggtgcggatgctggagggggagatggccatcgtcccgcccgtgaaccccttccactacgtcatggaaagcagcagtgcctcgactagctcggggttgtggagcggcacataccagagcagcagagacaccactgccagagaaagtgagctgtcggctagcccagctgccaagtcgactgacgccatgattgaagatgttgagcgggcttatgcgtcagtgttggcgaaacagagcttgtagtcttgtacacattaattattgagtaaaatgcatccgcgacggtggg

SEQ ID NO: 13338 - protein, 446 aa, Zea mays subsp. mays
  peptide (1)..(446): Ceres Seq. ID no. 12365083
MGNAAVAIISSVSATATVVVMIALIRRCRVVRKKIKKKIVKKVLEEIERKNRVGAACDALEDVVIEIVPVEKFLNEILNEKPMRFSSEQLAACTKNYSSELGSGGYGVVYKGELPNGLLVAVKVLKVSMNKKVQEAFMAEIGTIGRTYHVHLVRLYGFCFDADTKALVYEFLEKGSLEKYLYCDEGSTATRLEWATLHGIAVGTAKGIRYLHEECQQRIVHYDIKPANILLTADYTPKVADFGLARLGERENTHMSLTGGGRGTPGYAAPELWMALPASEKCDVYSFGMVLFEILGRRRNYDPCQGESKEWFPRWVWERYAQGEIEDVVACDGIVGDADREKAEMMCKVALWCVQFQPSARPTMSSVVRMLEGEMAIVPPVNPFHYVMESSSASTSSGLWSGTYQSSRDTTARESELSASPAAKSTDAMIEDVERAYASVLAKQSL

SEQ ID NO: 13339 - protein, 426 aa, Zea mays subsp. mays
  peptide (1)..(426): Ceres Seq. ID no. 12365084
MIALIRRCRVVRKKIKKKIVKKVLEEIERKNRVGAACDALEDVVIEIVPVEKFLNEILNEKPMRFSSEQLAACTKNYSSELGSGGYGVVYKGELPNGLLVAVKVLKVSMNKKVQEAFMAEIGTIGRTYHVHLVRLYGFCFDADTKALVYEFLEKGSLEKYLYCDEGSTATRLEWATLHGIAVGTAKGIRYLHEECQQRIVHYDIKPANILLTADYTPKVADFGLARLGERENTHMSLTGGGRGTPGYAAPELWMALPASEKCDVYSFGMVLFEILGRRRNYDPCQGESKEWFPRWVWERYAQGEIEDVVACDGIVGDADREKAEMMCKVALWCVQFQPSARPTMSSVVRMLEGEMAIVPPVNPFHYVMESSSASTSSGLWSGTYQSSRDTTARESELSASPAAKSTDAMIEDVERAYASVLAKQSL

SEQ ID NO: 13340 - protein, 364 aa, Zea mays subsp. mays
  peptide (1)..(364): Ceres Seq. ID no. 12365085
MRFSSEQLAACTKNYSSELGSGGYGVVYKGELPNGLLVAVKVLKVSMNKKVQEAFMAEIGTIGRTYHVHLVRLYGFCFDADTKALVYEFLEKGSLEKYLYCDEGSTATRLEWATLHGIAVGTAKGIRYLHEECQQRIVHYDIKPANILLTADYTPKVADFGLARLGERENTHMSLTGGGRGTPGYAAPELWMALPASEKCDVYSFGMVLFEILGRRRNYDPCQGESKEWFPRWVWERYAQGEIEDVVACDGIVGDADREKAEMMCKVALWCVQFQPSARPTMSSVVRMLEGEMAIVPPVNPFHYVMESSSASTSSGLWSGTYQSSRDTTARESELSASPAAKSTDAMIEDVERAYASVLAKQSL

SEQ ID NO: 13341 - DNA, 717 bp, Zea mays subsp. mays
  misc_feature (1)..(717): Ceres Seq. ID no. 12342442
  misc_feature (1)..(717): Ortholog of  Ceres SEQ ID NO 13596625 as cited in SEQ ID NO 62876
ctcctcccatcccgtgcagccggcctcaccgccggcgacgggacgcggagacccgggctgccggtaccgtcagccgtgctccttcctctcttcgtcgcccccgccaaaaccttcatctgccggggctgcaccggcggcgcggggacaacaaaagctcgagatccggtgactgatctcttcgttcctcggttcactttgatattccaacaaaggtcacattgctagactcccagattggttcctaacaatgagggcacatgaacgagctgccagtttggctcttgcctgtctgagcttggctccacttctggttaacgtaaacccaaatgtgaatgtggtattgacagcatgccttactgtctatgtgggttgctaccgatctgtgaagccaactccaccttctgagaccatgtccaaggagcatgctatgcggttccctttagttggaagcgctatgcttttatcactgttccttctattcaagtttctctcaaaagatttggtcaacgctgtgctcactgcctactttttcattctaggcattgttgctctctccgcaacactgcttccttctataaaacgttttcttccaaaagagtggaatgataatctcatcgtctggcgggctccattcttccactcactctcggtggagttcacaaagtcccagattgttgcctcaatacctggatttttcttttgcttgtggtatgcgtc

SEQ ID NO: 13342 - protein, 156 aa, Zea mays subsp. mays
  peptide (1)..(156): Ceres Seq. ID no. 12342443
MRAHERAASLALACLSLAPLLVNVNPNVNVVLTACLTVYVGCYRSVKPTPPSETMSKEHAMRFPLVGSAMLLSLFLLFKFLSKDLVNAVLTAYFFILGIVALSATLLPSIKRFLPKEWNDNLIVWRAPFFHSLSVEFTKSQIVASIPGFFFCLWYA

SEQ ID NO: 13343 - protein, 102 aa, Zea mays subsp. mays
  peptide (1)..(102): Ceres Seq. ID no. 12342444
MSKEHAMRFPLVGSAMLLSLFLLFKFLSKDLVNAVLTAYFFILGIVALSATLLPSIKRFLPKEWNDNLIVWRAPFFHSLSVEFTKSQIVASIPGFFFCLWYA

SEQ ID NO: 13344 - protein, 96 aa, Zea mays subsp. mays
  peptide (1)..(96): Ceres Seq. ID no. 12342445
MRFPLVGSAMLLSLFLLFKFLSKDLVNAVLTAYFFILGIVALSATLLPSIKRFLPKEWNDNLIVWRAPFFHSLSVEFTKSQIVASIPGFFFCLWYA

SEQ ID NO: 13345 - DNA, 1277 bp, Zea mays subsp. mays
  misc_feature (1)..(1277): Ceres Seq. ID no. 12411307
  misc_feature (1)..(1277): Ortholog of  Ceres SEQ ID NO 13594269 as cited in SEQ ID NO 57656
  misc_feature (1)..(1277): Ortholog of  Ceres SEQ ID NO 12613979 as cited in SEQ ID NO 68579
ggtttgactattttgcccccgccgcgtgagttgccaaacgattcccgagtcttctgacactccttgccgccgccgccgcctgtcgccgacggcgatagatttggggatggatttgggctcgtgctacctcggtgggaacgccgacgcggtggagttctgcccgcaccgccacgttcctccacgtgctggccgccgccacctacacgctgcaggagcaggagcgcgaccgggcgggcagcatatccctcttctcagttgacgttgcctcggaggacgcgtcccggaggctccagctgctgcatactgtggagaccgccggcatcttcgatatgaagtggagccccaagtcgccgctgctcgcgcaggccgacgcccacggccgcatcgcgctccggcgcttggagcaggaggacggctcggacacaggcatcctcctcacagatgtctctgctgaagatatttcttcttcaatgtgcttatatgtggactggaaccaaactgcggagtctctgtctgttggattatcagatggctcactgtctctggtttcagtgagagaggaccggctggagatatcagaacagtggactgcacatcagttcgaagtctggacatgctattttgatcgtacaagtccacacttgctgtacagtggatcagatgactgttgtttcagttgctgggacttgagagaaagcccaccaaacattgtttttcaaaacaaaaaatctcataagatgggtgtctgttgtattacacagaatccgttggaggggaacatgctacttactgggagttatgatgaatttctcagagtttgggacatgagatttatggcaaaacctgtcaatgaaaagttgataaatctaggaggtggtgtgtggaggatgaagtatcatcctagtattgcagatgttgtattggctgcgtgcatgcacaatgggtttgccattgtaaaagtaggttctggggatgctacggtaatggaaacatattgcaagcatgagtccttagcatacggtgcagattggcagaaaagtgaagaggtggagcaaaatggaaattcttcagttgttgctacttgttcgttttatgatcgcctcctccgcgtgtggcaaccagagaacctagctgagctttaaagacttaaagcttttttgaattgaattcaagcatgactaggccatgaatctatttcctgaatgaaccagtataatttcattcaggtagttctttgaacttatgcttacatattcaagacttcaaagtcatgcatg

SEQ ID NO: 13346 - protein, 270 aa, Zea mays subsp. mays
  peptide (1)..(270): Ceres Seq. ID no. 12411308
MKWSPKSPLLAQADAHGRIALRRLEQEDGSDTGILLTDVSAEDISSSMCLYVDWNQTAESLSVGLSDGSLSLVSVREDRLEISEQWTAHQFEVWTCYFDRTSPHLLYSGSDDCCFSCWDLRESPPNIVFQNKKSHKMGVCCITQNPLEGNMLLTGSYDEFLRVWDMRFMAKPVNEKLINLGGGVWRMKYHPSIADVVLAACMHNGFAIVKVGSGDATVMETYCKHESLAYGADWQKSEEVEQNGNSSVVATCSFYDRLLRVWQPENLAEL

SEQ ID NO: 13347 - protein, 223 aa, Zea mays subsp. mays
  peptide (1)..(223): Ceres Seq. ID no. 12411309
MCLYVDWNQTAESLSVGLSDGSLSLVSVREDRLEISEQWTAHQFEVWTCYFDRTSPHLLYSGSDDCCFSCWDLRESPPNIVFQNKKSHKMGVCCITQNPLEGNMLLTGSYDEFLRVWDMRFMAKPVNEKLINLGGGVWRMKYHPSIADVVLAACMHNGFAIVKVGSGDATVMETYCKHESLAYGADWQKSEEVEQNGNSSVVATCSFYDRLLRVWQPENLAEL

SEQ ID NO: 13348 - DNA, 1659 bp, Zea mays subsp. mays
  misc_feature (1)..(1659): Ceres Seq. ID no. 12374238
  misc_feature (1)..(1659): Ortholog of  Ceres SEQ ID NO 14314404 as cited in SEQ ID NO 57421
  misc_feature (1)..(1659): Ortholog of  Ceres SEQ ID NO 13493536 as cited in SEQ ID NO 58515
  misc_feature (1)..(1659): Ortholog of  Ceres SEQ ID NO 15225741 as cited in SEQ ID NO 59606
  misc_feature (1)..(1659): Ortholog of  Ceres SEQ ID NO 12618461 as cited in SEQ ID NO 64349
tccggcagcgaagctcccccctccctgcctccttccccggcgccccgctcttcctccttccgctccggcgatgggcactggccgccgcggcggcggcggcggcggcgtgttccaccgcctcctcgccctctcgtcgctgctgctcctcgcttccggcgaggtcgtcttcgaggagcgcttcgaagatggttgggagactcggtgggtggaatccgactggaaaaggagtgaagggaaagcaggaaggttcaagcacacagcggggagatactctgcagatcctgatgacaaaggaatacaaacaacaatagatgccagacattttgctatctcagccaagttcccggaattcagtaacaagaaccggacgcttgtggtccagtactccattaagtttgagcaggatattgaatgtggcggtggctatattaagcttatgtccggttatgtcaaccagaaaaaatttagtggggacactccgtacagcttgatgtttggaccagatatatgtggtactcaaacaaagaagctccatcttatactctcttaccaggggcagaactatcccatcaaaaaagatctagaatgtgagacggacaagttaacacacgtgtatactttcattcttaggcctgatgcatcttatagcctgcttgttgataaccgtgaaagagaatctgggagcatgtacactgattgggatattctccctcctcgtaaaattaaggatgttcacgccaaaaggcctaaggattgggatgacagagaatatattgaagatcctgatgaagttaagccagagggctatgattctatcccaaaacagattcctgatccgaaggacaaaaagcctgacacatgggatgaagatgaggatggaatatggaagcccagaatggtatcaaatccagcatacaagggaccttggaaacgcaagagaattaaaaatcctaactacaagggtaaatggaagaccccatggatcgataatccagagtttgaggatgatccagatctttatgtgctgaagcctttgaagtatattggaattgaagtttggcaggtaaaagctggttcagttttcgacaacattctgatttgtgatgaccctgagtatgcaagaaaggttgttgaggaaacttggggtgcaaatagggaggctgaaaaggaagcttttgaagaagctgaaaaggagaggaaagctagggaggatagggaaggtcaaaaggcaaaggacgatggtggccggcatcgaatacacaggcgtcataaaaaaacactacagagatcactgggacgactaccatgatgagctataaaagtccccaaatattgcattcctcaaaagcataagctggaagttgcttcggacattgtgggtgcttttcaataataataattgattcgcctggtcagaacaacctgaagtgtttcttgctatgcgccaacaaattattgaactacaggatttgatatgtaatggacaaccgaagatctgcagggcattccagcgaaaacttggctctggtactgaaatagaggggacgagagactgtagtttgtgtctgtacaacggtgccggccatgtgctagctttgtaatctcaaaacattgtctttgcatgaataatgtaagttacccaaaaattactgcataccg

SEQ ID NO: 13349 - protein, 435 aa, Zea mays subsp. mays
  peptide (1)..(435): Ceres Seq. ID no. 12374239
PAAKLPPPCLLPRRPALPPSAPAMGTGRRGGGGGGVFHRLLALSSLLLLASGEVVFEERFEDGWETRWVESDWKRSEGKAGRFKHTAGRYSADPDDKGIQTTIDARHFAISAKFPEFSNKNRTLVVQYSIKFEQDIECGGGYIKLMSGYVNQKKFSGDTPYSLMFGPDICGTQTKKLHLILSYQGQNYPIKKDLECETDKLTHVYTFILRPDASYSLLVDNRERESGSMYTDWDILPPRKIKDVHAKRPKDWDDREYIEDPDEVKPEGYDSIPKQIPDPKDKKPDTWDEDEDGIWKPRMVSNPAYKGPWKRKRIKNPNYKGKWKTPWIDNPEFEDDPDLYVLKPLKYIGIEVWQVKAGSVFDNILICDDPEYARKVVEETWGANREAEKEAFEEAEKERKAREDREGQKAKDDGGRHRIHRRHKKTLQRSLGRLP

SEQ ID NO: 13350 - protein, 412 aa, Zea mays subsp. mays
  peptide (1)..(412): Ceres Seq. ID no. 12374240
MGTGRRGGGGGGVFHRLLALSSLLLLASGEVVFEERFEDGWETRWVESDWKRSEGKAGRFKHTAGRYSADPDDKGIQTTIDARHFAISAKFPEFSNKNRTLVVQYSIKFEQDIECGGGYIKLMSGYVNQKKFSGDTPYSLMFGPDICGTQTKKLHLILSYQGQNYPIKKDLECETDKLTHVYTFILRPDASYSLLVDNRERESGSMYTDWDILPPRKIKDVHAKRPKDWDDREYIEDPDEVKPEGYDSIPKQIPDPKDKKPDTWDEDEDGIWKPRMVSNPAYKGPWKRKRIKNPNYKGKWKTPWIDNPEFEDDPDLYVLKPLKYIGIEVWQVKAGSVFDNILICDDPEYARKVVEETWGANREAEKEAFEEAEKERKAREDREGQKAKDDGGRHRIHRRHKKTLQRSLGRLP

SEQ ID NO: 13351 - protein, 290 aa, Zea mays subsp. mays
  peptide (1)..(290): Ceres Seq. ID no. 12374241
MSGYVNQKKFSGDTPYSLMFGPDICGTQTKKLHLILSYQGQNYPIKKDLECETDKLTHVYTFILRPDASYSLLVDNRERESGSMYTDWDILPPRKIKDVHAKRPKDWDDREYIEDPDEVKPEGYDSIPKQIPDPKDKKPDTWDEDEDGIWKPRMVSNPAYKGPWKRKRIKNPNYKGKWKTPWIDNPEFEDDPDLYVLKPLKYIGIEVWQVKAGSVFDNILICDDPEYARKVVEETWGANREAEKEAFEEAEKERKAREDREGQKAKDDGGRHRIHRRHKKTLQRSLGRLP

SEQ ID NO: 13352 - DNA, 1616 bp, Zea mays subsp. mays
  misc_feature (1)..(1616): Ceres Seq. ID no. 12351870
  misc_feature (1)..(1616): Ortholog of  Ceres SEQ ID NO 12372734 as cited in SEQ ID NO 1206
  misc_feature (1)..(1616): Ortholog of  Ceres SEQ ID NO 13584160 as cited in SEQ ID NO 63677
aaacacagtcaccaccacctacacccccgttgtctcctctccttccattgccacagtcggccttctccgtggaagccggcgggccgccgcctcctttgtccctgtcgtcgtgctcttccgtaccgccattccctagcactgtccacgggcgagatctcgcgtgtacctcgtttccctcggcgggtggatcagtgacggcttggtcgagatggacgatgtggttgatgacatcatctgtggaacggatgcggcggttgccgtcgaggatggggccagtgggacgcccgcaatgcctagcttagggtgccagggtgaggaagagcataggaagggcaatgaggacaactcaggtgagagcgaggtgattaacccggccagcaagaggctggcggggaggccacctcgcccctggaaggcaggaagcctcgcctttccaaggggaatcaaagccatgtacctaaggctgtcaaatctaagagtccaaggagtggagatgaaaatcagacaaggagaaaagctcccaactcttcttttcctaaggcacccattgtccaggagtcccatggtgactctggtgtcggcagtaataaagctggcaagaatgagtctcactcatccccaattgatgcagcattgcccgatgagtccaaggagaaaaggaaaactcaaaagccaccagcacagctctcttccatcaaaagagatgaagaacagtcaaatggtgagagtgcaaagcctcgcaaagttggaagcacgccatcatatggtttcaccttcaagtgtgatgagagatctgaaaaaagacgagagttctattcgaagcttgaggagaagattcatgcaagagagttagaaataagcaatttgcaagccaagtcaaaggaaactgaagaagcagaactcaaaatgctgagaaagagtttgaatttcaaggcaacaccaatgccaagcttttataaggaaccaacccctgccaaggttgaattgaaaaagatccccccaaccagagctaaatcaccaaagcttggtcggtctaaaaacaagtccatatcagagactgaagaaaatactactacggaccaacctgcccgtctgagccttgacgaaaaggtttctcaaaacggtgtgaaaaaaccaaccccgtcgagttcagcaaagaagccccagagaaagtcactccccaggctgccatctgaagaaacttgtccgcttgatgccacctcaaggcagctgaagaacaacaaactggatgaagttaatgctcaggagacaggatcagctacagggcaggtacaaggaagtgagacggaaacagattctgttcagagcgcaactcaagctggagctaaccctgatgaacagagtgtcgctcagtgaacagagtgtcgctcagtgaagatctcggtggccaagccaagtgatttgtgatggatggtgtgccttatctttgtgtgatgttgtgcttgtctactagagtgacttgtggcctgtatcatgctgtgttatactcctgtttttgttttcctgcgattgagcctgtatgttgcttatcaatctagatagcttttgttcataatctacagatatatccaaattgtcctaagtcatttgcagtt

SEQ ID NO: 13353 - protein, 214 aa, Zea mays subsp. mays
  peptide (1)..(214): Ceres Seq. ID no. 12351871
MDDVVDDIICGTDAAVAVEDGASGTPAMPSLGCQGEEEHRKGNEDNSGESEVINPASKRLAGRPPRPWKAGSLAFPRGIKAMYLRLSNLRVQGVEMKIRQGEKLPTLLFLRHPLSRSPMVTLVSAVIKLARMSLTHPQLMQHCPMSPRRKGKLKSHQHSSLPSKEMKNSQMVRVQSLAKLEARHHMVSPSSVMRDLKKDESSIRSLRRRFMQES

SEQ ID NO: 13354 - protein, 187 aa, Zea mays subsp. mays
  peptide (1)..(187): Ceres Seq. ID no. 12351872
MPSLGCQGEEEHRKGNEDNSGESEVINPASKRLAGRPPRPWKAGSLAFPRGIKAMYLRLSNLRVQGVEMKIRQGEKLPTLLFLRHPLSRSPMVTLVSAVIKLARMSLTHPQLMQHCPMSPRRKGKLKSHQHSSLPSKEMKNSQMVRVQSLAKLEARHHMVSPSSVMRDLKKDESSIRSLRRRFMQES

SEQ ID NO: 13355 - protein, 156 aa, Zea mays subsp. mays
  peptide (1)..(156): Ceres Seq. ID no. 12351873
MLRKSLNFKATPMPSFYKEPTPAKVELKKIPPTRAKSPKLGRSKNKSISETEENTTTDQPARLSLDEKVSQNGVKKPTPSSSAKKPQRKSLPRLPSEETCPLDATSRQLKNNKLDEVNAQETGSATGQVQGSETETDSVQSATQAGANPDEQSVAQ

SEQ ID NO: 13356 - DNA, 1534 bp, Zea mays subsp. mays
  misc_feature (1)..(1534): Ceres Seq. ID no. 12435123
  misc_feature (1)..(1534): Ortholog of  Ceres SEQ ID NO 15169092 as cited in SEQ ID NO 60430
  misc_feature (1)..(1534): Ortholog of  Ceres SEQ ID NO 14303680 as cited in SEQ ID NO 66019
  misc_feature (1)..(1534): Ortholog of  Ceres SEQ ID NO 15224940 as cited in SEQ ID NO 0
caatattgctgcttcagaacatgaaataactgggcctaacaccctctctactgacttcctcagctacgtggaatctgaagttttaagacttgaacagcttaaagcgagcaagatgaaagacctcgttcttaaaaagaagacagaactggaagatcataggagacgtgctcatttgattggtgaggaaggttatgcagccgaatttagcgatgaggctattgaggcaggagctgtcgatcctgcgctggtgctggaacaaattgaggctcacattgccacagtgaaagaggaagcttttagccgtaaggatattcttgagaaggttgaaagatggctgaatgcatgtgaggaggaagcttggctggaagattataacaaagacgacaatcgttataatgccgggaggggggcccacttgacactcaaaagggctgagaaagctcgtattttggttaacaagatcccaggactggtagatgttttgaccacaaaaattgtagcttgggagacagaaagaggaaaggagttcacatatgatggtgtccgcctgcggtcaatgcttgaagactacataatcattcgccaggagaaagagctagagaagaagaggcaaagggatcagaagaagatccaggatcaactcaaagcctgagcaggaagcgctgtatggatcaaaaccaagtccatctaagactcaaagcacgaagaaggtgcctagacaatccatgggtggtgcgaaccgaagactgtctcttggtggagccacaacgcaagcccccaaaacagatataatgcactccaagacagctcgtgctgcgaagaaggctgaagatttgggcgctttatctcctagtagcagaggcttggacattgccggtcttcccatcaagaaactatctttcaacgcaagcactctgcgagaggcagaaacaccacgcaagccttttgcccagatcatgccaggaaacaatgtctcgtcgatgcctgcgcggcccatctccaacgacacagaggaagagaacaaaacccccaaaacatttgcagggctcaatccaaaaacgccggtgacagtgacggctcctatgcagttggcggtgacaccagctgtggccaacaaggtcatagccactcctgcaacccttttccaggagaaggcagagtcgccagcgctgcctggggaccatcgagtactcgttcgaagagaggcgactcgccgtttacctggccaggcaagtggcattttttgttcattcaccttctcccagttgcgctaatacccagctattacttagttgaaagctgagctgactgcgatttctcggcagaggccaatgttacctgttggtcgatactcgatagtagtgggcctcggtcttactttgcactactattcattcatagccatattgctactagccagtaaagggagtttttagtcttgagagcttgtggtctgcatcgtaagttgtatagctttatacggtgcatcgtcgatgacctgttattgttattatatggtttattactgttatcc

SEQ ID NO: 13357 - protein, 216 aa, Zea mays subsp. mays
  peptide (1)..(216): Ceres Seq. ID no. 12435124
NIAASEHEITGPNTLSTDFLSYVESEVLRLEQLKASKMKDLVLKKKTELEDHRRRAHLIGEEGYAAEFSDEAIEAGAVDPALVLEQIEAHIATVKEEAFSRKDILEKVERWLNACEEEAWLEDYNKDDNRYNAGRGAHLTLKRAEKARILVNKIPGLVDVLTTKIVAWETERGKEFTYDGVRLRSMLEDYIIIRQEKELEKKRQRDQKKIQDQLKA

SEQ ID NO: 13358 - protein, 182 aa, Zea mays subsp. mays
  peptide (1)..(182): Ceres Seq. ID no. 12435125
MGGANRRLSLGGATTQAPKTDIMHSKTARAAKKAEDLGALSPSSRGLDIAGLPIKKLSFNASTLREAETPRKPFAQIMPGNNVSSMPARPISNDTEEENKTPKTFAGLNPKTPVTVTAPMQLAVTPAVANKVIATPATLFQEKAESPALPGDHRVLVRREATRRLPGQASGIFCSFTFSQLR

SEQ ID NO: 13359 - protein, 179 aa, Zea mays subsp. mays
  peptide (1)..(179): Ceres Seq. ID no. 12435126
MKDLVLKKKTELEDHRRRAHLIGEEGYAAEFSDEAIEAGAVDPALVLEQIEAHIATVKEEAFSRKDILEKVERWLNACEEEAWLEDYNKDDNRYNAGRGAHLTLKRAEKARILVNKIPGLVDVLTTKIVAWETERGKEFTYDGVRLRSMLEDYIIIRQEKELEKKRQRDQKKIQDQLKA

SEQ ID NO: 13360 - DNA, 945 bp, Zea mays subsp. mays
  misc_feature (1)..(945): Ceres Seq. ID no. 13577751
  misc_feature (1)..(945): Ortholog of  Ceres SEQ ID NO 13596339 as cited in SEQ ID NO 68009
aattttgcttccggctgccgctcttctccgccgccgccccgatccccttcctccccaagcccttcaactatccactcccgcgtccccggagaagcggcgagatgtacggcatcctgacctccccctgccctcgagccccgcttctccgcgctctcccgagcccatccgcccgcgcattccccagaacactagccttccccgcgaggcccctcccccgcggtctccgcctgacccctccgcacgcmgmmgcggaggcatyggcggcagcacggcgttgggcgggcttctggcgtcgccgctctcgactctggaggccgccctgcggggcctcaacctcgcgccccttcgcgcccccgtggcggcggcgatgtcggcggccgtgcggtggctgggagtgtaccgggaggtgctgctcgtcggcgtgctgctctcctggttccccaacatcccctgggaccgccagcccttctcggccctgcgcgacctctgcgaccccttcctcgccctgtgccgtgaggtcatgccccccgtgttcgggcgcaagctcgacctcagcccgcttgttgcattcatggctattgacatcatcatcatgatcctgcgcccgcagccacgcatgtgatgactccctgcagcagtgggtttggacgatgttggttggtatgttaggctctgactgcaggaacaaggatctaaggctgttttcggtcatcagatggcaaagaaaggtgctgtgccgctcacctctatcagtacacaagtgcggtggttggatggattagttttgcgatcttagcatagctgttatggagggtgtaatgcaatataaatgatttcgatgtggcttcattcccaaaacttcctttttctcgtgtcctgtggttgttgtagtaatatgtgttggctacgtttacgtattggtaatcccagttttggtcagtgccc

SEQ ID NO: 13361 - protein, 206 aa, Zea mays subsp. mays
  peptide (1)..(206): Ceres Seq. ID no. 15222656
  misc_feature (82)..(82): Xaa is any aa, unknown or other
  misc_feature (83)..(83): Xaa is any aa, unknown or other
  misc_feature (86)..(86): Xaa is any aa, unknown or other
ILLPAAALLRRRPDPLPPQALQLSTPASPEKRRDVRHPDLPLPSSPASPRSPEPIRPRIPQNTSLPREAPPPRSPPDPSARXXGGXGGSTALGGLLASPLSTLEAALRGLNLAPLRAPVAAAMSAAVRWLGVYREVLLVGVLLSWFPNIPWDRQPFSALRDLCDPFLALCREVMPPVFGRKLDLSPLVAFMAIDIIIMILRPQPRM

SEQ ID NO: 13362 - protein, 197 aa, Zea mays subsp. mays
  peptide (1)..(197): Ceres Seq. ID no. 15222657
  misc_feature (81)..(81): Xaa is any aa, unknown or other
  misc_feature (82)..(82): Xaa is any aa, unknown or other
  misc_feature (86)..(86): Xaa is any aa, unknown or other
FCFRLPLFSAAAPIPFLPKPFNYPLPRPRRSGEMYGILTSPCPRAPLLRALPSPSARAFPRTLAFPARPLPRGLRLTPPHXXAEAXAAARRWAGFWRRRSRLWRPPCGASTSRPFAPPWRRRCRRPCGGWECTGRCCSSACCSPGSPTSPGTASPSRPCATSATPSSPCAVRSCPPCSGASSTSARLLHSWLLTSSS

SEQ ID NO: 13363 - protein, 164 aa, Zea mays subsp. mays
  peptide (1)..(164): Ceres Seq. ID no. 15222658
  misc_feature (48)..(48): Xaa is any aa, unknown or other
  misc_feature (49)..(49): Xaa is any aa, unknown or other
  misc_feature (53)..(53): Xaa is any aa, unknown or other
MYGILTSPCPRAPLLRALPSPSARAFPRTLAFPARPLPRGLRLTPPHXXAEAXAAARRWAGFWRRRSRLWRPPCGASTSRPFAPPWRRRCRRPCGGWECTGRCCSSACCSPGSPTSPGTASPSRPCATSATPSSPCAVRSCPPCSGASSTSARLLHSWLLTSSS

SEQ ID NO: 13364 - DNA, 1270 bp, Zea mays subsp. mays
  misc_feature (1)..(1270): Ceres Seq. ID no. 13496142
  misc_feature (1)..(1270): Ortholog of  Ceres SEQ ID NO 14315518 as cited in SEQ ID NO 60467
  misc_feature (1)..(1270): Ortholog of  Ceres SEQ ID NO 12585444 as cited in SEQ ID NO 62814
tagaacatcctaatcgaaaatccacctttcccgcaccttgttgcacataaaaattcccacgccccgcacccaacgacctccgcgtccgcccccaaaacccccgcaaaccctagccgccgccagctaggcaaggaatggccgccctcctgcggctcgccgcagcccgatccgccctccccaggcgcgccctcgccccacaccggaggctcgcggcggcggcggcggccgcgatggaggagtggtggtccgactgggagcaggacggcgaggaggaggcgcgcgcctcggcgccggccgccggccttgaccccgccggcgggggccccgggggcgtgcagtgggtcgtcatgggccgccctggcccgcagaagcacgcccacgccgcgcgcctctccgaggtgctcgccgtgccctacatctccatgggcgcgctcctcaggcaggagctcaacccctcctcgcaactctacaggaagattgcaaactctgtgaatgaagggaggcttgtgccggaggacatcatatttgggttgctgacgaagcggcttgaggacggatacaacaagggtgaaaatgggttcattcttgatgggattccacgcacccgtatgcaagctgagattcttgacgagattgtggatgttgatttggttcttaatttcaagtgtgctgatggctgtttcatgaagaagcaatcgagaggcaacatctgcgcccactgtggacagctctttgacgtcagcaattcagcatctacgaactgtagccccagcctcgggagctatacatggcattctcaggcagaacctgctggtgttttaggcctcgaagcctcaaggatggagaggatgcgcacatatgctgagcagaccaagcagctggaagattactacaagaagcagaggaaaattgtggaactgaagacatctgctcgcccggtggagacatggcaggggctcgtagccgccctgcacctccagcatctggactcgcccccgacaccgcacaaactcaccgcgtaaatatcattattaattttgctacctccgagtagagagtctaaaggatcagaattccgatcctgcctgcagcatatctaatatccctatgtttgtgggttctggctcgagagagtcagtcggctgtcttttgttttgttttgttattgttatagataaaggtaagcgattttgcagacacgcttattgtatggttgtaaccgagagttgtggacttgccttggcttgcgagtgtactcgcttatatgctc

SEQ ID NO: 13365 - protein, 295 aa, Zea mays subsp. mays
  peptide (1)..(295): Ceres Seq. ID no. 13496143
MAALLRLAAARSALPRRALAPHRRLAAAAAAAMEEWWSDWEQDGEEEARASAPAAGLDPAGGGPGGVQWVVMGRPGPQKHAHAARLSEVLAVPYISMGALLRQELNPSSQLYRKIANSVNEGRLVPEDIIFGLLTKRLEDGYNKGENGFILDGIPRTRMQAEILDEIVDVDLVLNFKCADGCFMKKQSRGNICAHCGQLFDVSNSASTNCSPSLGSYTWHSQAEPAGVLGLEASRMERMRTYAEQTKQLEDYYKKQRKIVELKTSARPVETWQGLVAALHLQHLDSPPTPHKLTA

SEQ ID NO: 13366 - protein, 263 aa, Zea mays subsp. mays
  peptide (1)..(263): Ceres Seq. ID no. 13496144
MEEWWSDWEQDGEEEARASAPAAGLDPAGGGPGGVQWVVMGRPGPQKHAHAARLSEVLAVPYISMGALLRQELNPSSQLYRKIANSVNEGRLVPEDIIFGLLTKRLEDGYNKGENGFILDGIPRTRMQAEILDEIVDVDLVLNFKCADGCFMKKQSRGNICAHCGQLFDVSNSASTNCSPSLGSYTWHSQAEPAGVLGLEASRMERMRTYAEQTKQLEDYYKKQRKIVELKTSARPVETWQGLVAALHLQHLDSPPTPHKLTA

SEQ ID NO: 13367 - protein, 224 aa, Zea mays subsp. mays
  peptide (1)..(224): Ceres Seq. ID no. 13496145
MGRPGPQKHAHAARLSEVLAVPYISMGALLRQELNPSSQLYRKIANSVNEGRLVPEDIIFGLLTKRLEDGYNKGENGFILDGIPRTRMQAEILDEIVDVDLVLNFKCADGCFMKKQSRGNICAHCGQLFDVSNSASTNCSPSLGSYTWHSQAEPAGVLGLEASRMERMRTYAEQTKQLEDYYKKQRKIVELKTSARPVETWQGLVAALHLQHLDSPPTPHKLTA

SEQ ID NO: 13368 - DNA, 1906 bp, Zea mays subsp. mays; identical to SEQ ID NO: 1877
  misc_feature (1)..(1906): Ceres Seq. ID no. 13498491
  misc_feature (1)..(1906): Ortholog of  Ceres SEQ ID NO 15178736 as cited in SEQ ID NO 56439

SEQ ID NO: 13369 - protein, 224 aa, Zea mays subsp. mays; identical to SEQ ID NO: 1878
  peptide (1)..(224): Ceres Seq. ID no. 13498492

SEQ ID NO: 13370 - protein, 200 aa, Zea mays subsp. mays; identical to SEQ ID NO: 1879
  peptide (1)..(200): Ceres Seq. ID no. 13498493

SEQ ID NO: 13371 - protein, 148 aa, Zea mays subsp. mays; identical to SEQ ID NO: 1880
  peptide (1)..(148): Ceres Seq. ID no. 13498494

SEQ ID NO: 13372 - DNA, 1704 bp, Zea mays subsp. mays
  misc_feature (1)..(1704): Ceres Seq. ID no. 13492801
  misc_feature (1)..(1704): Ortholog of  Ceres SEQ ID NO 14306557 as cited in SEQ ID NO 53442
acaaattagatgggcattcacatcagatcgagtgttttgattactttagtggtggtgattttgataagctatatatagtcaccggctctcaagataaaactgccaagatctgggactgcgagaatgcgggctgtgtccagacactggaaggacatgcaggtcccgttagagctgtctgttaccatcagaatctctcgttattaattacagggtgctctgacggatcaattcatctatggaactccactaccttcaggcttgagcataaactgaactttgctgacttcggattactgagttctgtagcttgtttgaaaggatcgaaaaggattgcaatcagaagcagggaaggattagcacttgtagacatagacatagaggacaagaaggatagcgatgtggagagcatcacgactactgcttccatgaacgacacaggtccaattacagaagagaacggagtggcagcagaccatatctctgatgaccacctggcgcagggcgtagtatatgtacatacagagattataggcaaagtcaattcagcatgcaccatagacgtccatccgacaaagccatggatggtcatcactcaagctaacaagtttgttcatgtttgggactaccatacaaaggtagtggaatggacgattcagattaagggagcgaaagttagttcagctaaatttatagccagccaggattggattgtggcgggtactacccgtggattcctccacgtgtacgattgcgaatcgaggaaggaaatacgccgtctttgtgaacacccgaaatctatcacgtcattggctgttgacgatgatgcccttgagctggtgctgtcagcgtccatcgatggcaagattttgatctggagctactggcactactatcacgcacgtagacgtagtacctggcatttggaaaaaacatttgacgcgggaagccagtgtctgaagcaagtcgcgtttattgctccaagtgtccatcgcagcagcagcactatcatcgctactgctcgagacggaacagtaaagatttgggatcccgatcgttctgacggatgccgtgagttcacattggctgcggattcaggtcagattgttgaatgtttcgattggtttagtcgtggtactgatatatacttggtcaccggttctcgagacaacactgccaagatctgggacatagaggatgggagttgtgtccgaacactggaaggacacgcagatcatgttaccgttgtctgttaccatccggatctttcaatgctcattacaggttcaagggacggctcgattcgtctgtggaactccactaccttcaggtttgagcatgagctgaactttgacctcgggtctctgagttctttagcttgtatcaagggatcaacaaggattgcaatcggatatgaaagaggtctagtactggcagacatttgcactcaggaacatagagcatgatctataaagcggcataataccttgagagcgacagaataaaatctaaacattgataaagcggcaaaaatccctggcaaacatttgctgatgcgatgggattgcatccaaacatttttcttggtaagctaatagactgcaataagtttttccatggacttgggaggtgtcgatctgcggatatgcttttgtatggtttaaacatatcatcggatagaaatttatactactatattaaaaattt

SEQ ID NO: 13373 - protein, 486 aa, Zea mays subsp. mays
  peptide (1)..(486): Ceres Seq. ID no. 13492802
KLDGHSHQIECFDYFSGGDFDKLYIVTGSQDKTAKIWDCENAGCVQTLEGHAGPVRAVCYHQNLSLLITGCSDGSIHLWNSTTFRLEHKLNFADFGLLSSVACLKGSKRIAIRSREGLALVDIDIEDKKDSDVESITTTASMNDTGPITEENGVAADHISDDHLAQGVVYVHTEIIGKVNSACTIDVHPTKPWMVITQANKFVHVWDYHTKVVEWTIQIKGAKVSSAKFIASQDWIVAGTTRGFLHVYDCESRKEIRRLCEHPKSITSLAVDDDALELVLSASIDGKILIWSYWHYYHARRRSTWHLEKTFDAGSQCLKQVAFIAPSVHRSSSTIIATARDGTVKIWDPDRSDGCREFTLAADSGQIVECFDWFSRGTDIYLVTGSRDNTAKIWDIEDGSCVRTLEGHADHVTVVCYHPDLSMLITGSRDGSIRLWNSTTFRFEHELNFDLGSLSSLACIKGSTRIAIGYERGLVLADICTQEHRA

SEQ ID NO: 13374 - protein, 345 aa, Zea mays subsp. mays
  peptide (1)..(345): Ceres Seq. ID no. 13492803
MNDTGPITEENGVAADHISDDHLAQGVVYVHTEIIGKVNSACTIDVHPTKPWMVITQANKFVHVWDYHTKVVEWTIQIKGAKVSSAKFIASQDWIVAGTTRGFLHVYDCESRKEIRRLCEHPKSITSLAVDDDALELVLSASIDGKILIWSYWHYYHARRRSTWHLEKTFDAGSQCLKQVAFIAPSVHRSSSTIIATARDGTVKIWDPDRSDGCREFTLAADSGQIVECFDWFSRGTDIYLVTGSRDNTAKIWDIEDGSCVRTLEGHADHVTVVCYHPDLSMLITGSRDGSIRLWNSTTFRFEHELNFDLGSLSSLACIKGSTRIAIGYERGLVLADICTQEHRA

SEQ ID NO: 13375 - protein, 293 aa, Zea mays subsp. mays
  peptide (1)..(293): Ceres Seq. ID no. 13492804
MVITQANKFVHVWDYHTKVVEWTIQIKGAKVSSAKFIASQDWIVAGTTRGFLHVYDCESRKEIRRLCEHPKSITSLAVDDDALELVLSASIDGKILIWSYWHYYHARRRSTWHLEKTFDAGSQCLKQVAFIAPSVHRSSSTIIATARDGTVKIWDPDRSDGCREFTLAADSGQIVECFDWFSRGTDIYLVTGSRDNTAKIWDIEDGSCVRTLEGHADHVTVVCYHPDLSMLITGSRDGSIRLWNSTTFRFEHELNFDLGSLSSLACIKGSTRIAIGYERGLVLADICTQEHRA

SEQ ID NO: 13376 - DNA, 1097 bp, Zea mays subsp. mays; identical to SEQ ID NO: 3807
  misc_feature (1)..(1097): Ceres Seq. ID no. 13494437
  misc_feature (1)..(1097): Ortholog of  Ceres SEQ ID NO 14304202 as cited in SEQ ID NO 56346
  misc_feature (1)..(1097): Ortholog of  Ceres SEQ ID NO 12613472 as cited in SEQ ID NO 60611

SEQ ID NO: 13377 - protein, 225 aa, Zea mays subsp. mays; identical to SEQ ID NO: 3808
  peptide (1)..(225): Ceres Seq. ID no. 13494438

SEQ ID NO: 13378 - protein, 149 aa, Zea mays subsp. mays; identical to SEQ ID NO: 3809
  peptide (1)..(149): Ceres Seq. ID no. 13494439

SEQ ID NO: 13379 - protein, 125 aa, Zea mays subsp. mays; identical to SEQ ID NO: 3810
  peptide (1)..(125): Ceres Seq. ID no. 13494440

SEQ ID NO: 13380 - DNA, 2056 bp, Zea mays subsp. mays
  misc_feature (1)..(2056): Ceres Seq. ID no. 12367419
  misc_feature (1)..(2056): Ortholog of  Ceres SEQ ID NO 14310841 as cited in SEQ ID NO 53666
  misc_feature (1)..(2056): Ortholog of  Ceres SEQ ID NO 15178736 as cited in SEQ ID NO 56439
  misc_feature (1)..(2056): Ortholog of  Ceres SEQ ID NO 14308493 as cited in SEQ ID NO 60320
accctcccacactccaccacccgcgccgccgcctcctactccgccccggcccctctgatccggaccgagcgccggccatggcgctcgccttcgacgagttcgggcgccccttcattatcctgcgggagcaggagaagaagacgcgccttcgggggcttgacgcgcagaaggccaacatcgcctcggccaaggccgtcgcgcggatcctccgcacgtcgctgggacccaagggcatggacaagatgctccagtcccccgacggcgacgtcatcatcacaaatgatggagcgaccatcctggagcagatggatgttgacaaccagatagcaaagctgatggtggagctgtcccgtagtcaagactatgaaatcggggatggtaccaccggggtggtagtcatggcaggggctcttctcgagcaggctgagaagcttctggagcgtggtattcaccccattagggtggctgaaggctatgagatggcgtcaaaggtagcttttgaccacctagaacatatatccgaaaagtttgagttcagtgcagacaacattgaacccctggtccagacctgcatgacaactctatcctcaaagattgttaaccgttgcaagcgggcgttggcagagattgctgtcaaagcagtacttgcggttgcagatttggagaggaaggatgttaacttggatctaattaaagtagaaggcaaggttggtgggaagctggaggacactgaacttgtatatggaattattgttgacaaagatatgagccatccacaaatgccaaagagaattgaggatgctaagattgccatcttgacatgcccatttgagcctccgaagccaaagacaaagcataaggttgacattgacactgtcgagaaattccagacactgcgtgagcaagagcagaaatactttgatgaaatggttcagaagtgcaaggatgctggtgcaaccctggttatttgccagtggggttttgatgatgaagccaatcatttattgatgcatagaaatctgccagcagtgagatgggttggtggtgttgaattggaactgattgccattgctacaggagggcggattgttccgagattccaagagttgagtcctgaaaagcttggaaaggctggattagtcagagagaaatcattcggaacaacaaaggaccggatgctttacattgagaagtgtgccaattctagagctgtaaccattttcatccgtgggggaaacaaaatgatgattgaggagaccaagcgcagtcttcatgatgctctttgcgtagcaaggaatctgatccggaataactcgattgtgtacggtggcggctcagccgagatatcttgctcaattgctgttgaaactgctgcagatcggcacccgggagttgagcagtatgctatcaggtcattcgctgatgcattagatgctgttccactagcgttggccgaaaacagtggtttgtcaccaattgataccttaactgcggtaaaagctcaacaagtcaaggagagcaacccccactgtggcatagactgcaacgacgttggcaccaccgacatgaaagaacagaacgtcttcgagaccctgattggcaagcagcaacagatcttgcttgccacccaggtggtgaagatgatcctgaagatcgacgatgtcatctcaccgtccgagtactgacggaaagaaggaacggatggctatgctggatatgcgtaggcggcattgctgatgtgttttgattggtgtacctccttgtccaggcttgctgcctaccactcactccctgtgtgacgttttgctgaaattggtttgtactgtgcacgataatatctggaaatagactctagacagtccttagttatctttttattatataaaaaaagtcagcgccttctcgttagggttgagatgtttgcagtattgatgcttttgtagtgtttttatagctcagcttaagctgtcatttttgtttgatgatttgcaatagttggacgccctcatgaacaaaatgcaatggttcatcttttggttcacatggacaaaatgtc

SEQ ID NO: 13381 - protein, 560 aa, Zea mays subsp. mays
  peptide (1)..(560): Ceres Seq. ID no. 12367420
PPTLHHPRRRLLLRPGPSDPDRAPAMALAFDEFGRPFIILREQEKKTRLRGLDAQKANIASAKAVARILRTSLGPKGMDKMLQSPDGDVIITNDGATILEQMDVDNQIAKLMVELSRSQDYEIGDGTTGVVVMAGALLEQAEKLLERGIHPIRVAEGYEMASKVAFDHLEHISEKFEFSADNIEPLVQTCMTTLSSKIVNRCKRALAEIAVKAVLAVADLERKDVNLDLIKVEGKVGGKLEDTELVYGIIVDKDMSHPQMPKRIEDAKIAILTCPFEPPKPKTKHKVDIDTVEKFQTLREQEQKYFDEMVQKCKDAGATLVICQWGFDDEANHLLMHRNLPAVRWVGGVELELIAIATGGRIVPRFQELSPEKLGKAGLVREKSFGTTKDRMLYIEKCANSRAVTIFIRGGNKMMIEETKRSLHDALCVARNLIRNNSIVYGGGSAEISCSIAVETAADRHPGVEQYAIRSFADALDAVPLALAENSGLSPIDTLTAVKAQQVKESNPHCGIDCNDVGTTDMKEQNVFETLIGKQQQILLATQVVKMILKIDDVISPSEY

SEQ ID NO: 13382 - protein, 535 aa, Zea mays subsp. mays
  peptide (1)..(535): Ceres Seq. ID no. 12367421
MALAFDEFGRPFIILREQEKKTRLRGLDAQKANIASAKAVARILRTSLGPKGMDKMLQSPDGDVIITNDGATILEQMDVDNQIAKLMVELSRSQDYEIGDGTTGVVVMAGALLEQAEKLLERGIHPIRVAEGYEMASKVAFDHLEHISEKFEFSADNIEPLVQTCMTTLSSKIVNRCKRALAEIAVKAVLAVADLERKDVNLDLIKVEGKVGGKLEDTELVYGIIVDKDMSHPQMPKRIEDAKIAILTCPFEPPKPKTKHKVDIDTVEKFQTLREQEQKYFDEMVQKCKDAGATLVICQWGFDDEANHLLMHRNLPAVRWVGGVELELIAIATGGRIVPRFQELSPEKLGKAGLVREKSFGTTKDRMLYIEKCANSRAVTIFIRGGNKMMIEETKRSLHDALCVARNLIRNNSIVYGGGSAEISCSIAVETAADRHPGVEQYAIRSFADALDAVPLALAENSGLSPIDTLTAVKAQQVKESNPHCGIDCNDVGTTDMKEQNVFETLIGKQQQILLATQVVKMILKIDDVISPSEY

SEQ ID NO: 13383 - protein, 483 aa, Zea mays subsp. mays
  peptide (1)..(483): Ceres Seq. ID no. 12367422
MDKMLQSPDGDVIITNDGATILEQMDVDNQIAKLMVELSRSQDYEIGDGTTGVVVMAGALLEQAEKLLERGIHPIRVAEGYEMASKVAFDHLEHISEKFEFSADNIEPLVQTCMTTLSSKIVNRCKRALAEIAVKAVLAVADLERKDVNLDLIKVEGKVGGKLEDTELVYGIIVDKDMSHPQMPKRIEDAKIAILTCPFEPPKPKTKHKVDIDTVEKFQTLREQEQKYFDEMVQKCKDAGATLVICQWGFDDEANHLLMHRNLPAVRWVGGVELELIAIATGGRIVPRFQELSPEKLGKAGLVREKSFGTTKDRMLYIEKCANSRAVTIFIRGGNKMMIEETKRSLHDALCVARNLIRNNSIVYGGGSAEISCSIAVETAADRHPGVEQYAIRSFADALDAVPLALAENSGLSPIDTLTAVKAQQVKESNPHCGIDCNDVGTTDMKEQNVFETLIGKQQQILLATQVVKMILKIDDVISPSEY

SEQ ID NO: 13384 - DNA, 1439 bp, Zea mays subsp. mays
  misc_feature (1)..(1439): Ceres Seq. ID no. 12355841
  misc_feature (1)..(1439): Ortholog of  Ceres SEQ ID NO 15227264 as cited in SEQ ID NO 66342
agttccacggttccacccccgccggccacactcgtctctctcacgagccacagcccacaggctagctctctagccagtccagtccacgcagcgcagggatggcgtcgttcgccgtggcaacggccccgtcgctagcggccccggcagccaagaggaggcccgccgccggcgtcacgtacgtggagtgcatgaaagcctacagcggcctcaaggggctcaacaaggtgaccatgctcggggtgcgcaagaccgccgactactccttcgccaaggtcgtggcatcgctcagcctcgcgggcaggaagcggcgcggaggagcgttcggcgcccagatgaggttttacgcttacacagtggtgacggttgcaccacgtgagcgagcgcagcgaagccaacacaactgccggcggacaagtgtccccatagacgagatccatggcggagcgccggaagagcgtctcctccgtgctgtttgcttcggcgcgcgccgggaggggataatggcagcagtgagctcggtctctattctgcccctcgcgtcgctgaggcctcttccgttgaggcgtgctgctaggaatgtgttggagggaggagggagaagggcttcgagtcccctgctcctcgcgaggtatgggctgtggcgcggacgcccggctgctgctgtgggcggcgaagcagagttggccctcgaagatgcggatgccgcgatgagggtggccgccgacgacgacagcatcacggccacggtggtgtccgtgctgctcacacttgcgttcgtcggcctctccatcctcaccctcggggtgatctacctgtcggtgcaggacttcttgcagaagagggaaaaggagaagtttgagaaggaggaggccgaaaagcagaaagaggaggcgaggaagaagagggctaagtcgaggcagaagagaagaaattattgatctcaggatgaactacccccaccaatatgctgtaacactgaactccattgccggctccattgcccggggttgtgctcacgccatcagttttggagtctcttggatgctgtaacactgaactccattgccggctccattgcccggggttgtgctcacgccatcagttttggagtccggaggagggaggaaaagcagggtagccagaatctctattggcgtcgcctgtttcattgtgttcatgatgatcctttcagtaataggcctttttaggaagtaaaggaaacgtttgtgctctggtttctgcaagaggtttgcacataaacaattttttattgctgtctaggctccaacctttggttgataaacactcacaataagtaacgaaggaataagaataaatgatgagagatataagaatatgaaaatgaataaatgatgtgacaggttgttgtagagcagcatgatctaagtgaatgcataactctactcttatattatatc

SEQ ID NO: 13385 - protein, 279 aa, Zea mays subsp. mays
  peptide (1)..(279): Ceres Seq. ID no. 12355842
MASFAVATAPSLAAPAAKRRPAAGVTYVECMKAYSGLKGLNKVTMLGVRKTADYSFAKVVASLSLAGRKRRGGAFGAQMRFYAYTVVTVAPRERAQRSQHNCRRTSVPIDEIHGGAPEERLLRAVCFGARREGIMAAVSSVSILPLASLRPLPLRRAARNVLEGGGRRASSPLLLARYGLWRGRPAAAVGGEAELALEDADAAMRVAADDDSITATVVSVLLTLAFVGLSILTLGVIYLSVQDFLQKREKEKFEKEEAEKQKEEARKKRAKSRQKRRNY

SEQ ID NO: 13386 - protein, 249 aa, Zea mays subsp. mays
  peptide (1)..(249): Ceres Seq. ID no. 12355843
MKAYSGLKGLNKVTMLGVRKTADYSFAKVVASLSLAGRKRRGGAFGAQMRFYAYTVVTVAPRERAQRSQHNCRRTSVPIDEIHGGAPEERLLRAVCFGARREGIMAAVSSVSILPLASLRPLPLRRAARNVLEGGGRRASSPLLLARYGLWRGRPAAAVGGEAELALEDADAAMRVAADDDSITATVVSVLLTLAFVGLSILTLGVIYLSVQDFLQKREKEKFEKEEAEKQKEEARKKRAKSRQKRRNY

SEQ ID NO: 13387 - protein, 235 aa, Zea mays subsp. mays
  peptide (1)..(235): Ceres Seq. ID no. 12355844
MLGVRKTADYSFAKVVASLSLAGRKRRGGAFGAQMRFYAYTVVTVAPRERAQRSQHNCRRTSVPIDEIHGGAPEERLLRAVCFGARREGIMAAVSSVSILPLASLRPLPLRRAARNVLEGGGRRASSPLLLARYGLWRGRPAAAVGGEAELALEDADAAMRVAADDDSITATVVSVLLTLAFVGLSILTLGVIYLSVQDFLQKREKEKFEKEEAEKQKEEARKKRAKSRQKRRNY

SEQ ID NO: 13388 - DNA, 1472 bp, Zea mays subsp. mays
  misc_feature (1)..(1472): Ceres Seq. ID no. 12554648
  misc_feature (1)..(1472): Ortholog of  Ceres SEQ ID NO 14311596 as cited in SEQ ID NO 51728
  misc_feature (1)..(1472): Ortholog of  Ceres SEQ ID NO 14307004 as cited in SEQ ID NO 59551
  misc_feature (1)..(1472): Ortholog of  Ceres SEQ ID NO 15177031 as cited in SEQ ID NO 60171
  misc_feature (1)..(1472): Ortholog of  Ceres SEQ ID NO 13661504 as cited in SEQ ID NO 61294
  misc_feature (1)..(1472): Ortholog of  Ceres SEQ ID NO 12617197 as cited in SEQ ID NO 63406
  misc_feature (1)..(1472): Ortholog of  Ceres SEQ ID NO 13597804 as cited in SEQ ID NO 64182
  misc_feature (1)..(1472): Ortholog of  Ceres SEQ ID NO 15179788 as cited in SEQ ID NO 64818
  misc_feature (1)..(1472): Ortholog of  Ceres SEQ ID NO 14302768 as cited in SEQ ID NO 64889
  misc_feature (1)..(1472): Ortholog of  Ceres SEQ ID NO 14301622 as cited in SEQ ID NO 65156
  misc_feature (1)..(1472): Ortholog of  Ceres SEQ ID NO 13598565 as cited in SEQ ID NO 65250
  misc_feature (1)..(1472): Ortholog of  Ceres SEQ ID NO 13598597 as cited in SEQ ID NO 65496
  misc_feature (1)..(1472): Ortholog of  Ceres SEQ ID NO 13596284 as cited in SEQ ID NO 68273
  misc_feature (1)..(1472): Ortholog of  Ceres SEQ ID NO 13596227 as cited in SEQ ID NO 68750
  misc_feature (1)..(1472): Ortholog of  Ceres SEQ ID NO 14308995 as cited in SEQ ID NO 0
  misc_feature (1)..(1472): Ortholog of  Ceres SEQ ID NO 15178902 as cited in SEQ ID NO 0
  misc_feature (1)..(1472): Ortholog of  Ceres SEQ ID NO 15179068 as cited in SEQ ID NO 0
aggatgaatcggaagagagaatcctaccaaacctagctaccaactcgatcgtcgtcatcacgctcgaccgcacaactgcaccgaggggggaggagacctaaaaactactacatcttttagctacacatctagctaaagatcgagaggggtaaataaggacgagcgggcgcgagctagaagagcagctgcaggtactaccatcatcgtcgtcgtcgtcgccaggatgaccgttgtcgacgccgtctcctccaccgatgccggcgccgccgccgccacggtaccggcggggaacgggcagaccgtgtgcgtcaccggcgcggccgggtacatcgcctcgtggttagtgaagctgctgctcgagaagggatacactgtgaagggcaccgtgaggaacccagatgacccgaagaacgcgcacctcaaggcgctggacggcgccgccgagcggctgatcctctgcaaggccgatctgctggactacgacgccatctgccgcgccgtgcagggctgccagggcgtcttccacaccgcctcccccgtcaccgacgacccggagcaaatggtggagccggcggtgcgcggcaccgagtacgtgatcaacgcggcggcggaggccggcacggtgcggcgggtggtgttcacgtcgtccatcggcgccgtgaccatggaccccaagcgcgggcccgacgtcgtggtcgacgagtcgtgctggagcgacctcgagttctgcgagaaaaccaggaactggtactgctacggcaaggcggtggcggagcaggcggcgtgggagacggcccggcggcggggcgtggacctggtggtggtgaaccccgtgctggtggtgggccccctgctgcaggcgacggtgaacgccagcatcgcgcacatcctcaagtacctggacggctcggcccgcaccttcgccaacgccgtgcaggcgtacgtggacgtgcgcgacgtggccgacgcgcacctccgcgtcttcgagagcccccgcgcgtccggccgccacctctgcgccgagcgcgtcctccaccgcgaggacgtcgtccgcatcctcgccaagctattccccgagtaccccgtcccagccaggtgctccgacgaggtgaatccgcgaaagcagccgtacaagttctccaaccagaagctccgggacctggggctgcagttccggccggtcagccagtcgctttacgacacggtgaagaacctccaggagaagggacacctgccggtgctcggagagcggacgacgacggaggccgccgacaaggatgcccccacggccgagatgcagcagggagggatcgccatccgtgcctgagagggcgatgccacacatgaacacaaagcaatgttcatactgctgccctgcacctgcaccttcccctgctgtgtaaacaggcctgtgtttgttctggctgatagtgatgtaccctaagacttgtaacgtcatgttcgttcttgtg

SEQ ID NO: 13389 - protein, 367 aa, Zea mays subsp. mays
  peptide (1)..(367): Ceres Seq. ID no. 12554649
MTVVDAVSSTDAGAAAATVPAGNGQTVCVTGAAGYIASWLVKLLLEKGYTVKGTVRNPDDPKNAHLKALDGAAERLILCKADLLDYDAICRAVQGCQGVFHTASPVTDDPEQMVEPAVRGTEYVINAAAEAGTVRRVVFTSSIGAVTMDPKRGPDVVVDESCWSDLEFCEKTRNWYCYGKAVAEQAAWETARRRGVDLVVVNPVLVVGPLLQATVNASIAHILKYLDGSARTFANAVQAYVDVRDVADAHLRVFESPRASGRHLCAERVLHREDVVRILAKLFPEYPVPARCSDEVNPRKQPYKFSNQKLRDLGLQFRPVSQSLYDTVKNLQEKGHLPVLGERTTTEAADKDAPTAEMQQGGIAIRA

SEQ ID NO: 13390 - protein, 255 aa, Zea mays subsp. mays
  peptide (1)..(255): Ceres Seq. ID no. 12554650
MVEPAVRGTEYVINAAAEAGTVRRVVFTSSIGAVTMDPKRGPDVVVDESCWSDLEFCEKTRNWYCYGKAVAEQAAWETARRRGVDLVVVNPVLVVGPLLQATVNASIAHILKYLDGSARTFANAVQAYVDVRDVADAHLRVFESPRASGRHLCAERVLHREDVVRILAKLFPEYPVPARCSDEVNPRKQPYKFSNQKLRDLGLQFRPVSQSLYDTVKNLQEKGHLPVLGERTTTEAADKDAPTAEMQQGGIAIRA

SEQ ID NO: 13391 - protein, 220 aa, Zea mays subsp. mays
  peptide (1)..(220): Ceres Seq. ID no. 12554651
MDPKRGPDVVVDESCWSDLEFCEKTRNWYCYGKAVAEQAAWETARRRGVDLVVVNPVLVVGPLLQATVNASIAHILKYLDGSARTFANAVQAYVDVRDVADAHLRVFESPRASGRHLCAERVLHREDVVRILAKLFPEYPVPARCSDEVNPRKQPYKFSNQKLRDLGLQFRPVSQSLYDTVKNLQEKGHLPVLGERTTTEAADKDAPTAEMQQGGIAIRA

SEQ ID NO: 13392 - DNA, 1411 bp, Zea mays subsp. mays
  misc_feature (1)..(1411): Ceres Seq. ID no. 12411284
  misc_feature (1)..(1411): Ortholog of  Ceres SEQ ID NO 13598373 as cited in SEQ ID NO 62185
  misc_feature (1)..(1411): Ortholog of  Ceres SEQ ID NO 12584664 as cited in SEQ ID NO 62232
  misc_feature (1)..(1411): Ortholog of  Ceres SEQ ID NO 15169537 as cited in SEQ ID NO 64197
agacgctccagaatccaaatacctttccatcgattcttggcatcgcccttctctctaaaccccaactcctcgactcgagcaatccctaggtctccgcgcgaggcggtggcggctgtgaggggattttgattgatttggctcgagatggcggaggacaaggtgcggcggatcttcgtcggcgggttgtcctggaagaccacggagcgcacgctcgagcgcaccttcggtcagtacggcaaggtcatcgaggcacaggttgtagtgaaaaaggaaacaggccgctcgaggggatttggatttgtcacattctcagaacctcgggctgtggatgctgccatttgtggaatgcataatgcggaactggatggccgtaatattactgtgaacaaagctaaacctaggattgctgactatggctatggtggtggtggtggtggttactcgtctggtgctagaggtggatatcgtagtggcggtgatgtagttccagcagtgagtgatgaatgtttcaaatgcggcctttctggacattgggctcgtcaatgcccttattcagatggcagtggtagaactggaagatattctcccgcttcaaggtatggtggtggcactgggagacatggtgaccgctttggaggatcagatcgttttgctcgctatgatgatgaccgatatgatggtggccgctatgtagacagcagggatacttattatggtgctgggcgagatcgttatgctaacgatcgccatccgccagcaacagacctctattctggtgacaggtacagtggtgcagatcgttacgcgtccagtggctttgccgggcgagatcgttatgctaacgatcgccatccgccagcaacagaccgctattctggtgacaggtacagtggtgcacgtcgttccgcgtccagtggctttgccagagaaaggagctatgagagagatggaggcaggtccactggaacttactaccgtgatgttccgaggggcactggtggctatggcagaggtggttcacgtggcggtagcggcggcggcggcgggcctgctcgctttggtgggagttaccgagataggcctgctccgtatgaccgtcctagcaggggcggggcagctcgtgcttatgatgatcgttactgaagaatgtttccttgaagtagaacagagatgttggtgtattttagttttgcatcagtatttgcacttgccagcttgatccttcaattctatgctattcagcagcgcagtttgttttagtggtctctgaagacaatggttcagtatgtcagttactatcagtatgttggtaccataatctgtaggcagtgatcctggtccatttgacatgtttgtgtaattgcttggagtctgcactaaataatgaactaatcgcagcatgtgatctttg

SEQ ID NO: 13393 - protein, 332 aa, Zea mays subsp. mays
  peptide (1)..(332): Ceres Seq. ID no. 12411285
MAEDKVRRIFVGGLSWKTTERTLERTFGQYGKVIEAQVVVKKETGRSRGFGFVTFSEPRAVDAAICGMHNAELDGRNITVNKAKPRIADYGYGGGGGGYSSGARGGYRSGGDVVPAVSDECFKCGLSGHWARQCPYSDGSGRTGRYSPASRYGGGTGRHGDRFGGSDRFARYDDDRYDGGRYVDSRDTYYGAGRDRYANDRHPPATDLYSGDRYSGADRYASSGFAGRDRYANDRHPPATDRYSGDRYSGARRSASSGFARERSYERDGGRSTGTYYRDVPRGTGGYGRGGSRGGSGGGGGPARFGGSYRDRPAPYDRPSRGGAARAYDDRY

SEQ ID NO: 13394 - protein, 265 aa, Zea mays subsp. mays
  peptide (1)..(265): Ceres Seq. ID no. 12411286
MHNAELDGRNITVNKAKPRIADYGYGGGGGGYSSGARGGYRSGGDVVPAVSDECFKCGLSGHWARQCPYSDGSGRTGRYSPASRYGGGTGRHGDRFGGSDRFARYDDDRYDGGRYVDSRDTYYGAGRDRYANDRHPPATDLYSGDRYSGADRYASSGFAGRDRYANDRHPPATDRYSGDRYSGARRSASSGFARERSYERDGGRSTGTYYRDVPRGTGGYGRGGSRGGSGGGGGPARFGGSYRDRPAPYDRPSRGGAARAYDDRY

SEQ ID NO: 13395 - protein, 168 aa, Zea mays subsp. mays
  peptide (1)..(168): Ceres Seq. ID no. 12411287
MVLGEIVMLTIAIRQQQTSILVTGTVVQIVTRPVALPGEIVMLTIAIRQQQTAILVTGTVVHVVPRPVALPEKGAMREMEAGPLELTTVMFRGALVAMAEVVHVAVAAAAAGLLALVGVTEIGLLRMTVLAGAGQLVLMMIVTEECFLEVEQRCWCILVLHQYLHLPA

SEQ ID NO: 13396 - DNA, 1274 bp, Zea mays subsp. mays
  misc_feature (1)..(1274): Ceres Seq. ID no. 12411280
  misc_feature (1)..(1274): Ortholog of  Ceres SEQ ID NO 15169431 as cited in SEQ ID NO 60449
  misc_feature (1)..(1274): Ortholog of  Ceres SEQ ID NO 12615444 as cited in SEQ ID NO 62593
  misc_feature (1)..(1274): Ortholog of  Ceres SEQ ID NO 14302204 as cited in SEQ ID NO 63150
acgccttaaaaacgagatccctggggtcaccactggtcaactgcgtcactgcgccgaatcactagaaaccccaacaaacggaatttcacacatccagcgagcaataccgcaccgcaggtaagatcaaagaggaggcgatggctggcggcgggcaggcggcgatttcgttcatgacgcggatggcgaaggtggcggcggggttgggcgtggcggcgtccgcagcctccacgtccttctacacggtggacggcggagagcgcgccgtcatcttcgatcgcgtccgcggcgtgctcccgcgtacgatgtcagagggcacccatttgctggtccccatccttcagaagcccttcattttcgacatccgcactcgccctcacagcttctcctccacctccggcaccaaggacctccagatggtcagcctcacgctccgcgttctgtcgcgacccgacgtcgaacacctcccggacatcttcacctccctcggcctcgagtacgacgagaaggtcctcccatccatcggcaacgaggtgctcaaggccgtcgtcgcgcagttcaacgccgaccagctcctcaccgagcgtccccacgtctccgcgctcgtccgcgaatcgctcaccaagcgcgcccgcgagttcaacatcgtcctcgacgacgtcgccatcacccacctagcctacgggcaggagttcgcgcaggccgtcgagaagaagcaggttgcgcagcaggaggccgagcgctccaggttcctcgtcgcgcgcgctgagcaggagaggcgcgctgctatcgtccgcgccgagggggagagcgagtccgcgcgccttatctccgaggccacgaccactgcgggcaacggcctgatcgagctcaggaggatcgaggcggccaaggagatcgcaagcgttctgtcgcgcacgcccaacgtctcctacatccccgccggcgacaatggccagatgctgctcgggcttaacgccgcccggtgaatggatcgtctttttccgcgcttcagaatgtcaggacgagatgaaactgttcttggtggggaggagggaaagtttgtttctgtagagcttctagaagtgttgctaagagtctgttttttattaatgaaatggctgggaagtctgtttgtgctcaatagagtgtttcttctgtgaaataaaactggtctatgagatggtgtggcgagctctttgctttgctttgctctctgcaattcagttgtatcccatacatgctgtctttatctctgaaataaaacttttcgagcg

SEQ ID NO: 13397 - protein, 282 aa, Zea mays subsp. mays
  peptide (1)..(282): Ceres Seq. ID no. 12411281
MAGGGQAAISFMTRMAKVAAGLGVAASAASTSFYTVDGGERAVIFDRVRGVLPRTMSEGTHLLVPILQKPFIFDIRTRPHSFSSTSGTKDLQMVSLTLRVLSRPDVEHLPDIFTSLGLEYDEKVLPSIGNEVLKAVVAQFNADQLLTERPHVSALVRESLTKRAREFNIVLDDVAITHLAYGQEFAQAVEKKQVAQQEAERSRFLVARAEQERRAAIVRAEGESESARLISEATTTAGNGLIELRRIEAAKEIASVLSRTPNVSYIPAGDNGQMLLGLNAAR

SEQ ID NO: 13398 - protein, 271 aa, Zea mays subsp. mays
  peptide (1)..(271): Ceres Seq. ID no. 12411282
MTRMAKVAAGLGVAASAASTSFYTVDGGERAVIFDRVRGVLPRTMSEGTHLLVPILQKPFIFDIRTRPHSFSSTSGTKDLQMVSLTLRVLSRPDVEHLPDIFTSLGLEYDEKVLPSIGNEVLKAVVAQFNADQLLTERPHVSALVRESLTKRAREFNIVLDDVAITHLAYGQEFAQAVEKKQVAQQEAERSRFLVARAEQERRAAIVRAEGESESARLISEATTTAGNGLIELRRIEAAKEIASVLSRTPNVSYIPAGDNGQMLLGLNAAR

SEQ ID NO: 13399 - protein, 268 aa, Zea mays subsp. mays
  peptide (1)..(268): Ceres Seq. ID no. 12411283
MAKVAAGLGVAASAASTSFYTVDGGERAVIFDRVRGVLPRTMSEGTHLLVPILQKPFIFDIRTRPHSFSSTSGTKDLQMVSLTLRVLSRPDVEHLPDIFTSLGLEYDEKVLPSIGNEVLKAVVAQFNADQLLTERPHVSALVRESLTKRAREFNIVLDDVAITHLAYGQEFAQAVEKKQVAQQEAERSRFLVARAEQERRAAIVRAEGESESARLISEATTTAGNGLIELRRIEAAKEIASVLSRTPNVSYIPAGDNGQMLLGLNAAR

SEQ ID NO: 13400 - DNA, 1558 bp, Zea mays subsp. mays
  misc_feature (1)..(1558): Ceres Seq. ID no. 12405255
  misc_feature (1)..(1558): Ortholog of  Ceres SEQ ID NO 14303355 as cited in SEQ ID NO 59746
  misc_feature (1)..(1558): Ortholog of  Ceres SEQ ID NO 14302415 as cited in SEQ ID NO 62781
aaccaaagccgccaccgttgccgtagccgtgttcttggactctgttacgtgctgccattttgccaaggctagccccctcctcctcttcttcctcttcttcttttcgcgacgatcagagaagaagatgacgatcaccattgaacagccccagctcgatgcggtggcggagaggaaagtccccggcggaggcgaccccgcggagctggtgctcgacgccggcttcgtcgtgccggacgccaacgccttcggcaataccttcaggaactacgacgcggagtcggagcggaagcagacggtagaggagttctaccgggtgaaccacgtgaggcagacgcacgagttcgtggcgcggatgcgggcggagtacgggcggctggacaagacggagatgggcatctgggagtgcatcgagctgctgaacgagttcatcgacgacagcgacccggacctggacatgccccagatcgagcacctgctgcagaccgccgaggccatccgcaaggactaccccgacgaggactggctccacctcaccggactcatccacgacctgggcaaggtgctgctgcacccaagcttcggggagctccctcagtgggctgtcgtcggtgacaccttccccgtcggctgcgcatacgacgagtgcaacgtccacttcaagtacttcaaggagaaccccgactaccacaacccgaagctcaacaccaagttgggggtctactcggagggctgcggcctcgacaaggtgctcatgtcatggggccacgacgactacatgtacctggtggccaaggagaacaagtgcacccttccttccgcggggctgttcatcatcagataccactcgttctacccactgcacaagcatggagcctacacgcacctgatggacgatgaggacaaggagaacctcaagtggctgcatgtgttcaacaagtatgacctgtacagcaagagcaacagcaggatcgacgtggaggaggtgaagccctactacatgtccctaatcgacaagtacttcccggccaagctaagatggtgagaaggggcggcctggcctggacctggatgatagatggaaccccaaggccccaccaagagctgtcgttccaagtgtccatgtaccatatacatatctctactactctataagactctattgtagaccatccgtgcaccgcggttctgccactctctgttccgcccaccaccggtcgtatgacaggtgggtcccatgtgtcagtccatcacgcttccgtccgaccgtcatccagatttccgtgatacagccgtctccacgacgagattggcgacgtcctccctgcgcccgcagcccccccccccccccggctgccgcacgcatgcccctgcttcactcacgcccggctcctccctcttcgctcgactccccacacggtcgtcggtcgtcgctcctccttgagtagaactagtatatagactacgaatacagtatgtgtgccatgtacggtcattttttacagagttgagaagagtacccatgccgtttcgaataaaagttgcctgcgtttgttccttc

SEQ ID NO: 13401 - protein, 346 aa, Zea mays subsp. mays
  peptide (1)..(346): Ceres Seq. ID no. 12405256
TKAATVAVAVFLDSVTCCHFAKASPLLLFFLFFFSRRSEKKMTITIEQPQLDAVAERKVPGGGDPAELVLDAGFVVPDANAFGNTFRNYDAESERKQTVEEFYRVNHVRQTHEFVARMRAEYGRLDKTEMGIWECIELLNEFIDDSDPDLDMPQIEHLLQTAEAIRKDYPDEDWLHLTGLIHDLGKVLLHPSFGELPQWAVVGDTFPVGCAYDECNVHFKYFKENPDYHNPKLNTKLGVYSEGCGLDKVLMSWGHDDYMYLVAKENKCTLPSAGLFIIRYHSFYPLHKHGAYTHLMDDEDKENLKWLHVFNKYDLYSKSNSRIDVEEVKPYYMSLIDKYFPAKLRW

SEQ ID NO: 13402 - protein, 305 aa, Zea mays subsp. mays
  peptide (1)..(305): Ceres Seq. ID no. 12405257
MTITIEQPQLDAVAERKVPGGGDPAELVLDAGFVVPDANAFGNTFRNYDAESERKQTVEEFYRVNHVRQTHEFVARMRAEYGRLDKTEMGIWECIELLNEFIDDSDPDLDMPQIEHLLQTAEAIRKDYPDEDWLHLTGLIHDLGKVLLHPSFGELPQWAVVGDTFPVGCAYDECNVHFKYFKENPDYHNPKLNTKLGVYSEGCGLDKVLMSWGHDDYMYLVAKENKCTLPSAGLFIIRYHSFYPLHKHGAYTHLMDDEDKENLKWLHVFNKYDLYSKSNSRIDVEEVKPYYMSLIDKYFPAKLRW

SEQ ID NO: 13403 - protein, 229 aa, Zea mays subsp. mays
  peptide (1)..(229): Ceres Seq. ID no. 12405258
MRAEYGRLDKTEMGIWECIELLNEFIDDSDPDLDMPQIEHLLQTAEAIRKDYPDEDWLHLTGLIHDLGKVLLHPSFGELPQWAVVGDTFPVGCAYDECNVHFKYFKENPDYHNPKLNTKLGVYSEGCGLDKVLMSWGHDDYMYLVAKENKCTLPSAGLFIIRYHSFYPLHKHGAYTHLMDDEDKENLKWLHVFNKYDLYSKSNSRIDVEEVKPYYMSLIDKYFPAKLRW

SEQ ID NO: 13404 - DNA, 1347 bp, Zea mays subsp. mays
  misc_feature (1)..(1347): Ceres Seq. ID no. 12405869
  misc_feature (1)..(1347): Ortholog of  Ceres SEQ ID NO 14312844 as cited in SEQ ID NO 55601
  misc_feature (1)..(1347): Ortholog of  Ceres SEQ ID NO 14312866 as cited in SEQ ID NO 55630
  misc_feature (1)..(1347): Ortholog of  Ceres SEQ ID NO 13597376 as cited in SEQ ID NO 64002
  misc_feature (1)..(1347): Ortholog of  Ceres SEQ ID NO 13503573 as cited in SEQ ID NO 65402
  misc_feature (1)..(1347): Ortholog of  Ceres SEQ ID NO 13659615 as cited in SEQ ID NO 67248
accaatacagcactggaccactatatatccccccgccccgcgctggggccggtccccagctagcgagcgccgccggtgccagtgcaacagaacacgcaccacacgggcgcagactgcagagacaacagatcgatcgtccaatggcgatcggcgggtcggaggccggcgggggaggcgcggggagcatgaggagcgtgctggtgacgggcggcgcggggttcatcggcacgcacacggtgctgcgcctgctggagcagggctacatcgtcaccgtcgtcgacaacttccacaactccgtccccgaggcgctcgaccgcgtccgcctcatcgccggccccgcgctctccacccgcctcgacttcatccgcggggacctgaggaacaccgatgacttggagaaggtgttcgctgccaggaggtacgacgccgtcatccacttcgctgggctgaaggccgtgggggagagcgtcgcgcacccggagatgtactacgagaacaacctcatcggcaccatcaacctctacaagagcatgaaggagcacggctgcaagaagctggttttctcgtcatccgccaccgtgtacggctggccggaggtgatcccatgcgtcgaggactccaagctgcaggccgccaacccatacggcaggaccaagcttatccttgaggatatggcgcgtgactaccaccgcgcggacacggagtggagcatcgtcctgctgcgctacttcaaccccatcggtgcgcacagctccggcgagatcggagaggaccccaaggggataccgaacaacctgctgccctacatccagcaggtcgccgtcggcaggctccccgagctcaacgtctacggccacgattaccccacccgggacggcaccgcgatcagggactacatacacgtcgtcgacctcgccgatgggcacatcgcagcgctcaagaagctcttcgactctcctgatataggttgtgtggcctacaatctgggtacagggcgcggcacatccgttctggagatggtggcggcgttcaagaaggcctccggcaaggagattcccaccaagttgtgccccaggagaccgggtgacgcgacggaggtttacgcgtccactgagaaggctgaaagagagcttgcatggagggcccaatatggaatcgaggagatgtgcagggaccaatggaactgggccaagaagaacccgtatggctactgcggcggtgcaaaaaaatagcgtaggttcgtcgcaatgaagaattgtcgatagtagttctcttctctacactaatcaatggaacatgtaataaacacggaccacctaatctctactagtttctatggtttccact

SEQ ID NO: 13405 - protein, 409 aa, Zea mays subsp. mays
  peptide (1)..(409): Ceres Seq. ID no. 12405870
QYSTGPLYIPPPRAGAGPQLASAAGASATEHAPHGRRLQRQQIDRPMAIGGSEAGGGGAGSMRSVLVTGGAGFIGTHTVLRLLEQGYIVTVVDNFHNSVPEALDRVRLIAGPALSTRLDFIRGDLRNTDDLEKVFAARRYDAVIHFAGLKAVGESVAHPEMYYENNLIGTINLYKSMKEHGCKKLVFSSSATVYGWPEVIPCVEDSKLQAANPYGRTKLILEDMARDYHRADTEWSIVLLRYFNPIGAHSSGEIGEDPKGIPNNLLPYIQQVAVGRLPELNVYGHDYPTRDGTAIRDYIHVVDLADGHIAALKKLFDSPDIGCVAYNLGTGRGTSVLEMVAAFKKASGKEIPTKLCPRRPGDATEVYASTEKAERELAWRAQYGIEEMCRDQWNWAKKNPYGYCGGAKK

SEQ ID NO: 13406 - protein, 363 aa, Zea mays subsp. mays
  peptide (1)..(363): Ceres Seq. ID no. 12405871
MAIGGSEAGGGGAGSMRSVLVTGGAGFIGTHTVLRLLEQGYIVTVVDNFHNSVPEALDRVRLIAGPALSTRLDFIRGDLRNTDDLEKVFAARRYDAVIHFAGLKAVGESVAHPEMYYENNLIGTINLYKSMKEHGCKKLVFSSSATVYGWPEVIPCVEDSKLQAANPYGRTKLILEDMARDYHRADTEWSIVLLRYFNPIGAHSSGEIGEDPKGIPNNLLPYIQQVAVGRLPELNVYGHDYPTRDGTAIRDYIHVVDLADGHIAALKKLFDSPDIGCVAYNLGTGRGTSVLEMVAAFKKASGKEIPTKLCPRRPGDATEVYASTEKAERELAWRAQYGIEEMCRDQWNWAKKNPYGYCGGAKK

SEQ ID NO: 13407 - protein, 348 aa, Zea mays subsp. mays
  peptide (1)..(348): Ceres Seq. ID no. 12405872
MRSVLVTGGAGFIGTHTVLRLLEQGYIVTVVDNFHNSVPEALDRVRLIAGPALSTRLDFIRGDLRNTDDLEKVFAARRYDAVIHFAGLKAVGESVAHPEMYYENNLIGTINLYKSMKEHGCKKLVFSSSATVYGWPEVIPCVEDSKLQAANPYGRTKLILEDMARDYHRADTEWSIVLLRYFNPIGAHSSGEIGEDPKGIPNNLLPYIQQVAVGRLPELNVYGHDYPTRDGTAIRDYIHVVDLADGHIAALKKLFDSPDIGCVAYNLGTGRGTSVLEMVAAFKKASGKEIPTKLCPRRPGDATEVYASTEKAERELAWRAQYGIEEMCRDQWNWAKKNPYGYCGGAKK

SEQ ID NO: 13408 - DNA, 1763 bp, Zea mays subsp. mays
  misc_feature (1)..(1763): Ceres Seq. ID no. 12347809
  misc_feature (1)..(1763): Ortholog of  Ceres SEQ ID NO 14310452 as cited in SEQ ID NO 54426
  misc_feature (1)..(1763): Ortholog of  Ceres SEQ ID NO 15174626 as cited in SEQ ID NO 59393
  misc_feature (1)..(1763): Ortholog of  Ceres SEQ ID NO 15169663 as cited in SEQ ID NO 64659
  misc_feature (1)..(1763): Ortholog of  Ceres SEQ ID NO 13656177 as cited in SEQ ID NO 64997
actattgaagcagactccacccggcgcgtcctcgtctcgtctcgtctcgcacgcacccctcactttccttgtcaatcgactcgcgatcgaatccgccccgagtcgattccgccgcggaccgaccggttcacttcccttttctcccgagatctcgactctcgagcaagtatgggtgaggcgaaggacaacgaggtgtacgaggaggacctagtcgactatgaggaggaggtggagaatgtcattgatggcgcccccaccaacggctcctcagatgtcgtcaagaaggggtacgtagggatccacagctcggggttcagagacttcctgctcaagccagagcttcttcgcgccattcaggattgcgggtttgagcatccttctgaagtgcaacatgagtgcatccctcaagctattcttggaatggatgtcatctgtcaagcaaaatctggaatgggtaagactgcagtttttgtcctgtcaactcttcagcagattgatcctgttgctggccaagtagctgcacttgtgttgtgccacacaagagaattagcttaccagatttgccatgaatttgagaggtttagcaaatacctgcctgaattaagagtagctgttttctatggtggtgttcacataaaaaaccacaaggatctgctgaagaatgaatgcccccatattgtggttggcacgcctggaaggatactagctctagctagagataaggaccttcccttgaagaatgtgcggcatttcattcttgatgaatgtgacaagatgctcgaatcacttgacatgcgcagagatgtccaggagatcttcaaaatgactccgcatgataagcaagtgatgatgttttcagcaacactcagcaaggagattcgacctgtttgcaagaggttcatgcaagatcctatggaaatttatgttgatgatgaggctaaactgacccttcatggtctagttcagcactatatcaaattaagtgaggcagagaagaaccgaaagttgaacgatcttttagatgcactcgacttcaaccaagttgtgatatttgttaaaagtgttagtagagctgcagaactcaacaaattgctctgcgagtgcaatttcccctcaatctgtatacattctggaatgacacaggaagagaggttgacacggtacaagaacttcaaggaaggacacaagaggattcttgtggctactgatttggttggtaggggaatcgacattgaacgtgtcaacattgtcgtaaactatgatatgcctgattccgctgatacatacctgcatagggttggtcgggctggacgttttggtaccaagggacttgcaataacatttgtttcttcttcatctgattctgatgttctcaatcaagtgcaggagaggtttgaggttgacataaaggagctgcctgagcagattgacacgtcgacatacatgccatcttgatgatcgaggtgaaccagtgtttagtttgagctggaaaggagagcttgtttgaaatatacaccttagatcgctgttggacaaccttagcaccttgtttgaaagatgttccatttgtacttaaccagcagtctagtggattaagcagtaggcgtcgcaacagctgttacatgctacctaggattttatttgcaactctgtaatgttttctatgctccgactgctaattgttctgtttgagactgccctctgggtgcatgttttactagtaaattactcgcaccatgcccgagtcttcggagcatgtgttt

SEQ ID NO: 13409 - protein, 484 aa, Zea mays subsp. mays
  peptide (1)..(484): Ceres Seq. ID no. 12347810
TIEADSTRRVLVSSRLARTPHFPCQSTRDRIRPESIPPRTDRFTSLFSRDLDSRASMGEAKDNEVYEEDLVDYEEEVENVIDGAPTNGSSDVVKKGYVGIHSSGFRDFLLKPELLRAIQDCGFEHPSEVQHECIPQAILGMDVICQAKSGMGKTAVFVLSTLQQIDPVAGQVAALVLCHTRELAYQICHEFERFSKYLPELRVAVFYGGVHIKNHKDLLKNECPHIVVGTPGRILALARDKDLPLKNVRHFILDECDKMLESLDMRRDVQEIFKMTPHDKQVMMFSATLSKEIRPVCKRFMQDPMEIYVDDEAKLTLHGLVQHYIKLSEAEKNRKLNDLLDALDFNQVVIFVKSVSRAAELNKLLCECNFPSICIHSGMTQEERLTRYKNFKEGHKRILVATDLVGRGIDIERVNIVVNYDMPDSADTYLHRVGRAGRFGTKGLAITFVSSSSDSDVLNQVQERFEVDIKELPEQIDTSTYMPS

SEQ ID NO: 13410 - protein, 428 aa, Zea mays subsp. mays
  peptide (1)..(428): Ceres Seq. ID no. 12347811
MGEAKDNEVYEEDLVDYEEEVENVIDGAPTNGSSDVVKKGYVGIHSSGFRDFLLKPELLRAIQDCGFEHPSEVQHECIPQAILGMDVICQAKSGMGKTAVFVLSTLQQIDPVAGQVAALVLCHTRELAYQICHEFERFSKYLPELRVAVFYGGVHIKNHKDLLKNECPHIVVGTPGRILALARDKDLPLKNVRHFILDECDKMLESLDMRRDVQEIFKMTPHDKQVMMFSATLSKEIRPVCKRFMQDPMEIYVDDEAKLTLHGLVQHYIKLSEAEKNRKLNDLLDALDFNQVVIFVKSVSRAAELNKLLCECNFPSICIHSGMTQEERLTRYKNFKEGHKRILVATDLVGRGIDIERVNIVVNYDMPDSADTYLHRVGRAGRFGTKGLAITFVSSSSDSDVLNQVQERFEVDIKELPEQIDTSTYMPS

SEQ ID NO: 13411 - protein, 344 aa, Zea mays subsp. mays
  peptide (1)..(344): Ceres Seq. ID no. 12347812
MDVICQAKSGMGKTAVFVLSTLQQIDPVAGQVAALVLCHTRELAYQICHEFERFSKYLPELRVAVFYGGVHIKNHKDLLKNECPHIVVGTPGRILALARDKDLPLKNVRHFILDECDKMLESLDMRRDVQEIFKMTPHDKQVMMFSATLSKEIRPVCKRFMQDPMEIYVDDEAKLTLHGLVQHYIKLSEAEKNRKLNDLLDALDFNQVVIFVKSVSRAAELNKLLCECNFPSICIHSGMTQEERLTRYKNFKEGHKRILVATDLVGRGIDIERVNIVVNYDMPDSADTYLHRVGRAGRFGTKGLAITFVSSSSDSDVLNQVQERFEVDIKELPEQIDTSTYMPS

SEQ ID NO: 13412 - DNA, 1466 bp, Zea mays subsp. mays
  misc_feature (1)..(1466): Ceres Seq. ID no. 12411276
  misc_feature (1)..(1466): Ortholog of  Ceres SEQ ID NO 15177343 as cited in SEQ ID NO 51182
aaggaagacgcctctctagattggatcgaattccttcgtttctctcctcaccgaggacggcggagagagacgaggaggaaaggcccggcgcgacggagaagctgaatatctgatatgggtgaaaccatgggaaggagaacagtcagtggccttcttgtcaccaaaggaggctcaattcttgtcttcagggaggaaagcccacgccacaaggccaccgcatgttgtacccgcctctggtgcagcagtaagcttttcccgaacaaagacacgaatacacgcagggcatccagggaaacatcggctcttcagagatcacaagtgtctaggaaatccaactggatgtcccatcaaggaagtatttcttatgatcgaagcaccagtaggaatacagcaagtacttttggtgagactcacaacaaaccaagagaaaaagaaaatctcgggtgtgatctaccggctcggttgaaagaaaggatcaatacatccaggaaaagctcattgggtggactgggaagtcctaacaaatcatcaacaaacacatcaagcagtagccgatcggtttcaagatcagtatgtcggccagcatcgagaatgagaaaggatggaggaaggggcgcagaatctatgaggatgcatagagccagagatagtggtggtagctcttggggagatgtgttgacaagaaattctgaccaagattcttcacacaggtctctatctcgaaacgtgttgaggcataggagcagatctcagcaagggccaatatcatcattggaggataatttagatgattccagtgaatactggcattttgatacagatgacagtgaagaggttgaggatgactatgcctttaatgatcagcataggggaatgagaatggacattgataacatgtcttatgaggacctacttgcgcttggggagagaataggtactgtaagcactggtctttcagatgatgcgctttctgagtgtctgaagagaaacctctatgtgcccacaacttcaagcagcaatgaagatggtgacatcaaatgcatcatatgtctggaggagtactcttctggtgtggaggtggccaagatggcatgcgagcattactaccataccacttgtatccaacagtggcttcagcaaaagaactggtgcccgatttgtaaatgtgacgcttctgccattagctcatagtgttcttgacagtaacagaagtatcagttcattgtaatcaaataggattacacaagtttttttggttctagaacaaattattcacttcaatcctatactgctcttcaattcacactacacttgtcataggaagcaggaaaataagtcctagaagaaaggattttctcagttttgatgttgaagttgaagagtagatgatagtgttgccattctttacatacaaaagcgtcaaaaattcagcattaatagtgcagtttttgtttgccatcgttttc

SEQ ID NO: 13413 - protein, 358 aa, Zea mays subsp. mays
  peptide (1)..(358): Ceres Seq. ID no. 12411277
MGETMGRRTVSGLLVTKGGSILVFREESPRHKATACCTRLWCSSKLFPNKDTNTRRASRETSALQRSQVSRKSNWMSHQGSISYDRSTSRNTASTFGETHNKPREKENLGCDLPARLKERINTSRKSSLGGLGSPNKSSTNTSSSSRSVSRSVCRPASRMRKDGGRGAESMRMHRARDSGGSSWGDVLTRNSDQDSSHRSLSRNVLRHRSRSQQGPISSLEDNLDDSSEYWHFDTDDSEEVEDDYAFNDQHRGMRMDIDNMSYEDLLALGERIGTVSTGLSDDALSECLKRNLYVPTTSSSNEDGDIKCIICLEEYSSGVEVAKMACEHYYHTTCIQQWLQQKNWCPICKCDASAISS

SEQ ID NO: 13414 - protein, 354 aa, Zea mays subsp. mays
  peptide (1)..(354): Ceres Seq. ID no. 12411278
MGRRTVSGLLVTKGGSILVFREESPRHKATACCTRLWCSSKLFPNKDTNTRRASRETSALQRSQVSRKSNWMSHQGSISYDRSTSRNTASTFGETHNKPREKENLGCDLPARLKERINTSRKSSLGGLGSPNKSSTNTSSSSRSVSRSVCRPASRMRKDGGRGAESMRMHRARDSGGSSWGDVLTRNSDQDSSHRSLSRNVLRHRSRSQQGPISSLEDNLDDSSEYWHFDTDDSEEVEDDYAFNDQHRGMRMDIDNMSYEDLLALGERIGTVSTGLSDDALSECLKRNLYVPTTSSSNEDGDIKCIICLEEYSSGVEVAKMACEHYYHTTCIQQWLQQKNWCPICKCDASAISS

SEQ ID NO: 13415 - protein, 283 aa, Zea mays subsp. mays
  peptide (1)..(283): Ceres Seq. ID no. 12411279
MSHQGSISYDRSTSRNTASTFGETHNKPREKENLGCDLPARLKERINTSRKSSLGGLGSPNKSSTNTSSSSRSVSRSVCRPASRMRKDGGRGAESMRMHRARDSGGSSWGDVLTRNSDQDSSHRSLSRNVLRHRSRSQQGPISSLEDNLDDSSEYWHFDTDDSEEVEDDYAFNDQHRGMRMDIDNMSYEDLLALGERIGTVSTGLSDDALSECLKRNLYVPTTSSSNEDGDIKCIICLEEYSSGVEVAKMACEHYYHTTCIQQWLQQKNWCPICKCDASAISS

SEQ ID NO: 13416 - DNA, 1339 bp, Zea mays subsp. mays
  misc_feature (1)..(1339): Ceres Seq. ID no. 12411272
  misc_feature (1)..(1339): Ortholog of  Ceres SEQ ID NO 15176375 as cited in SEQ ID NO 53238
  misc_feature (1)..(1339): Ortholog of  Ceres SEQ ID NO 15170532 as cited in SEQ ID NO 55671
  misc_feature (1)..(1339): Ortholog of  Ceres SEQ ID NO 14316507 as cited in SEQ ID NO 57397
  misc_feature (1)..(1339): Ortholog of  Ceres SEQ ID NO 13663060 as cited in SEQ ID NO 60964
  misc_feature (1)..(1339): Ortholog of  Ceres SEQ ID NO 13598532 as cited in SEQ ID NO 65204
  misc_feature (1)..(1339): Ortholog of  Ceres SEQ ID NO 13656849 as cited in SEQ ID NO 65764
  misc_feature (1)..(1339): Ortholog of  Ceres SEQ ID NO 13656501 as cited in SEQ ID NO 69206
aatagaagcgagcgagcgagcagcagtaggcagcggcgcgggcgaggagcagaccagcacccagcgccctcgtcggggggcggcacgtgcagcttcaccagccgccgcctttcccccgtctgcctctgcctctgcctctccccctaacccccttccatttctccaccccaccccgctcccgcttccgcttcctcgccacttagttcgttgccaccacgccgcggctgcgttcgcattgggggcacgcaatggagcagtacgagaaggtggagaagatcggggagggcacgtacggggtggtgtacaaggcgctggacaaggccaccaacgagacgatcgcgctcaagaagatccgcctcgagcaggaggacgagggcgtcccgtccaccgccatccgcgagatctctctcctcaaggagatgaaccacggcaacatcgtcagattacatgatgttgtccacagcgagaagcgcatataccttgtcttcgagtacctggatctggacctcaagaagttcatggactcctgcccggagtttgctaagaatcccactttgatcaagtcatacctctaccagatactccacggtgttgcgtactgccattctcatagagttcttcatcgagacttgaaacctcaaaacttattgatagatcggcgcactaatgcactgaagcttgcagactttggtttagccagggcatttggaattcctgtccgtacatttactcatgaggtagtgacattatggtacagagctccagaaattctgcttggagcgcggcagtattccacaccagttgatgtgtggtctgtgggctgtatctttgcggaaatggtgaaccaaaagccactattccctggcgattctgagatcgacgaactttttaagatattcaggatactaggtacaccgaatgagcagagttggccaggagtcagttgtttgcctgacttcaagacagctttccccaggtggcaagctcaggacctggcaacagtagtcccaaatcttgaccctgctgggttggaccttctctctaaaatgcttcgatacgagccaagcaaaagaatcacagcgaggcaagcacttgagcatgagtacttcaaggaccttgaagtggtacagtgacctgctaaatgtgcttgacgttgcattgacatttgtatgagctgagtcgctcattcctttttatgaacgcctgtactcttctcattctctccctgcatttttgtcattcagctggatatttcgaatctggtgtgttttgagatgtattaaagaacgtcaaatagattaccgccttggtctctgtccattgaaagtaaatatccgtc

SEQ ID NO: 13417 - protein, 294 aa, Zea mays subsp. mays
  peptide (1)..(294): Ceres Seq. ID no. 12411273
MEQYEKVEKIGEGTYGVVYKALDKATNETIALKKIRLEQEDEGVPSTAIREISLLKEMNHGNIVRLHDVVHSEKRIYLVFEYLDLDLKKFMDSCPEFAKNPTLIKSYLYQILHGVAYCHSHRVLHRDLKPQNLLIDRRTNALKLADFGLARAFGIPVRTFTHEVVTLWYRAPEILLGARQYSTPVDVWSVGCIFAEMVNQKPLFPGDSEIDELFKIFRILGTPNEQSWPGVSCLPDFKTAFPRWQAQDLATVVPNLDPAGLDLLSKMLRYEPSKRITARQALEHEYFKDLEVVQ

SEQ ID NO: 13418 - protein, 237 aa, Zea mays subsp. mays
  peptide (1)..(237): Ceres Seq. ID no. 12411274
MNHGNIVRLHDVVHSEKRIYLVFEYLDLDLKKFMDSCPEFAKNPTLIKSYLYQILHGVAYCHSHRVLHRDLKPQNLLIDRRTNALKLADFGLARAFGIPVRTFTHEVVTLWYRAPEILLGARQYSTPVDVWSVGCIFAEMVNQKPLFPGDSEIDELFKIFRILGTPNEQSWPGVSCLPDFKTAFPRWQAQDLATVVPNLDPAGLDLLSKMLRYEPSKRITARQALEHEYFKDLEVVQ

SEQ ID NO: 13419 - protein, 204 aa, Zea mays subsp. mays
  peptide (1)..(204): Ceres Seq. ID no. 12411275
MDSCPEFAKNPTLIKSYLYQILHGVAYCHSHRVLHRDLKPQNLLIDRRTNALKLADFGLARAFGIPVRTFTHEVVTLWYRAPEILLGARQYSTPVDVWSVGCIFAEMVNQKPLFPGDSEIDELFKIFRILGTPNEQSWPGVSCLPDFKTAFPRWQAQDLATVVPNLDPAGLDLLSKMLRYEPSKRITARQALEHEYFKDLEVVQ

SEQ ID NO: 13420 - DNA, 742 bp, Zea mays subsp. mays
  misc_feature (1)..(742): Ceres Seq. ID no. 13500480
  misc_feature (1)..(742): Ortholog of  Ceres SEQ ID NO 13597970 as cited in SEQ ID NO 65943
taatcgaaaaactatatacgtatatagacgtggtcaggatgacgtcgtcctccgtcttcttcctcctgctcgcttgcttcgccacatgcgccggcgccgccacgttcacggtacgaaacaactgcgggttcacggtgtggccagcaggcatcccggtcggcggcggcacgcagctgaacccgggctcgacgtggactgtcaacgtgcaggccgggaccagcggaggcaggatctggggccgcaccggctgctccttcagcggcggccggggccgctgcgcgacgggcgactgcggaggcgcctactcctgcagcctgtccgggcagcccccggcgacgctggcggagttcaccatcggcggcggcggcaaccacgactactacgatatctcggtgatcgacggctacaacctgcccatggacttctcgtgcagcactggcgccgccctgcggtgcagggactccggctgccccgacgcgtaccaccagcccaatgaccctaagacccgttcgtgcaacggcaatagcaactaccaggtcgtcttctgcccctgatgaacatgcatgcagcttgccatgagcccatgcatgcatgagagcgtattaattgttcgtcaactcacatgcacgtacctactagtgaagttgataaataagacgatcgatatctgactcgtccaatgcagcatgtgtgtatggtgtgatccttatactttcctacatatatggaactttttaaaggg

SEQ ID NO: 13421 - protein, 183 aa, Zea mays subsp. mays
  peptide (1)..(183): Ceres Seq. ID no. 13500481
IEKLYTYIDVVRMTSSSVFFLLLACFATCAGAATFTVRNNCGFTVWPAGIPVGGGTQLNPGSTWTVNVQAGTSGGRIWGRTGCSFSGGRGRCATGDCGGAYSCSLSGQPPATLAEFTIGGGGNHDYYDISVIDGYNLPMDFSCSTGAALRCRDSGCPDAYHQPNDPKTRSCNGNSNYQVVFCP

SEQ ID NO: 13422 - protein, 171 aa, Zea mays subsp. mays
  peptide (1)..(171): Ceres Seq. ID no. 13500482
MTSSSVFFLLLACFATCAGAATFTVRNNCGFTVWPAGIPVGGGTQLNPGSTWTVNVQAGTSGGRIWGRTGCSFSGGRGRCATGDCGGAYSCSLSGQPPATLAEFTIGGGGNHDYYDISVIDGYNLPMDFSCSTGAALRCRDSGCPDAYHQPNDPKTRSCNGNSNYQVVFCP

SEQ ID NO: 13423 - protein, 164 aa, Zea mays subsp. mays
  peptide (1)..(164): Ceres Seq. ID no. 13500483
NRKTIYVYRRGQDDVVLRLLPPARLLRHMRRRRHVHGTKQLRVHGVASRHPGRRRHAAEPGLDVDCQRAGRDQRRQDLGPHRLLLQRRPGPLRDGRLRRRLLLQPVRAAPGDAGGVHHRRRRQPRLLRYLGDRRLQPAHGLLVQHWRRPAVQGLRLPRRVPPAQ

SEQ ID NO: 13424 - DNA, 1196 bp, Zea mays subsp. mays
  misc_feature (1)..(1196): Ceres Seq. ID no. 12367307
  misc_feature (1)..(1196): Ortholog of  Ceres SEQ ID NO 12593170 as cited in SEQ ID NO 63263
  misc_feature (1)..(1196): Ortholog of  Ceres SEQ ID NO 14301882 as cited in SEQ ID NO 64381
  misc_feature (1)..(1196): Ortholog of  Ceres SEQ ID NO 13597851 as cited in SEQ ID NO 64869
  misc_feature (1)..(1196): Ortholog of  Ceres SEQ ID NO 13662420 as cited in SEQ ID NO 68680
cccagtcgtgtcgccactcgccgccatccgctccgcaggtcacgtgaaaagcagtgcagggcgcaagggcaccgccgaggcagaaaagggcggataaactgcttgaactggaagcgaccctagtccaaaccaccgcaccgacaccgactccgagccccgccgcgccgcgctacctccgctcctctcttcgcccctgccggcgtcgaggccgaagcgaaggcgagcatgcatcacgaccccaaccccttcgacgagggcagcgccgaggacaaccccttctcaaatggaggagccggaggcggcaagcagcagtacggcttccggccgactgagcccgtcgggttcggcggcgctagcaggggcgacgccgtcgttgacgtcccgctcgagaccatgggggactctcggagcaaggtgaaggagctctcgtcgtgggaatcagatctgaagcggcgagaggcggatatcaagaggagggaagaggcgctgaagaatgctggcgtgccaatggaggagaagaactggccaccattcttccccatcatccaccatgatattgccaatgagataccagcaaatgtgcagaagttgcagtatcttgcatttgcaagctggcttggaattgtgctttgtttgtcctggaacttcgttgctgtcatagtctgctggatcaaggagggagattcaaagttgtttttccttgcaacaatctatgctttgcttggaattcctctgtcatatttgatatggtacaggccactctaccgtgcaatgaggactaacagtgctttcagttttggatggtttttcctgtgttacctgatccacattggtttttgcataattgctgccattgctccaccaattgtatttcatgggaaatcattaactggtattctggctgcgattgacactttctctgaacatgtgataattgggatcttttactttgtggggtttgcactgttttgtctggagacactgctgagcattggggttcttcagaaagtgtacatgtacttcagagggaacaagtgaagccagtcatgatggagagttacgtttgttgagaaaatttggagttacttgtggctacttgtagcacatgttcattcgatggttttgtgcatacctgtcagtacaccttgaatctataatttcttatgtcagttattggtgccgagaattgttttttt

SEQ ID NO: 13425 - protein, 270 aa, Zea mays subsp. mays
  peptide (1)..(270): Ceres Seq. ID no. 12367308
MHHDPNPFDEGSAEDNPFSNGGAGGGKQQYGFRPTEPVGFGGASRGDAVVDVPLETMGDSRSKVKELSSWESDLKRREADIKRREEALKNAGVPMEEKNWPPFFPIIHHDIANEIPANVQKLQYLAFASWLGIVLCLSWNFVAVIVCWIKEGDSKLFFLATIYALLGIPLSYLIWYRPLYRAMRTNSAFSFGWFFLCYLIHIGFCIIAAIAPPIVFHGKSLTGILAAIDTFSEHVIIGIFYFVGFALFCLETLLSIGVLQKVYMYFRGNK

SEQ ID NO: 13426 - protein, 214 aa, Zea mays subsp. mays
  peptide (1)..(214): Ceres Seq. ID no. 12367309
MGDSRSKVKELSSWESDLKRREADIKRREEALKNAGVPMEEKNWPPFFPIIHHDIANEIPANVQKLQYLAFASWLGIVLCLSWNFVAVIVCWIKEGDSKLFFLATIYALLGIPLSYLIWYRPLYRAMRTNSAFSFGWFFLCYLIHIGFCIIAAIAPPIVFHGKSLTGILAAIDTFSEHVIIGIFYFVGFALFCLETLLSIGVLQKVYMYFRGNK

SEQ ID NO: 13427 - protein, 176 aa, Zea mays subsp. mays
  peptide (1)..(176): Ceres Seq. ID no. 12367310
MEEKNWPPFFPIIHHDIANEIPANVQKLQYLAFASWLGIVLCLSWNFVAVIVCWIKEGDSKLFFLATIYALLGIPLSYLIWYRPLYRAMRTNSAFSFGWFFLCYLIHIGFCIIAAIAPPIVFHGKSLTGILAAIDTFSEHVIIGIFYFVGFALFCLETLLSIGVLQKVYMYFRGNK

SEQ ID NO: 13428 - DNA, 1267 bp, Zea mays subsp. mays
  misc_feature (1)..(1267): Ceres Seq. ID no. 12407374
  misc_feature (1)..(1267): Ortholog of  Ceres SEQ ID NO 14313159 as cited in SEQ ID NO 54676
  misc_feature (1)..(1267): Ortholog of  Ceres SEQ ID NO 13598547 as cited in SEQ ID NO 65200
  misc_feature (1)..(1267): Ortholog of  Ceres SEQ ID NO 12617920 as cited in SEQ ID NO 65480
accaattccccaatttttttgtttccattccacaaaaccacaaccgcgcggttttctccctccccggctcccgcggcgcaagcgcagcccacccaagcgccatggccgccgccgcccccgacgccgacgcctacgatatcccgtgggtggagaagtaccgcccctcccgcgtcgctgacgtcgtcggaaactccgatgccgtcgcccgcctggaggtcattgcccgcgacggcaacatgcccaacctcatcctctccgggcctccggggaccgggaagacgacgagcatcctggcgctggcgcatgagctcctcgggcccagctatcgtgatgccgtgctggagctcaatgcctcagatgacaggggtttggatgtttgtgcggaacaagatcaagatgtttgcacagaagaaggtcaccctacagccagggcggcacaaaatcgtgatcttggatgaggctgacagcatgacatcaggagcacagcaagctctgcgaagaacaatggagatctattcaaacaccactagatttgcacttgcatgcaacacatcatcaaagataattgaacccattcaaagccgatgtgctatcgtcaggttctcaaggctctctgatcaagagatcctcggtcgcctcatgattgttgtggcagctgagaaggtgccttatgcgccagaggggctggaagctatcatatttactgctgatggtgacatgagacaagctttgaacaacttgcaagctacatttagtgggttccgctttattaatcaagaaaacgtgttcaaggtgtgcgatcaaccacatcccttacatgtcaagaacatggtgaaaaacgtgctcgatggaaagtttgatgagccatgctctgcactgaagcaactttatgatctgggatactctcctactgacattatcactactctcttccgtgttgtcaagaattatgacatggctgaatatctgaagctggaaatgctgaaggaaacaggatttgcacacatgagaatctgtgatggtgttggatcatttcttcagctttctggtctacttgccaagtttgcgcttgtgagggaaactgcaaaagcaccatgaactcgttgtattccagatgataatagcttgtgtcatgctgtgctatcatggtaacctagttcagttaatagtgctgtcatgcgtggcttaatgtctacagacgtgatgtatctctgtaagagtgctttctgaagaaacaactatcatgtttgcccagtgtggcagatct

SEQ ID NO: 13429 - protein, 365 aa, Zea mays subsp. mays
  peptide (1)..(365): Ceres Seq. ID no. 12407375
TNSPIFLFPFHKTTTARFSPSPAPAAQAQPTQAPWPPPPPTPTPTISRGWRSTAPPASLTSSETPMPSPAWRSLPATATCPTSSSPGLRGPGRRRASWRWRMSSSGPAIVMPCWSSMPQMTGVWMFVRNKIKMFAQKKVTLQPGRHKIVILDEADSMTSGAQQALRRTMEIYSNTTRFALACNTSSKIIEPIQSRCAIVRFSRLSDQEILGRLMIVVAAEKVPYAPEGLEAIIFTADGDMRQALNNLQATFSGFRFINQENVFKVCDQPHPLHVKNMVKNVLDGKFDEPCSALKQLYDLGYSPTDIITTLFRVVKNYDMAEYLKLEMLKETGFAHMRICDGVGSFLQLSGLLAKFALVRETAKAP

SEQ ID NO: 13430 - protein, 300 aa, Zea mays subsp. mays
  peptide (1)..(300): Ceres Seq. ID no. 12407376
MPSPAWRSLPATATCPTSSSPGLRGPGRRRASWRWRMSSSGPAIVMPCWSSMPQMTGVWMFVRNKIKMFAQKKVTLQPGRHKIVILDEADSMTSGAQQALRRTMEIYSNTTRFALACNTSSKIIEPIQSRCAIVRFSRLSDQEILGRLMIVVAAEKVPYAPEGLEAIIFTADGDMRQALNNLQATFSGFRFINQENVFKVCDQPHPLHVKNMVKNVLDGKFDEPCSALKQLYDLGYSPTDIITTLFRVVKNYDMAEYLKLEMLKETGFAHMRICDGVGSFLQLSGLLAKFALVRETAKAP

SEQ ID NO: 13431 - protein, 264 aa, Zea mays subsp. mays
  peptide (1)..(264): Ceres Seq. ID no. 12407377
MSSSGPAIVMPCWSSMPQMTGVWMFVRNKIKMFAQKKVTLQPGRHKIVILDEADSMTSGAQQALRRTMEIYSNTTRFALACNTSSKIIEPIQSRCAIVRFSRLSDQEILGRLMIVVAAEKVPYAPEGLEAIIFTADGDMRQALNNLQATFSGFRFINQENVFKVCDQPHPLHVKNMVKNVLDGKFDEPCSALKQLYDLGYSPTDIITTLFRVVKNYDMAEYLKLEMLKETGFAHMRICDGVGSFLQLSGLLAKFALVRETAKAP

SEQ ID NO: 13432 - DNA, 1549 bp, Zea mays subsp. mays
  misc_feature (1)..(1549): Ceres Seq. ID no. 12373460
  misc_feature (1)..(1549): Ortholog of  Ceres SEQ ID NO 15177969 as cited in SEQ ID NO 58823
  misc_feature (1)..(1549): Ortholog of  Ceres SEQ ID NO 15177963 as cited in SEQ ID NO 59105
  misc_feature (1)..(1549): Ortholog of  Ceres SEQ ID NO 14302746 as cited in SEQ ID NO 66646
tccctcgtcttctgccgcagacgcttcccgtgatcagaatccaagaaatggcgggtccaggtccagcgcgcaccgcgcggagcgttgctctcctgtgtttcctggtttcctgcgctgcgctcgtggacagccgtggcggagccagccggccgagccggcaggacctcgatgtcggcctcggcggcgggggcgtcggcatcggcatcggcatcggcggcggcagcccttcgtcgccttctccgacgccgccgtcgtcgcagccgcagccgtgcgacttcgagaacgagcggctgtacagggcgtacctcgtgatccagcagttccggagcacggtgacgtgcgacccgatgggcgtcacgcagagctggagcggcaccgacgtgtgcagctacaagggcttcttctgcgagcggccgcccaacgtgacggaccgggccatcgcgtccgtcgacttcaacggctacatgctgcaggcggggtccctgcggggcttcgtcgacagcctgccggacctggcgctgttccacgccaactccaacgacttcggcggcgccgtgcccgcgctgggcggcctgcagtacttctacgagctggacctgagcaacaacaagctcgcgcccgccgcgttcccggcggacgtgctgggcctcaccaacgccaccttcgtcgacatccgcttcaacagcttctacggcgagctccccgccggcgtcttctgcaagctcccgcgggtgcaggccatcttcgtcaacaacaaccgcttctccggcgccctccccgacaacatcgggcagtcgccggtgaactacctctctctggccaacaacaggttcacgggggagatacccaggtccatcgcccgcaacgccggcacgctcctcgaggtgctcttcctcaacaacagcctcagcggctgcctcccccacgagctcggcctcctggagaaggccacggtcatcgacgccggcgctaaccgcctcacgggcaccatcccggcgtcgttcgcgtgcctgcgcaaggtggagcagctcaacctggcgggcaacctcttgtacggcgaggtgcccgacgcgctctgccggctcgcgttcagcaacctcaagaacctcacgctctccgacaactacttcacgtcgctcgggtcctgctgctgggacctgatcaaggaagggaggctcaacgtcgaccgcaactgcatccagtgggcgcccaaccagcgctcgcacgaggactgcgccaagttcctccgccagcccaagtcatgcccggtcaacaactacgttccgtgccgcagcaaataccaaagctccagcgagccggccgacgacgcggcggcggagtacaggtaccggacctactcggcgctgcatccttgaggtggagtggagtggagggcacttcactgattgataaagcgcattgtccgtttcgtgtgagcgtgaaacgactggtcactcgcctgggcctggccctggcccgtttgtgctcggtgggttgtgttgatgtgttgtgtcactgtgtagaaatgttgaatgttccccttcgctcg

SEQ ID NO: 13433 - protein, 457 aa, Zea mays subsp. mays
  peptide (1)..(457): Ceres Seq. ID no. 12373461
PRLLPQTLPVIRIQEMAGPGPARTARSVALLCFLVSCAALVDSRGGASRPSRQDLDVGLGGGGVGIGIGIGGGSPSSPSPTPPSSQPQPCDFENERLYRAYLVIQQFRSTVTCDPMGVTQSWSGTDVCSYKGFFCERPPNVTDRAIASVDFNGYMLQAGSLRGFVDSLPDLALFHANSNDFGGAVPALGGLQYFYELDLSNNKLAPAAFPADVLGLTNATFVDIRFNSFYGELPAGVFCKLPRVQAIFVNNNRFSGALPDNIGQSPVNYLSLANNRFTGEIPRSIARNAGTLLEVLFLNNSLSGCLPHELGLLEKATVIDAGANRLTGTIPASFACLRKVEQLNLAGNLLYGEVPDALCRLAFSNLKNLTLSDNYFTSLGSCCWDLIKEGRLNVDRNCIQWAPNQRSHEDCAKFLRQPKSCPVNNYVPCRSKYQSSSEPADDAAAEYRYRTYSALHP

SEQ ID NO: 13434 - protein, 442 aa, Zea mays subsp. mays
  peptide (1)..(442): Ceres Seq. ID no. 12373462
MAGPGPARTARSVALLCFLVSCAALVDSRGGASRPSRQDLDVGLGGGGVGIGIGIGGGSPSSPSPTPPSSQPQPCDFENERLYRAYLVIQQFRSTVTCDPMGVTQSWSGTDVCSYKGFFCERPPNVTDRAIASVDFNGYMLQAGSLRGFVDSLPDLALFHANSNDFGGAVPALGGLQYFYELDLSNNKLAPAAFPADVLGLTNATFVDIRFNSFYGELPAGVFCKLPRVQAIFVNNNRFSGALPDNIGQSPVNYLSLANNRFTGEIPRSIARNAGTLLEVLFLNNSLSGCLPHELGLLEKATVIDAGANRLTGTIPASFACLRKVEQLNLAGNLLYGEVPDALCRLAFSNLKNLTLSDNYFTSLGSCCWDLIKEGRLNVDRNCIQWAPNQRSHEDCAKFLRQPKSCPVNNYVPCRSKYQSSSEPADDAAAEYRYRTYSALHP

SEQ ID NO: 13435 - protein, 342 aa, Zea mays subsp. mays
  peptide (1)..(342): Ceres Seq. ID no. 12373463
MGVTQSWSGTDVCSYKGFFCERPPNVTDRAIASVDFNGYMLQAGSLRGFVDSLPDLALFHANSNDFGGAVPALGGLQYFYELDLSNNKLAPAAFPADVLGLTNATFVDIRFNSFYGELPAGVFCKLPRVQAIFVNNNRFSGALPDNIGQSPVNYLSLANNRFTGEIPRSIARNAGTLLEVLFLNNSLSGCLPHELGLLEKATVIDAGANRLTGTIPASFACLRKVEQLNLAGNLLYGEVPDALCRLAFSNLKNLTLSDNYFTSLGSCCWDLIKEGRLNVDRNCIQWAPNQRSHEDCAKFLRQPKSCPVNNYVPCRSKYQSSSEPADDAAAEYRYRTYSALHP

SEQ ID NO: 13436 - DNA, 1143 bp, Zea mays subsp. mays
  misc_feature (1)..(1143): Ceres Seq. ID no. 12365155
  misc_feature (1)..(1143): Ortholog of  Ceres SEQ ID NO 13502952 as cited in SEQ ID NO 62271
  misc_feature (1)..(1143): Ortholog of  Ceres SEQ ID NO 13502973 as cited in SEQ ID NO 68052
  misc_feature (1)..(1143): Ortholog of  Ceres SEQ ID NO 13596000 as cited in SEQ ID NO 68188
aaaagaatcacctcctcaacctccagcccaacctccagcccgggatcgagagcaatggcgctcgccaaggccaaggagatcgttgcctccgctcccctcgtcgtcttcagcaaaacttcctgccctttctgcgtccgtgtgaagcagttgttcgagaagctcggagcaagcctacaaggccattggcaacgggtacaggctggccgacaacaagttcgccgacctgacgaacgaggagttcagggccaagatgctgggcttcggacggcctcgcagcggaggcggagccgggcactccacagcgccgagcaccgtggcttgtattggaagtggactgatgggtcgtcagggttattctgatctaccgaaaagcgtggactggcgagagaagggagctgtcgcgccggtgaagagccagggggactgtggctcttgctgggcgttctccgccgttgcggccatcgagggcatcaaccagatcaagaacgggaagctggtgtccctgtcggagcaggagctggtggactgcgacaccaaggccatcggctgcgccggcgggtacatgagctgggccttcgagttcgtcatgaagaaccgcggcctcaccaccgaacggaactacccgtatcaagggctgaacggcgcctgccagacgccgaagctgaaggagagcgcggtgagcatctccgggtacatgaacgtgacgcccagcagcgagccggacctcctgcgggccgccgcggcgcagccggtgtccgtggccgtggacgccggcagcttcgtgtggcagctctacggcggcggcgtcttcacgggaccctgcaccgccgagctgaaccacggcgtcacggtggtcgggtacggcgagacccagggggacacggacggcgacggtagcggcgtgcccgggaagaagtactggatcgtcaagaactcgtgggggcccgagtggggcgacgccggctacatcctcatgcaacgcgaagccagcgtcgcgtctggcctctgcggcatcgctatgctcccgagctacccggtcatgtgatccggcggctgccgccgtcgagacctacagctgcagctctaagaacaatcagtcattatgttggccatcttttgaacaaagggcgttcctctttcccc

SEQ ID NO: 13437 - protein, 264 aa, Zea mays subsp. mays
  peptide (1)..(264): Ceres Seq. ID no. 12365156
MLGFGRPRSGGGAGHSTAPSTVACIGSGLMGRQGYSDLPKSVDWREKGAVAPVKSQGDCGSCWAFSAVAAIEGINQIKNGKLVSLSEQELVDCDTKAIGCAGGYMSWAFEFVMKNRGLTTERNYPYQGLNGACQTPKLKESAVSISGYMNVTPSSEPDLLRAAAAQPVSVAVDAGSFVWQLYGGGVFTGPCTAELNHGVTVVGYGETQGDTDGDGSGVPGKKYWIVKNSWGPEWGDAGYILMQREASVASGLCGIAMLPSYPVM

SEQ ID NO: 13438 - protein, 235 aa, Zea mays subsp. mays
  peptide (1)..(235): Ceres Seq. ID no. 12365157
MGRQGYSDLPKSVDWREKGAVAPVKSQGDCGSCWAFSAVAAIEGINQIKNGKLVSLSEQELVDCDTKAIGCAGGYMSWAFEFVMKNRGLTTERNYPYQGLNGACQTPKLKESAVSISGYMNVTPSSEPDLLRAAAAQPVSVAVDAGSFVWQLYGGGVFTGPCTAELNHGVTVVGYGETQGDTDGDGSGVPGKKYWIVKNSWGPEWGDAGYILMQREASVASGLCGIAMLPSYPVM

SEQ ID NO: 13439 - protein, 160 aa, Zea mays subsp. mays
  peptide (1)..(160): Ceres Seq. ID no. 12365158
MSWAFEFVMKNRGLTTERNYPYQGLNGACQTPKLKESAVSISGYMNVTPSSEPDLLRAAAAQPVSVAVDAGSFVWQLYGGGVFTGPCTAELNHGVTVVGYGETQGDTDGDGSGVPGKKYWIVKNSWGPEWGDAGYILMQREASVASGLCGIAMLPSYPVM

SEQ ID NO: 13440 - DNA, 1562 bp, Zea mays subsp. mays
  misc_feature (1)..(1562): Ceres Seq. ID no. 12365090
  misc_feature (1)..(1562): Ortholog of  Ceres SEQ ID NO 13639663 as cited in SEQ ID NO 57850
aagcccagctgacaacaccggcctccgagaagcagcgcaggcgcagggcattccagaacgttcggcggcggcgaggcgacacgcccaccaccagtcagccgccccgccacagccatgcgcctccacgccggcgcacgcctcgcgctcctgctcgcccgccgctccctctcctcctccccccgtatcccgcgggtgcacacagggatacggagcgaggcgccctcccggagctctcccttctatccgccgagcagcgcccgcaggtccttccacgggaccaggccggtggcggcaagggactactacgatgtgctcggcgtcagcaagagcgccagccaggcggagatcaaaaaggcctattatgggcttgcaaagaagctccatccagacacaaataaaggtgatgcggatgcagaacgcaagtttcaagaggttcaacgagcttatgagactctaaaggatgaacaaaaaagatcattatatgatcaggttggccctgatcagtatgagaaaactgcttctggcggaggcggaactggcttcgagggtggttttggaaatccatttgaggatatttttggtggtggcggtggcggtggtggaatgaatgatttctttaggaacatttttggggatagggactttagaggacgagatgttaaggttgcactcgaactatcatttatggaagcagttcaagggtgcagcaaaacggtcaccttccaaacgtctgtaacatgtgaaatctgtggtggagccggtgtgcctcctggaaccacacctgaaacatgtctatcttgcaggggttcaggatttatattcatgcaaaccgggcccttcaggatgcaatcaacctgcacaaaatgtggtggttctgggaaaactgtgaaggaattctgcaaggcatgcagaggaaacaaagttgtgcctggaaggaaatcagtccgccttgacatactgcctggtttggataatgaggataccataaaggtggttcgatcaggtggagaagacccagatggccgtccaggtgatctttatgtgaccctcgaggttcgtgaggatcctgttttccgaagagagaaaggtgatattcatgttgatgctgtcctgaatgtgactcaggcaattttgggagggacagttcaagtcccaactctcagtggagacgttgttctaaaggtcaagcccggtactcaacctggtcagaaggtagttctgagaggaaaagggatcaagacaagaaactcaccgcactacggagatcaatatgtccatttcaatgtcaacatccccgaaaatttgacgtctagacagcgggagctgatcgaggaattcgcgaaggaggagcaaggcgaagacgagaaggacgccaaggcagcagctggagcatcggggggatagccggttttaggagccacagtagtgccttttagctggtatttataccgtgaccatagacctgtctcaaattcgcagcgaaaaaaatatatagataggtctttgtttcggattttgtagctggaataaatggataatacgtctagaactgattttctgcc

SEQ ID NO: 13441 - protein, 429 aa, Zea mays subsp. mays
  peptide (1)..(429): Ceres Seq. ID no. 12365091
MRLHAGARLALLLARRSLSSSPRIPRVHTGIRSEAPSRSSPFYPPSSARRSFHGTRPVAARDYYDVLGVSKSASQAEIKKAYYGLAKKLHPDTNKGDADAERKFQEVQRAYETLKDEQKRSLYDQVGPDQYEKTASGGGGTGFEGGFGNPFEDIFGGGGGGGGMNDFFRNIFGDRDFRGRDVKVALELSFMEAVQGCSKTVTFQTSVTCEICGGAGVPPGTTPETCLSCRGSGFIFMQTGPFRMQSTCTKCGGSGKTVKEFCKACRGNKVVPGRKSVRLDILPGLDNEDTIKVVRSGGEDPDGRPGDLYVTLEVREDPVFRREKGDIHVDAVLNVTQAILGGTVQVPTLSGDVVLKVKPGTQPGQKVVLRGKGIKTRNSPHYGDQYVHFNVNIPENLTSRQRELIEEFAKEEQGEDEKDAKAAAGASGG

SEQ ID NO: 13442 - protein, 266 aa, Zea mays subsp. mays
  peptide (1)..(266): Ceres Seq. ID no. 12365092
MNDFFRNIFGDRDFRGRDVKVALELSFMEAVQGCSKTVTFQTSVTCEICGGAGVPPGTTPETCLSCRGSGFIFMQTGPFRMQSTCTKCGGSGKTVKEFCKACRGNKVVPGRKSVRLDILPGLDNEDTIKVVRSGGEDPDGRPGDLYVTLEVREDPVFRREKGDIHVDAVLNVTQAILGGTVQVPTLSGDVVLKVKPGTQPGQKVVLRGKGIKTRNSPHYGDQYVHFNVNIPENLTSRQRELIEEFAKEEQGEDEKDAKAAAGASGG

SEQ ID NO: 13443 - protein, 239 aa, Zea mays subsp. mays
  peptide (1)..(239): Ceres Seq. ID no. 12365093
MEAVQGCSKTVTFQTSVTCEICGGAGVPPGTTPETCLSCRGSGFIFMQTGPFRMQSTCTKCGGSGKTVKEFCKACRGNKVVPGRKSVRLDILPGLDNEDTIKVVRSGGEDPDGRPGDLYVTLEVREDPVFRREKGDIHVDAVLNVTQAILGGTVQVPTLSGDVVLKVKPGTQPGQKVVLRGKGIKTRNSPHYGDQYVHFNVNIPENLTSRQRELIEEFAKEEQGEDEKDAKAAAGASGG

SEQ ID NO: 13444 - DNA, 1191 bp, Zea mays subsp. mays; identical to SEQ ID NO: 11054
  misc_feature (1)..(1191): Ceres Seq. ID no. 13634967
  misc_feature (1)..(1191): Ortholog of  Ceres SEQ ID NO 13581804 as cited in SEQ ID NO 51424
  misc_feature (1)..(1191): Ortholog of  Ceres SEQ ID NO 13663874 as cited in SEQ ID NO 67003

SEQ ID NO: 13445 - protein, 128 aa, Zea mays subsp. mays; identical to SEQ ID NO: 11055
  peptide (1)..(128): Ceres Seq. ID no. 13634968

SEQ ID NO: 13446 - protein, 108 aa, Zea mays subsp. mays; identical to SEQ ID NO: 11056
  peptide (1)..(108): Ceres Seq. ID no. 13634969

SEQ ID NO: 13447 - protein, 100 aa, Zea mays subsp. mays; identical to SEQ ID NO: 11057
  peptide (1)..(100): Ceres Seq. ID no. 13634970

SEQ ID NO: 13448 - DNA, 1273 bp, Zea mays subsp. mays
  misc_feature (1)..(1273): Ceres Seq. ID no. 12351874
  misc_feature (1)..(1273): Ortholog of  Ceres SEQ ID NO 14313038 as cited in SEQ ID NO 59520
  misc_feature (1)..(1273): Ortholog of  Ceres SEQ ID NO 13595464 as cited in SEQ ID NO 59792
  misc_feature (1)..(1273): Ortholog of  Ceres SEQ ID NO 14316416 as cited in SEQ ID NO 60078
  misc_feature (1)..(1273): Ortholog of  Ceres SEQ ID NO 13664262 as cited in SEQ ID NO 61094
atcgtccccgcctgcacctcgcgagcatccaaagctgtacttgcggcaagttctcgcaaaatcctactcccaccgccgactcgtacctccgctcccctcctccccaacccttccacgcttgcttctccgggagggaaggcacacgggaggtcgccccgccacccatcgcaaaagccacgcgccaccaaactcttttttccctcacccagtcgctttcgcgttcagcgcgagctgagccagccagtgggtcggtcgctggaggcggagccataaaggcgtcagcgacggcagcatgatgagcggcagatcgggcgggagggacgccgagggcgagtgggaggttcggcccggcgggatgctggtgcagcgcagggacggtgaggcggccggccccgtcatcaggatcagggtctcccacggcgccaacttccgcgaggtcgtcgtgccggcgcaggctaccttcggtgagttgaagaggatccttgttcagactactggcttggagcctgagaggcagaggctcttcttccgtgggaaggagaagagtgacagagagttcctgcacacggcaggtgttaaggatggagcaaagctgcttctgctcgagaagcctgcccctgccaacatagagcagaaggttgagcctgtgattatggatgaaagcatgatgaaggcatgtgcggctgttgctcgtgttagagttgaagttgataagctgtctgctaaggtgtgtgacttggagaagaatgtactaggagggagaaaggttgaggataaagaatttgttgtcttgacggagctgcttatgatgcagctgctgaaactcgatggcattgaagctgaaggagaagcaagggcacagaggaaggctgaggtgcgccgagttcagtcccttgtggagaccttggataagctgaaagcaagaaatgcaaaccccttcagcgatcataataaggctgtttcagtaacaacgcagtgggagacgtttgagaacggcatgggcagcttgagtgctccacctccccgtgtttcttcaacgcaagctaacactgactgggagcagttcgactaggctcagatgaagctgttgatgtatcatgaaatctgtgagatcggtatggacattcctttccgaggcagcgaggtgttgtgtatatgcaccacgtttgataacttttggcgtcccaagtgcctgtgattctgtgaatgttaccagatcgtgccactgccatactaccatgtgaattgcatcgctcattgagggtcatattcc

SEQ ID NO: 13449 - protein, 259 aa, Zea mays subsp. mays
  peptide (1)..(259): Ceres Seq. ID no. 12351875
MMSGRSGGRDAEGEWEVRPGGMLVQRRDGEAAGPVIRIRVSHGANFREVVVPAQATFGELKRILVQTTGLEPERQRLFFRGKEKSDREFLHTAGVKDGAKLLLLEKPAPANIEQKVEPVIMDESMMKACAAVARVRVEVDKLSAKVCDLEKNVLGGRKVEDKEFVVLTELLMMQLLKLDGIEAEGEARAQRKAEVRRVQSLVETLDKLKARNANPFSDHNKAVSVTTQWETFENGMGSLSAPPPRVSSTQANTDWEQFD

SEQ ID NO: 13450 - protein, 258 aa, Zea mays subsp. mays
  peptide (1)..(258): Ceres Seq. ID no. 12351876
MSGRSGGRDAEGEWEVRPGGMLVQRRDGEAAGPVIRIRVSHGANFREVVVPAQATFGELKRILVQTTGLEPERQRLFFRGKEKSDREFLHTAGVKDGAKLLLLEKPAPANIEQKVEPVIMDESMMKACAAVARVRVEVDKLSAKVCDLEKNVLGGRKVEDKEFVVLTELLMMQLLKLDGIEAEGEARAQRKAEVRRVQSLVETLDKLKARNANPFSDHNKAVSVTTQWETFENGMGSLSAPPPRVSSTQANTDWEQFD

SEQ ID NO: 13451 - protein, 238 aa, Zea mays subsp. mays
  peptide (1)..(238): Ceres Seq. ID no. 12351877
MLVQRRDGEAAGPVIRIRVSHGANFREVVVPAQATFGELKRILVQTTGLEPERQRLFFRGKEKSDREFLHTAGVKDGAKLLLLEKPAPANIEQKVEPVIMDESMMKACAAVARVRVEVDKLSAKVCDLEKNVLGGRKVEDKEFVVLTELLMMQLLKLDGIEAEGEARAQRKAEVRRVQSLVETLDKLKARNANPFSDHNKAVSVTTQWETFENGMGSLSAPPPRVSSTQANTDWEQFD

SEQ ID NO: 13452 - DNA, 1526 bp, Zea mays subsp. mays
  misc_feature (1)..(1526): Ceres Seq. ID no. 12411257
  misc_feature (1)..(1526): Ortholog of  Ceres SEQ ID NO 14311981 as cited in SEQ ID NO 55703
  misc_feature (1)..(1526): Ortholog of  Ceres SEQ ID NO 15226227 as cited in SEQ ID NO 63433
  misc_feature (1)..(1526): Ortholog of  Ceres SEQ ID NO 13599003 as cited in SEQ ID NO 0
aagagaccagggctgaactgctgaagctgagataggattgagaatcgctgccagtggaaagcggcactagcagcagggcagaagcaagaaccagcaagaaaggggagagagaaagcggaaggactttttctcggattggatccttcgcttttgggggaaggagaaggcccctctctgtcctctctccatccttgcggagggcgctagcaggcagcagcggaaggaggaagagatgttcccgcctggcctgatccaccaccgccctgacgcccccgttcccggcgatggggcgacgcgctccggccccggcgggccgagccttgtactgacggcggaccccaagcccaggctgcggtggacggccgacctccacgagcgtttcgtcgacgccgtggcccagctcggcggacccgagaaagcaacaccaaaaactatcttaaggacaatgggcgtcaagggtcttactctttttcacttgaagagccatcttcagaaatacagattagggaaacaatctggtaaggagggatcagagcaatctaaagatgcatcctatcttctagatgctcaaagtggaatgagcgtgtcccctagagttcctgcccaggatatgaaagaaagccaagaagttaaagaagcactgagagcgcagatggaagtccaaagaagactgcatgaacaagtggaggtccaaaagcgcgtgcagatcagaatggaagcgtttcagaagtacatcgacagtatcctggagagcgcgtgcaagatggtcaccgaacagttcgcttcaagtggcttcagcatctctgaccctgatctcccggagatatcccctggaggggtggtcatgtgtggcggccccacggacacgttgagctcgtcggtgttcaaccagctttccgtcagctccatcggctcgcacagtccaggaggcaaaccttccccttccccatcaggcatggaatgtccgccgctgctcctccacaagtcgcatgagctcaagcggaggtcctcttgaactgacaaatcggcgaagcctgagggcgcggtgatggctgtctttgctagtgttgtcggatatggtggtactggtggtgacaagggaaattggtggtccagtcttgtggtagctgactttctccaggtagcaagatattgctgtgtttgtttgatcagtcaaagcatcaaacagacagacctacgttcatgtgaactgcctcatgcatgtgctagattgaaaaaaaaagttatcatattttgtcatgagattatgattctactagctagcatccttagcacacttgagatgttgttgactcgtgtcctagtgtcctctgtgttgatccatgtatgcacagcgattcatgttgggagttgggactgggacatgttaacaccagatgtttcaagcttcgtactttgcctcagttgtccatgcatgcagcaggcatcccagtacttcacctgctgttgaacttgaagactagtgtattcagcttatgaaagattcatgctgagtttgtaccccc

SEQ ID NO: 13453 - protein, 260 aa, Zea mays subsp. mays
  peptide (1)..(260): Ceres Seq. ID no. 12411258
MFPPGLIHHRPDAPVPGDGATRSGPGGPSLVLTADPKPRLRWTADLHERFVDAVAQLGGPEKATPKTILRTMGVKGLTLFHLKSHLQKYRLGKQSGKEGSEQSKDASYLLDAQSGMSVSPRVPAQDMKESQEVKEALRAQMEVQRRLHEQVEVQKRVQIRMEAFQKYIDSILESACKMVTEQFASSGFSISDPDLPEISPGGVVMCGGPTDTLSSSVFNQLSVSSIGSHSPGGKPSPSPSGMECPPLLLHKSHELKRRSS

SEQ ID NO: 13454 - protein, 189 aa, Zea mays subsp. mays
  peptide (1)..(189): Ceres Seq. ID no. 12411259
MGVKGLTLFHLKSHLQKYRLGKQSGKEGSEQSKDASYLLDAQSGMSVSPRVPAQDMKESQEVKEALRAQMEVQRRLHEQVEVQKRVQIRMEAFQKYIDSILESACKMVTEQFASSGFSISDPDLPEISPGGVVMCGGPTDTLSSSVFNQLSVSSIGSHSPGGKPSPSPSGMECPPLLLHKSHELKRRSS

SEQ ID NO: 13455 - protein, 145 aa, Zea mays subsp. mays
  peptide (1)..(145): Ceres Seq. ID no. 12411260
MSVSPRVPAQDMKESQEVKEALRAQMEVQRRLHEQVEVQKRVQIRMEAFQKYIDSILESACKMVTEQFASSGFSISDPDLPEISPGGVVMCGGPTDTLSSSVFNQLSVSSIGSHSPGGKPSPSPSGMECPPLLLHKSHELKRRSS

SEQ ID NO: 13456 - DNA, 1328 bp, Zea mays subsp. mays
  misc_feature (1)..(1328): Ceres Seq. ID no. 12341356
  misc_feature (1)..(1328): Ortholog of  Ceres SEQ ID NO 12615948 as cited in SEQ ID NO 62529
  misc_feature (1)..(1328): Ortholog of  Ceres SEQ ID NO 12615552 as cited in SEQ ID NO 63248
  misc_feature (1)..(1328): Ortholog of  Ceres SEQ ID NO 12617368 as cited in SEQ ID NO 64050
  misc_feature (1)..(1328): Ortholog of  Ceres SEQ ID NO 13597866 as cited in SEQ ID NO 64974
  misc_feature (1)..(1328): Ortholog of  Ceres SEQ ID NO 13597624 as cited in SEQ ID NO 65426
accggatgacccagcgtgcctcgtgcgcgcctcccttgtctgcaaggcttggcggaagctcctctctagccgcatcttcctccgccgctaccgcagattccacggcgcgccgcccctgcttggcttcctctacaacatctacgacgaacgcccctgtgctcgattcgtcgtcgccgccgacgccgccaccacattccccttctctgcaccggcgttcgaccaattcgatttgtggttcattgagtgccgccacgggcgcgcgctgctacaaactttcgagcggcatgcgcccgcgcgcctcgtcgtctgggacctcatcacgggcgaccagcagcacataccaattcccgtgcccgggtacccttacttctgccgcaccgcagctgttctctgcgccgcggatggctgcgaccatcttgactgccacgggggccgatacctcgtcgtcgtcataggcgcctacgaagaagatactctcaggtgggcgagcgtttactcatcagagactggcgtatgggctacgtcatcctccattcaaattgatgcctacgtcgagcaaaggcccagcctccttgccggtgacgcgctctactttagcgcacaggaaggcaaaatgattgtcaaatacgacctcaatggacagagcctacatgtgatcaatgcgccggatatgtttgagccaacagagggcattgctgtgaccgtggaggacggtggtttgggactcgccggagtgaaggatggcaacctccacctttggtcatggcaggttggtcctggcggcattgcggaatgggtgcaaggcagaatcgtaaagttgaggacgctcttccctattcttaaaccgctggactcacttgatgtgattggcttccaagagggcacagataccattttcattagcatagatatggaggtcttcgcagtcatgctcagatcggagcaggtgaagaaggtaggcaagacgggctccaaatatgccatggcaccctatgtgagcttctacactccagatcttgcgaagggcagattgctatcaccatgaagatgcagtgatccatccattaacatggccgtggcactattgacttcttaaggagatgatgagttaaagtgtttttccagtttggacggttatggaaaaaaagcaagttaccatgttcattcagaaaagtttagtttcttacctgtgcagtttaagtaaggaactgtaagaacaggatatcatcgtcaaaatggctagtctattagttaggctgttcaagagattggttggttttattgtggccttttcgctattgttattttataagggatgccctgtgtcc

SEQ ID NO: 13457 - protein, 347 aa, Zea mays subsp. mays
  peptide (1)..(347): Ceres Seq. ID no. 12341357
PDDPACLVRASLVCKAWRKLLSSRIFLRRYRRFHGAPPLLGFLYNIYDERPCARFVVAADAATTFPFSAPAFDQFDLWFIECRHGRALLQTFERHAPARLVVWDLITGDQQHIPIPVPGYPYFCRTAAVLCAADGCDHLDCHGGRYLVVVIGAYEEDTLRWASVYSSETGVWATSSSIQIDAYVEQRPSLLAGDALYFSAQEGKMIVKYDLNGQSLHVINAPDMFEPTEGIAVTVEDGGLGLAGVKDGNLHLWSWQVGPGGIAEWVQGRIVKLRTLFPILKPLDSLDVIGFQEGTDTIFISIDMEVFAVMLRSEQVKKVGKTGSKYAMAPYVSFYTPDLAKGRLLSP

SEQ ID NO: 13458 - DNA, 1535 bp, Zea mays subsp. mays
  misc_feature (1)..(1535): Ceres Seq. ID no. 12351554
  misc_feature (1)..(1535): Ortholog of  Ceres SEQ ID NO 14314404 as cited in SEQ ID NO 57421
  misc_feature (1)..(1535): Ortholog of  Ceres SEQ ID NO 13493536 as cited in SEQ ID NO 58515
  misc_feature (1)..(1535): Ortholog of  Ceres SEQ ID NO 15225741 as cited in SEQ ID NO 59606
  misc_feature (1)..(1535): Ortholog of  Ceres SEQ ID NO 12618461 as cited in SEQ ID NO 64349
gatagaacacgacctggggggttcagatcggatcggaagcttccataagtttccatcgggcttcgccggtatggcgatccgcaaggggtcttcgtacgccgtcgcggcacttctcgcgctcgcctctgtcgccgccgttgcaggggaggtcttcttccaggagaagttcgaagatggctgggaaagtcggtgggtcaagtccgagtggaagaaggatgagaacatggctggtgaatggaaccacacctcgggaaaatggaatggagatgccgaggacaaaggtattcaaacctccgaggattacaggttctatgccatttcagccgaataccctgagttcagcaacaaggataagaccctggtgctgcagttctctgtgaagcacgagcagaagcttgactgcggtggtggctacgtcaagttgctgggtggtggtgatgtagaccagaagaaatttggtggagacacatcttacagcattatgtttggaccagatatctgtgggtacagcaccaagaaggttcacactatcctgaccaaggatggcaagaaccacttgatcaagaaggatgtgccttgtgagactgatcagttgactcatgtttacactttgatcatccgtcctgatgcaacatacagcattctcattgataatgaagataagcaaactggcagcatctacgagcactgggatattcttccccctaagaaaatcaaggacccagaggctaagaagcctgaggactgggatgacaaggagtacattcctgaccctgaggacaagaagccagagggctatgatgatattcccaaggaaattcctgaccctgatgctaagaagcctgaggactgggacgatgaggaagatggtgaatggactgcccctaccattcccaacccagaatacaagggaccatggaaacaaaagaaaatcaagaacccgaactaccagggtaaatggaaggcacctatgattgacaacccagattttaaggatgatccatacatttacgccttcgacagcttgaagtacattggcattgagctgtggcaggttaaaatcgggcactctgtttgacaacatcatcatcactgatgaccctgccttggccaagacttttgcagaggagacctggggcaagcacaaggaggcagaaaaggctgcttttgatgaggccgagaaaaaaaaggaagaagaggatgccgccaagggtggggatgatgaggatgatgacctagaggatgaggaagacgatgagaaggcagacgaggacaaggccgactctgatgccgaggatggcaaggattctgatgatgagaagcacgacgagctctagatggcgaggatgatgttgcggccgctggcctagatttatcagctctgccactatgaagttctttttttttcccgtgaccaccaagaatgtagaacactgctaataagcagatggacagtttgggtcgccgtagcgctttgtagtcatttttcccattaaagccgataacactgaacaaggaggaaggatcttttgccc

SEQ ID NO: 13459 - protein, 358 aa, Zea mays subsp. mays
  peptide (1)..(358): Ceres Seq. ID no. 12351555
IEHDLGGSDRIGSFHKFPSGFAGMAIRKGSSYAVAALLALASVAAVAGEVFFQEKFEDGWESRWVKSEWKKDENMAGEWNHTSGKWNGDAEDKGIQTSEDYRFYAISAEYPEFSNKDKTLVLQFSVKHEQKLDCGGGYVKLLGGGDVDQKKFGGDTSYSIMFGPDICGYSTKKVHTILTKDGKNHLIKKDVPCETDQLTHVYTLIIRPDATYSILIDNEDKQTGSIYEHWDILPPKKIKDPEAKKPEDWDDKEYIPDPEDKKPEGYDDIPKEIPDPDAKKPEDWDDEEDGEWTAPTIPNPEYKGPWKQKKIKNPNYQGKWKAPMIDNPDFKDDPYIYAFDSLKYIGIELWQVKIGHSV

SEQ ID NO: 13460 - protein, 335 aa, Zea mays subsp. mays
  peptide (1)..(335): Ceres Seq. ID no. 12351556
MAIRKGSSYAVAALLALASVAAVAGEVFFQEKFEDGWESRWVKSEWKKDENMAGEWNHTSGKWNGDAEDKGIQTSEDYRFYAISAEYPEFSNKDKTLVLQFSVKHEQKLDCGGGYVKLLGGGDVDQKKFGGDTSYSIMFGPDICGYSTKKVHTILTKDGKNHLIKKDVPCETDQLTHVYTLIIRPDATYSILIDNEDKQTGSIYEHWDILPPKKIKDPEAKKPEDWDDKEYIPDPEDKKPEGYDDIPKEIPDPDAKKPEDWDDEEDGEWTAPTIPNPEYKGPWKQKKIKNPNYQGKWKAPMIDNPDFKDDPYIYAFDSLKYIGIELWQVKIGHSV

SEQ ID NO: 13461 - protein, 284 aa, Zea mays subsp. mays
  peptide (1)..(284): Ceres Seq. ID no. 12351557
MAGEWNHTSGKWNGDAEDKGIQTSEDYRFYAISAEYPEFSNKDKTLVLQFSVKHEQKLDCGGGYVKLLGGGDVDQKKFGGDTSYSIMFGPDICGYSTKKVHTILTKDGKNHLIKKDVPCETDQLTHVYTLIIRPDATYSILIDNEDKQTGSIYEHWDILPPKKIKDPEAKKPEDWDDKEYIPDPEDKKPEGYDDIPKEIPDPDAKKPEDWDDEEDGEWTAPTIPNPEYKGPWKQKKIKNPNYQGKWKAPMIDNPDFKDDPYIYAFDSLKYIGIELWQVKIGHSV

SEQ ID NO: 13462 - DNA, 1399 bp, Zea mays subsp. mays
  misc_feature (1)..(1399): Ceres Seq. ID no. 12373457
  misc_feature (1)..(1399): Ortholog of  Ceres SEQ ID NO 12605597 as cited in SEQ ID NO 20378
  misc_feature (1)..(1399): Ortholog of  Ceres SEQ ID NO 13494050 as cited in SEQ ID NO 20553
  misc_feature (1)..(1399): Ortholog of  Ceres SEQ ID NO 15177308 as cited in SEQ ID NO 52713
actccgtcatttctatcagacgcaagcagcagtgacgccgcgctacccgaccaaaatccgccgccggtgcccagaactcgacgggaaaaccggggctttggtcgccggacgccggctgcctcgagatgctcgtgtgggcggccaccgcgtcaccacccagcactccatccgccgtgccatttgctcctccccaccgcgccgccgctccccgccctccaccgcctctctgccgctcgctcccggggctgctgtgcgcgggcctgatccctccgccgcgcgccgccgcttctgacggcgacgtcttctgggaggagccagacgacggctccgggagcgactacgaggacgacggcccggagcaaaggagggccttgcgtttcccatcttcctcgccgtcctacaggctcgaggcgtcggcgcagcaagaacaggacctccggagagagatcgagcttctcctaacgcctgaagaaaaggctactttggaccagcatgagacccctgacgtcactagaatatcatcacccaagtggcacccacttcatagctacgcgttggcactgcagatacccctcatggacaagcttctgaacagcggtgttgacatcaacttagttgatagagatggcttcacctctcttcacaaggctgtcatagggaaaaaagaggctgtcattagccatctcctaagaaaaggggcaaatccccatgttagagatagggatggagccacaccattacattatgctgttcaagctggtgccctgcaaaccgtgaagttactgattaagtacaaggttgatgtcaatgttgccgataatgatggatggacaccactccatttagccatacagagtaggaatagagatatagctaaggtcttgcttgtcaatggtgcggataagacaagaagaaccaaggatgggaggactgcgctggatctaagtctatgctttggaagggatttcaagtcatatgatcttgcaaagcttgtcaagcttattccagcaaacagaggtgcgtgatttcgctctgccatgaatctgagggaaagaaagtccaaaagttagccaatgcagcagcctcatacgacccatgcatagcttatgaagaagggtccaggagccgcgtgccgccgtgccagtcatcattcattttttttttcttgaccgccaactcaaacgatctgacagattgctctacaattgtgccgttagatttcagtgtccatggtctgtagcctgttcgacgtgactcgaaaaatgatgatgtacatgcaacagtcctccagctgttgtgttcagttgttttgttcaatatgggccagggccaccaaaacaagatctgaattgtaactgttattaaccttcagcatatgtgtacacattatcgttttggc

SEQ ID NO: 13463 - protein, 299 aa, Zea mays subsp. mays
  peptide (1)..(299): Ceres Seq. ID no. 12373458
MLVWAATASPPSTPSAVPFAPPHRAAAPRPPPPLCRSLPGLLCAGLIPPPRAAASDGDVFWEEPDDGSGSDYEDDGPEQRRALRFPSSSPSYRLEASAQQEQDLRREIELLLTPEEKATLDQHETPDVTRISSPKWHPLHSYALALQIPLMDKLLNSGVDINLVDRDGFTSLHKAVIGKKEAVISHLLRKGANPHVRDRDGATPLHYAVQAGALQTVKLLIKYKVDVNVADNDGWTPLHLAIQSRNRDIAKVLLVNGADKTRRTKDGRTALDLSLCFGRDFKSYDLAKLVKLIPANRGA

SEQ ID NO: 13464 - protein, 149 aa, Zea mays subsp. mays
  peptide (1)..(149): Ceres Seq. ID no. 12373459
MDKLLNSGVDINLVDRDGFTSLHKAVIGKKEAVISHLLRKGANPHVRDRDGATPLHYAVQAGALQTVKLLIKYKVDVNVADNDGWTPLHLAIQSRNRDIAKVLLVNGADKTRRTKDGRTALDLSLCFGRDFKSYDLAKLVKLIPANRGA

SEQ ID NO: 13465 - DNA, 1100 bp, Zea mays subsp. mays
  misc_feature (1)..(1100): Ceres Seq. ID no. 12351878
  misc_feature (1)..(1100): Ortholog of  Ceres SEQ ID NO 14301996 as cited in SEQ ID NO 56657
aatctacagatatgaaccaagttagataaggtactcgtacaccgaacatgttcgatagaatgctctagtgacagcgaaaaaaccaaacaacaaaaaccaacgaaatccctgccatttttataggagacgacggtgcggggaggcaagggaagggggcgacgaagaggaaagcgaagaaagcgtcatggggcttggccttggcgtgcgggcggcgcccttcacgtacgcggcgcacgcgctggccgtcgcggcggcggccatggtgttggtctgggccatctacttccgcggtgggctcgccatcgaggccaccaacaagaacctcatcttcaacgttcaccctgttcttatgcttatcggttatattatcatcggcggcgaagctataatggtatacagggtacttccaacatcgaaccacgggacaaataagctgatccatctagttctccacgggattgcacttgtccttggtgcggttggaatatatttcgccttcaaaaatcataatgagagtgggattgccaatctttacagtctgcactcttggattgggatagggacgattactttgtatggtattcagtggatagttggattcgttacattcttcttccctggtgctgcgccaaacgtgaagaagggtgttcttccttggcacatactctttgggctctttgtctacatcttagcactggctaatgcggaactcggctttcttgagaagctcactttcctcgagagctcgggtctcgacaaatacggcacagaggcattcttggtgaacttcacagcgttggttgtcgtgttgtttggtgcctctgttgtggtggctgctatagctccagttcgccttgaagaaccacagggttatgttccaattccagaaaactagtacaaatgaaatgtacatcatatgcagttgccaggattggctgttaccatatggagctaagctattcatctctctttattaaggagaagaagatgatggagttatcacgataagaagatagtgcatcgtcattgtgtgtgtatatgtatatacattccgtgatacttcaaaatttcagtatatgcgaaattgaatatactgcttc

SEQ ID NO: 13466 - protein, 236 aa, Zea mays subsp. mays
  peptide (1)..(236): Ceres Seq. ID no. 12351879
MGLGLGVRAAPFTYAAHALAVAAAAMVLVWAIYFRGGLAIEATNKNLIFNVHPVLMLIGYIIIGGEAIMVYRVLPTSNHGTNKLIHLVLHGIALVLGAVGIYFAFKNHNESGIANLYSLHSWIGIGTITLYGIQWIVGFVTFFFPGAAPNVKKGVLPWHILFGLFVYILALANAELGFLEKLTFLESSGLDKYGTEAFLVNFTALVVVLFGASVVVAAIAPVRLEEPQGYVPIPEN

SEQ ID NO: 13467 - protein, 211 aa, Zea mays subsp. mays
  peptide (1)..(211): Ceres Seq. ID no. 12351880
MVLVWAIYFRGGLAIEATNKNLIFNVHPVLMLIGYIIIGGEAIMVYRVLPTSNHGTNKLIHLVLHGIALVLGAVGIYFAFKNHNESGIANLYSLHSWIGIGTITLYGIQWIVGFVTFFFPGAAPNVKKGVLPWHILFGLFVYILALANAELGFLEKLTFLESSGLDKYGTEAFLVNFTALVVVLFGASVVVAAIAPVRLEEPQGYVPIPEN

SEQ ID NO: 13468 - protein, 181 aa, Zea mays subsp. mays
  peptide (1)..(181): Ceres Seq. ID no. 12351881
MLIGYIIIGGEAIMVYRVLPTSNHGTNKLIHLVLHGIALVLGAVGIYFAFKNHNESGIANLYSLHSWIGIGTITLYGIQWIVGFVTFFFPGAAPNVKKGVLPWHILFGLFVYILALANAELGFLEKLTFLESSGLDKYGTEAFLVNFTALVVVLFGASVVVAAIAPVRLEEPQGYVPIPEN

SEQ ID NO: 13469 - DNA, 1211 bp, Zea mays subsp. mays
  misc_feature (1)..(1211): Ceres Seq. ID no. 12341358
  misc_feature (1)..(1211): Ortholog of  Ceres SEQ ID NO 15175048 as cited in SEQ ID NO 59975
  misc_feature (1)..(1211): Ortholog of  Ceres SEQ ID NO 13597333 as cited in SEQ ID NO 63974
  misc_feature (1)..(1211): Ortholog of  Ceres SEQ ID NO 13599307 as cited in SEQ ID NO 0
  misc_feature (1)..(1211): Ortholog of  Ceres SEQ ID NO 15179517 as cited in SEQ ID NO 0
aagggaaaacaaagagtgtgtgctgtgtgttatccatttcttctcctctctgctctgttcacttcgttctagtggggagcgccgccgctgcagttgccgccgccaccagagcagtccacctcggtctgatatggcgaccgggagtgcaagtgccatcgcgtccttctccgtggcggcggcagcggctgctgctctgcgcgtcaggcggccatgcgctcgcgcttgcgcttgggccccctcgcagcgaccgcagcaaggggcactcgtcagcctcaagccttgcgcctcactggcaccacaagctcctctgtggcgcgcggagtcggatgccgcggggggtggtgccggcgccggcgatgtcatgggcctcctcctccgggagcgcatagtcttcctcggcaacgagatcgaggacttcctcgcggacgccgtcgtcagccagctcctcctccttgacgccatcgacccggactctgacatccgcctcttcgtcaactcaccagggggatcccttagcgcaacaatggccatctatgatgtaatgcagcttgtgagggcagacgtgtccactattggaatgggcatagctggatcaacagcttctataatccttggtggtggcacgaagggcaagcgatttgccatgcccaacaccaggattatgatccatcagcctgtcggaggtgcaagcgggcaggccctagatgtagaggtccaagcgaaggagatattgaccaacaagaggaatgtcattcggatcgtatcaggcttcacaggccgcactcctgagcaggtagagaaagacattgacagagatcgttacatgggccctctcgaggctgtcgattatggactcattgatggcgtgatcgatggagacagtattatcccacttgagcctgtcccggagagggtgaagcctaagtacaactacgaagagctgtacaaggatccacagaagtttcttacaccagatgtcccagatgatgagatatactagtcgaaaagttgtattttgtgcgaatgttaagtctgttcttcagcaagcagatgtttttcgtcgcttgtagctgtcaaaccaaccatagcactagtagcttattgatcttgtttactgactggatggtgattcgagcaggcaactagaacctgttggttgtgtttctggtgttacattgtggtgttagaatggtccggctgtttcgttttgg

SEQ ID NO: 13470 - protein, 332 aa, Zea mays subsp. mays
  peptide (1)..(332): Ceres Seq. ID no. 12341359
RENKECVLCVIHFFSSLLCSLRSSGERRRCSCRRHQSSPPRSDMATGSASAIASFSVAAAAAAALRVRRPCARACAWAPSQRPQQGALVSLKPCASLAPQAPLWRAESDAAGGGAGAGDVMGLLLRERIVFLGNEIEDFLADAVVSQLLLLDAIDPDSDIRLFVNSPGGSLSATMAIYDVMQLVRADVSTIGMGIAGSTASIILGGGTKGKRFAMPNTRIMIHQPVGGASGQALDVEVQAKEILTNKRNVIRIVSGFTGRTPEQVEKDIDRDRYMGPLEAVDYGLIDGVIDGDSIIPLEPVPERVKPKYNYEELYKDPQKFLTPDVPDDEIY

SEQ ID NO: 13471 - protein, 289 aa, Zea mays subsp. mays
  peptide (1)..(289): Ceres Seq. ID no. 12341360
MATGSASAIASFSVAAAAAAALRVRRPCARACAWAPSQRPQQGALVSLKPCASLAPQAPLWRAESDAAGGGAGAGDVMGLLLRERIVFLGNEIEDFLADAVVSQLLLLDAIDPDSDIRLFVNSPGGSLSATMAIYDVMQLVRADVSTIGMGIAGSTASIILGGGTKGKRFAMPNTRIMIHQPVGGASGQALDVEVQAKEILTNKRNVIRIVSGFTGRTPEQVEKDIDRDRYMGPLEAVDYGLIDGVIDGDSIIPLEPVPERVKPKYNYEELYKDPQKFLTPDVPDDEIY

SEQ ID NO: 13472 - protein, 212 aa, Zea mays subsp. mays
  peptide (1)..(212): Ceres Seq. ID no. 12341361
MGLLLRERIVFLGNEIEDFLADAVVSQLLLLDAIDPDSDIRLFVNSPGGSLSATMAIYDVMQLVRADVSTIGMGIAGSTASIILGGGTKGKRFAMPNTRIMIHQPVGGASGQALDVEVQAKEILTNKRNVIRIVSGFTGRTPEQVEKDIDRDRYMGPLEAVDYGLIDGVIDGDSIIPLEPVPERVKPKYNYEELYKDPQKFLTPDVPDDEIY

SEQ ID NO: 13473 - DNA, 2021 bp, Zea mays subsp. mays
  misc_feature (1)..(2021): Ceres Seq. ID no. 12363212
  misc_feature (1)..(2021): Ortholog of  Ceres SEQ ID NO 14307827 as cited in SEQ ID NO 54367
aagtgacattcggtgtaaactcaaacatgtgttcagttcccacttgagcttcttggttgcaatggcactgccattcatggtatgaacaatagatcctggtttcagaagatgcatataccgagacatctacaagctcacctcctgcgcaagaatcctcttacttaccaccgtagtttcaaaaaagacatttcaagccccaactccgtcctggagccacatagtgaagagctccacaagatacatcttggtctttcctctggtgtggaggatgcaacaaaatgggagcatataaacataaagagcatagaaccagatggtgcctatgtgattgctagccaactaaatctcgttgaggaacagcaagggggcagctatgttgctagccttgagttggagcttcagcaggcacgggatagagtgagcaagctagaagctgaacggctttcagccaagaagcaactgaatcacttgttcaagaaacttgcagaggagaaagcagcttggcggaacagagagcacaagaaagttcaagccattcttgaagatatgaaggctgatctggagcatgagaaaaagaaccggaggcagttggagactattaacttcaagcttgttgatgagttgaaagaggtcaaaatggccgcgaagcagctattgcaagagtatgacaacgagcagaagacgcgggaactcacggatgaggtgtgcaacaagctagtgagggagatagaggaacacaagtcagagatcgaagccttgaagcaggattctgtcaaactacgcggcgacctggatgaggataggaaattgctacagatggctgaggtgtggcgtgaggagcgagtgcagatgaaacttgtcgatgccaagctcattcttgaggccaaacatgaacagttgagcaaactgcaggaggaggtggaggctttcatttcgactttcagctcttccaaaggagacagcacaattgttgaagccgcacacaacattgtacaggccattgggtcggccagagaccaagaggttgaattcacatatgagccaccaagagcatcagaagatatactggccatctttgaagagctacgcccaagtgaagagatggagaaaaaggaaaccgaaccatgcctaaagcaagaaatccaagaagctagcccaacagctgatatatttctggaaaatcgagccagattgttcccagatggaagccattctgatgagagcgataaggaagatggaagcagctgggagaccatgagccatgaagagatgcaaggctcaagccattcgccgtatgaaagtgaacattcagtcaacaagatctttgacagaatttcgtggaccagtggaaacgattctgagggtgagcaggccaacaaactgtgtgatgacttgagcagtgtgtacctgacggacatggaacagtccaagaagaaagagtccgccatatcaaagctgtggaagtcatctccactgaaaaactgtgaattccgtacaaaagatgttgcggatatgataaatgggagattatcaagtgcaagtcttccaaatggtgtgtactctactgccaaaggcttgaatctagatatgggggacagcacccctagcaccacgcaatggagctcaccggattcgatgaacagccagctcaaccggggtttcagaggttgcatggagatggttcagaggcagagcctgaaggcgaagctccttgaagctcggatggagagccagaagattcagctccgccatgtgctcaaccagaaaacttaagttagaacctcactgtgtcgaaataaaattccaagcattggatttattacatttcccttgtccattgtagtatgtagcttagtctcatgtgtttctgcttcatagaactatatagctagctatagccttgtaggctgacctggccatggttgatgcagctgtctaattgtggcagtacatttgacaggttatgtgcccgtctttatgtgtaatgtggcagtaaactgtaaaccagaagcattattcag

SEQ ID NO: 13474 - protein, 563 aa, Zea mays subsp. mays
  peptide (1)..(563): Ceres Seq. ID no. 12363213
MNNRSWFQKMHIPRHLQAHLLRKNPLTYHRSFKKDISSPNSVLEPHSEELHKIHLGLSSGVEDATKWEHINIKSIEPDGAYVIASQLNLVEEQQGGSYVASLELELQQARDRVSKLEAERLSAKKQLNHLFKKLAEEKAAWRNREHKKVQAILEDMKADLEHEKKNRRQLETINFKLVDELKEVKMAAKQLLQEYDNEQKTRELTDEVCNKLVREIEEHKSEIEALKQDSVKLRGDLDEDRKLLQMAEVWREERVQMKLVDAKLILEAKHEQLSKLQEEVEAFISTFSSSKGDSTIVEAAHNIVQAIGSARDQEVEFTYEPPRASEDILAIFEELRPSEEMEKKETEPCLKQEIQEASPTADIFLENRARLFPDGSHSDESDKEDGSSWETMSHEEMQGSSHSPYESEHSVNKIFDRISWTSGNDSEGEQANKLCDDLSSVYLTDMEQSKKKESAISKLWKSSPLKNCEFRTKDVADMINGRLSSASLPNGVYSTAKGLNLDMGDSTPSTTQWSSPDSMNSQLNRGFRGCMEMVQRQSLKAKLLEARMESQKIQLRHVLNQKT

SEQ ID NO: 13475 - protein, 554 aa, Zea mays subsp. mays
  peptide (1)..(554): Ceres Seq. ID no. 12363214
MHIPRHLQAHLLRKNPLTYHRSFKKDISSPNSVLEPHSEELHKIHLGLSSGVEDATKWEHINIKSIEPDGAYVIASQLNLVEEQQGGSYVASLELELQQARDRVSKLEAERLSAKKQLNHLFKKLAEEKAAWRNREHKKVQAILEDMKADLEHEKKNRRQLETINFKLVDELKEVKMAAKQLLQEYDNEQKTRELTDEVCNKLVREIEEHKSEIEALKQDSVKLRGDLDEDRKLLQMAEVWREERVQMKLVDAKLILEAKHEQLSKLQEEVEAFISTFSSSKGDSTIVEAAHNIVQAIGSARDQEVEFTYEPPRASEDILAIFEELRPSEEMEKKETEPCLKQEIQEASPTADIFLENRARLFPDGSHSDESDKEDGSSWETMSHEEMQGSSHSPYESEHSVNKIFDRISWTSGNDSEGEQANKLCDDLSSVYLTDMEQSKKKESAISKLWKSSPLKNCEFRTKDVADMINGRLSSASLPNGVYSTAKGLNLDMGDSTPSTTQWSSPDSMNSQLNRGFRGCMEMVQRQSLKAKLLEARMESQKIQLRHVLNQKT

SEQ ID NO: 13476 - protein, 408 aa, Zea mays subsp. mays
  peptide (1)..(408): Ceres Seq. ID no. 12363215
MKADLEHEKKNRRQLETINFKLVDELKEVKMAAKQLLQEYDNEQKTRELTDEVCNKLVREIEEHKSEIEALKQDSVKLRGDLDEDRKLLQMAEVWREERVQMKLVDAKLILEAKHEQLSKLQEEVEAFISTFSSSKGDSTIVEAAHNIVQAIGSARDQEVEFTYEPPRASEDILAIFEELRPSEEMEKKETEPCLKQEIQEASPTADIFLENRARLFPDGSHSDESDKEDGSSWETMSHEEMQGSSHSPYESEHSVNKIFDRISWTSGNDSEGEQANKLCDDLSSVYLTDMEQSKKKESAISKLWKSSPLKNCEFRTKDVADMINGRLSSASLPNGVYSTAKGLNLDMGDSTPSTTQWSSPDSMNSQLNRGFRGCMEMVQRQSLKAKLLEARMESQKIQLRHVLNQKT

SEQ ID NO: 13477 - DNA, 1655 bp, Zea mays subsp. mays
  misc_feature (1)..(1655): Ceres Seq. ID no. 12363163
  misc_feature (1)..(1655): Ortholog of  Ceres SEQ ID NO 13598282 as cited in SEQ ID NO 68138
gcacgagaccattacctagaacatcctaatcgaaaaatcctgatccgctcgctcccaaatcctactgccgtgcgcgtcccgctcctgcggctgcgccccccgcgaggagaaagccggttagccacagccccacacgcgcgcatcacgccacaaccacaccacacggcaccagcctcctccgtcgtcaccgcctcgggcctcggccgatcgatcgggtctggcggcggccacaagcgtcgctgtttaataaatagccctgagcggcctccccctgcccctcagttcagcctcggctggacatcgagtttgtaccgggaaacagcttggtagtataaccactgaagatggtcagtgggaggccgcatggtgaattggactcatggttcaagagcctcatggtgacctctagcagcgagagggggcaggctgggagtggtggtccagcgccaacattaacaggatggaaggaccttccgatggagctcctggtgcggataatatccacagttggagatgataggatggtcatcgtggcgtctggtgtttgcacaggctggcgtgacgcgctgggatggggggtcactaatctttcacttacatggtgcaaactgagcatgaataatttaatgatatctcttgcccacaagttcacgaagttgcaagttctcactctccggcaaaacaaacctcagcttgaagacagtgccgtagaggctgttgccaactactgccatgacctacgtgagttagacctcagcagaagcttcaggcttagtgaccgctccttgtatgcgctggcccatggatgcccacggcttacaagactgaacattagtggatgttccagtttcagcgacactgcgttgatttaccttacctgccgctgtaaaaacctcaagtgcctgaacttgtgtggatgcgtgaaggctgttactgacagagctttgcaggctattgctcagaactgtgggcagctgcagtctttgaacctaggctggtgtgatgatgttacagataagggagtgaccagcttagcgtcaggatgccctgatctcagagccgtagactcgtgcggttgtgttcttataacagatgagagtgtggttgctcttgccaacggatgtccgcacctgcgctcgctgggcctctacttctgccagaacatcacggaccgcgccatgtactccctcgcaaacagccgcgtgaagagcaagcgtgggaggtgggatgcagtgaaagacgggctcgcgaacctcaacatcagccagtgcaccgccctgacgcccccggcggtgcaggccgtctgcgactccttcccggcgctgcacacctgccccgagaggcactccctcatcatcagtggctgcctcagcctcacgtcagtccactgcgcctgcgccctccacccacaccgtgccgggagagccctgatggccaaccatgcgtactaataaacatgttggtggctttgcgctgatagttctcgcgaatggggacgcatgcctggggggtgatggcgtcgtccaggtgtagaggaagctccctgtgtacataaactcgaaacttggcggtgtgataaggcactgctgtggtaggactttgtgtgataatcatggagtggcgaatttctagagaatggcatgtactccagtgct

SEQ ID NO: 13478 - protein, 368 aa, Zea mays subsp. mays
  peptide (1)..(368): Ceres Seq. ID no. 12363164
MVSGRPHGELDSWFKSLMVTSSSERGQAGSGGPAPTLTGWKDLPMELLVRIISTVGDDRMVIVASGVCTGWRDALGWGVTNLSLTWCKLSMNNLMISLAHKFTKLQVLTLRQNKPQLEDSAVEAVANYCHDLRELDLSRSFRLSDRSLYALAHGCPRLTRLNISGCSSFSDTALIYLTCRCKNLKCLNLCGCVKAVTDRALQAIAQNCGQLQSLNLGWCDDVTDKGVTSLASGCPDLRAVDSCGCVLITDESVVALANGCPHLRSLGLYFCQNITDRAMYSLANSRVKSKRGRWDAVKDGLANLNISQCTALTPPAVQAVCDSFPALHTCPERHSLIISGCLSLTSVHCACALHPHRAGRALMANHAY

SEQ ID NO: 13479 - protein, 351 aa, Zea mays subsp. mays
  peptide (1)..(351): Ceres Seq. ID no. 12363165
MVTSSSERGQAGSGGPAPTLTGWKDLPMELLVRIISTVGDDRMVIVASGVCTGWRDALGWGVTNLSLTWCKLSMNNLMISLAHKFTKLQVLTLRQNKPQLEDSAVEAVANYCHDLRELDLSRSFRLSDRSLYALAHGCPRLTRLNISGCSSFSDTALIYLTCRCKNLKCLNLCGCVKAVTDRALQAIAQNCGQLQSLNLGWCDDVTDKGVTSLASGCPDLRAVDSCGCVLITDESVVALANGCPHLRSLGLYFCQNITDRAMYSLANSRVKSKRGRWDAVKDGLANLNISQCTALTPPAVQAVCDSFPALHTCPERHSLIISGCLSLTSVHCACALHPHRAGRALMANHAY

SEQ ID NO: 13480 - protein, 324 aa, Zea mays subsp. mays
  peptide (1)..(324): Ceres Seq. ID no. 12363166
MELLVRIISTVGDDRMVIVASGVCTGWRDALGWGVTNLSLTWCKLSMNNLMISLAHKFTKLQVLTLRQNKPQLEDSAVEAVANYCHDLRELDLSRSFRLSDRSLYALAHGCPRLTRLNISGCSSFSDTALIYLTCRCKNLKCLNLCGCVKAVTDRALQAIAQNCGQLQSLNLGWCDDVTDKGVTSLASGCPDLRAVDSCGCVLITDESVVALANGCPHLRSLGLYFCQNITDRAMYSLANSRVKSKRGRWDAVKDGLANLNISQCTALTPPAVQAVCDSFPALHTCPERHSLIISGCLSLTSVHCACALHPHRAGRALMANHAY

SEQ ID NO: 13481 - DNA, 1809 bp, Zea mays subsp. mays
  misc_feature (1)..(1809): Ceres Seq. ID no. 12342466
  misc_feature (1)..(1809): Ortholog of  Ceres SEQ ID NO 13655988 as cited in SEQ ID NO 65557
agtctcggcaatgatgctcctctgattctccccacccgtggctgcgcccatccgtctacaagtaccacctggccgcgcggttggttccaatttccagacggcagtccactggtttttgcttgcatatcctttgtttaggccagagttgagttgtgttccaacttccaagtcttgggttgcggaatcgccggcctcgctcaatcgatggaaaaccataatccattacattctcagattgctgaagtgaaaatggacatctcagcatcagcttctgttgcatcagggaacaaattctgcaagggtggtgcctgtgatttctctgattccagtaactcctcgaaagatgccaaggagagatccacgtccatgaggaagcttataatcgcagtgatcctttgcatcatattcatgacggtggaagtggtcgggggcatcaaagcaaacagtcttgccatcttaactgatgcggcgcaccttctttctgatgtggcagcatttgccatatcgttattctctctctgggctgctggatgggaagcaacaccgcagcagtcatatgggttcttccggattgagattcttggtgccttggtctccattcagctcatatggctacttgctggcatactggtatatgaggctattgtaaggctcattaacgagagtggcgatgtgcagggctccctcatgtttgctgtgtcggcgtttggactgtttgtcaacattataatggctgtattgctaggccatgaccacgggcacggccatggacacagccatggacatccacatgaccatggtcatggtgattcagacgatggccattctcaccatgaagaaccagaacagggccatgttcatcatcatgagcatagccatggaagttctattactgtcacaacacatcaccaccaccactcaggcactggacaacaccatgacgctgaggagccactgatcaagcacgaggccgactgtgagggcacccaatctgctgctaagaagcctcgacgcaatataaacgtacacagcgcttaccttcatgtgcttggggactccatccagagcatcggggtgatgatcggcggggctatcatctggtacaagcccgagtggaaaatcatcgatctgatctgcaccctcatcttctcggtggtcgtgctgttcaccacgatcaggatgctgcgcaacatcctcgaggtcctgatggagagcacgccccgtgagatcgacgccaccaggctggagagggggctctgcgagatggaaggcgtggttgccgtccacgagctgcatatctgggccatcacagtggggaaggtgctactggcttgccatgtgacggtcgccagggaagccgacgcagacgagatccttgacaaggtgattgggtacatcaagacggagtacaacatcagccatgtgaccattcaggtcgagcgtgaatagagggggagctgtcttttgggctgtcagggcataaatggcgtcacgccttcactggttatcttactctgtcggttaaaacttttttttggcacctgggaaggcatcaggcagccatcggagtcttgatgtgcttgcaagttcatctgtggttcaagctttgatggtcagtagtgttatctgttactactagtctattaggcgggggtaggcgtcaaccagtgtgtacgggtttgattttcggtcatgctgttaacagcattgcggttcgtcgaactggatatgtagtttagtacgctgtgtcatcacctcttgtgtaagggaacgcttcttttctgtggtatggaagatgtgaacttcgtg

SEQ ID NO: 13482 - protein, 414 aa, Zea mays subsp. mays
  peptide (1)..(414): Ceres Seq. ID no. 12342467
MENHNPLHSQIAEVKMDISASASVASGNKFCKGGACDFSDSSNSSKDAKERSTSMRKLIIAVILCIIFMTVEVVGGIKANSLAILTDAAHLLSDVAAFAISLFSLWAAGWEATPQQSYGFFRIEILGALVSIQLIWLLAGILVYEAIVRLINESGDVQGSLMFAVSAFGLFVNIIMAVLLGHDHGHGHGHSHGHPHDHGHGDSDDGHSHHEEPEQGHVHHHEHSHGSSITVTTHHHHHSGTGQHHDAEEPLIKHEADCEGTQSAAKKPRRNINVHSAYLHVLGDSIQSIGVMIGGAIIWYKPEWKIIDLICTLIFSVVVLFTTIRMLRNILEVLMESTPREIDATRLERGLCEMEGVVAVHELHIWAITVGKVLLACHVTVAREADADEILDKVIGYIKTEYNISHVTIQVERE

SEQ ID NO: 13483 - protein, 399 aa, Zea mays subsp. mays
  peptide (1)..(399): Ceres Seq. ID no. 12342468
MDISASASVASGNKFCKGGACDFSDSSNSSKDAKERSTSMRKLIIAVILCIIFMTVEVVGGIKANSLAILTDAAHLLSDVAAFAISLFSLWAAGWEATPQQSYGFFRIEILGALVSIQLIWLLAGILVYEAIVRLINESGDVQGSLMFAVSAFGLFVNIIMAVLLGHDHGHGHGHSHGHPHDHGHGDSDDGHSHHEEPEQGHVHHHEHSHGSSITVTTHHHHHSGTGQHHDAEEPLIKHEADCEGTQSAAKKPRRNINVHSAYLHVLGDSIQSIGVMIGGAIIWYKPEWKIIDLICTLIFSVVVLFTTIRMLRNILEVLMESTPREIDATRLERGLCEMEGVVAVHELHIWAITVGKVLLACHVTVAREADADEILDKVIGYIKTEYNISHVTIQVERE

SEQ ID NO: 13484 - protein, 360 aa, Zea mays subsp. mays
  peptide (1)..(360): Ceres Seq. ID no. 12342469
MRKLIIAVILCIIFMTVEVVGGIKANSLAILTDAAHLLSDVAAFAISLFSLWAAGWEATPQQSYGFFRIEILGALVSIQLIWLLAGILVYEAIVRLINESGDVQGSLMFAVSAFGLFVNIIMAVLLGHDHGHGHGHSHGHPHDHGHGDSDDGHSHHEEPEQGHVHHHEHSHGSSITVTTHHHHHSGTGQHHDAEEPLIKHEADCEGTQSAAKKPRRNINVHSAYLHVLGDSIQSIGVMIGGAIIWYKPEWKIIDLICTLIFSVVVLFTTIRMLRNILEVLMESTPREIDATRLERGLCEMEGVVAVHELHIWAITVGKVLLACHVTVAREADADEILDKVIGYIKTEYNISHVTIQVERE

SEQ ID NO: 13485 - DNA, 1493 bp, Zea mays subsp. mays
  misc_feature (1)..(1493): Ceres Seq. ID no. 12362028
  misc_feature (1)..(1493): Ortholog of  Ceres SEQ ID NO 13624495 as cited in SEQ ID NO 0
tgaacatgaaaaaactgcatacttcagatgtggaatccgacaaccttaagaaggatccagaagaaacggattctgctttagagagctcaacagaagtcaacagccaaaaggaagcattggaagctgtgctgtttgagcgcaaaaatgaaatcgaaattctgaaaggtgcaatggcctcagctgctaagcaatttgacgttgaattggaacatcgtgatcttgaaattgataagtgcaagcatgaacttggagtactctcagagaagtatttgcatgataagtctactcttgaggatgagcttagaaagctccatggagtcatcaagaatatggaaggtgacctagaaaaaattcacaggagaaaatgcagctgcaagtctcggattaaagaacttgagcaggcagctcacagcttagaacgttcaacttccgagatagttaagctacaagaagtaataaggaatacacaagcggaattagaaaaggttacagaggataaaattgtgctcaaagaacgcgctaacgaatttgagcaacttttaagggcccttaaggtctcaggtacagaggttgcaaagctaccagaaactatcaagaacctggaagctcagctagaaagagccttagaagagaaatcaatacttcaagaccagatcaagcaggtggagcaggttatgtctgaatctttggagaaacattcacatgagcagtcctctcttgctgctgaccttttgaagttatctgaagcgaacacttcacttggaggcaaattatcctctgtggcggcagagcttgtgcaagtttatgctgataacgaagaagaatctcttgataatgagaagcaaatttctgtcctcaatcaagatattgccgatctgaggagaaagcttgaattgttatcatctgagaaagccgcagttgattatgagttggccaaactgctagctgatattacgactcgtgacgaaaagatgaagcgaatggatgaccacctaaatcagcttcagtttgagcatgccaagctgatggcagaatttgacaccgcacacaggtccttgtcagagctgtgtgcgcaggtttctgagctggaagaagaggtacagaagcagaagcttgtaatatccgagactgcagagggaaaacgagaggctatcaggcagctgtgcttctccattgaacactaccgcagcgggtatcagcagctgaggcagctgttgcaaggccacaggaggccgttggtgatggcaacctgataaagtgaacaatgctggtttgccaatgaactgcacagttgcttgtctctgggtctgttctgtttttagccttgttctttcacaacatgtgccgtgcagcatggtattaagaattttgtggtatgtgtgtagaatgcaatgggatgggatattcatgtcgttcatttacactcctgtcttttgttcttgttgcctactgttgaatgttatgatatgcttgaaccttcatctttttcagcc

SEQ ID NO: 13486 - protein, 416 aa, Zea mays subsp. mays
  peptide (1)..(416): Ceres Seq. ID no. 12362029
NMKKLHTSDVESDNLKKDPEETDSALESSTEVNSQKEALEAVLFERKNEIEILKGAMASAAKQFDVELEHRDLEIDKCKHELGVLSEKYLHDKSTLEDELRKLHGVIKNMEGDLEKIHRRKCSCKSRIKELEQAAHSLERSTSEIVKLQEVIRNTQAELEKVTEDKIVLKERANEFEQLLRALKVSGTEVAKLPETIKNLEAQLERALEEKSILQDQIKQVEQVMSESLEKHSHEQSSLAADLLKLSEANTSLGGKLSSVAAELVQVYADNEEESLDNEKQISVLNQDIADLRRKLELLSSEKAAVDYELAKLLADITTRDEKMKRMDDHLNQLQFEHAKLMAEFDTAHRSLSELCAQVSELEEEVQKQKLVISETAEGKREAIRQLCFSIEHYRSGYQQLRQLLQGHRRPLVMAT

SEQ ID NO: 13487 - protein, 415 aa, Zea mays subsp. mays
  peptide (1)..(415): Ceres Seq. ID no. 12362030
MKKLHTSDVESDNLKKDPEETDSALESSTEVNSQKEALEAVLFERKNEIEILKGAMASAAKQFDVELEHRDLEIDKCKHELGVLSEKYLHDKSTLEDELRKLHGVIKNMEGDLEKIHRRKCSCKSRIKELEQAAHSLERSTSEIVKLQEVIRNTQAELEKVTEDKIVLKERANEFEQLLRALKVSGTEVAKLPETIKNLEAQLERALEEKSILQDQIKQVEQVMSESLEKHSHEQSSLAADLLKLSEANTSLGGKLSSVAAELVQVYADNEEESLDNEKQISVLNQDIADLRRKLELLSSEKAAVDYELAKLLADITTRDEKMKRMDDHLNQLQFEHAKLMAEFDTAHRSLSELCAQVSELEEEVQKQKLVISETAEGKREAIRQLCFSIEHYRSGYQQLRQLLQGHRRPLVMAT

SEQ ID NO: 13488 - protein, 360 aa, Zea mays subsp. mays
  peptide (1)..(360): Ceres Seq. ID no. 12362031
MASAAKQFDVELEHRDLEIDKCKHELGVLSEKYLHDKSTLEDELRKLHGVIKNMEGDLEKIHRRKCSCKSRIKELEQAAHSLERSTSEIVKLQEVIRNTQAELEKVTEDKIVLKERANEFEQLLRALKVSGTEVAKLPETIKNLEAQLERALEEKSILQDQIKQVEQVMSESLEKHSHEQSSLAADLLKLSEANTSLGGKLSSVAAELVQVYADNEEESLDNEKQISVLNQDIADLRRKLELLSSEKAAVDYELAKLLADITTRDEKMKRMDDHLNQLQFEHAKLMAEFDTAHRSLSELCAQVSELEEEVQKQKLVISETAEGKREAIRQLCFSIEHYRSGYQQLRQLLQGHRRPLVMAT

SEQ ID NO: 13489 - DNA, 1422 bp, Zea mays subsp. mays
  misc_feature (1)..(1422): Ceres Seq. ID no. 12405251
  misc_feature (1)..(1422): Ortholog of  Ceres SEQ ID NO 14305026 as cited in SEQ ID NO 52980
  misc_feature (1)..(1422): Ortholog of  Ceres SEQ ID NO 15175670 as cited in SEQ ID NO 55204
  misc_feature (1)..(1422): Ortholog of  Ceres SEQ ID NO 13662391 as cited in SEQ ID NO 68631
cggattaagcgataattaaggcaaagaatctccaagtttgcttcgttcttgcattgaaccatggagtctggacggctcatcttcaacgcgccgggctctggcgccgggcagatgctcttcctcgactgcggcgcaggcggcggtcccggcggcggcttgttccatcgaggcgggagaccgatgcttggccttgaagaagggcgcggcgtaaaacggcccttcttcacctcgcccgacgagctcctcgaggaagagtactacgacgagcagctgccggagaagaagcgccgcctcaccccagagcaggtgcttctgctggagaggagcttcgaggaggagaacaagctggagccggagcgcaagacggagctggcgcgcaagctgggcctgcagcctcgccaggtggccgtctggttccagaaccgccgcgcccggtggaagaccaagcagctcgagcgcgacttcgaccgcctcaaggcctccttcgacgctctccgagcggaccacgacgccctcctccaggacaacaaccgcctccgctcacaggttgtgtcgttgaccgagaagctgcaagagaaggaggatgcgacggagggcggcgccaccgctgacaccgccgcgccggcggtggacgtcgaggcttccctggccgacgacgtcgaggagccagcagagcctgcggcgacgttcgaggtgctgcaggaggtgaagtccgaggacaggctgagcaccggcagcggcgggagcgcggtggtggacgcggacgcgctgctgtacggcaggttcgccgcggcagttgatagcagcgtggagtcgtacttccccggcggcgaggaccactaccacgactgcgggacgatgggccccgtgaaccatggcgccggaggaggcatccagtcggacgacgacggcgccggcagcgacgaggggtgcagctactacgccgacgaagccgccgccgccgccgccgccgcgttcttcgccggacacgccacccaccaccacgcggacgaggacgaggacgccggccagatcagctggtggatgtggaactagacgttcgatcttcccacgccgatcgatcgaccgtcttcgaatcctgtgtcaacaagaagaaaaaagaatcgtgccgtgatttttctttgcgcaacgctgctgtaagcctgtaatggtgaatttctagctatggttatgccgttatgaaggaagaaagtgtatgcatgcatggtagggtaaagagtgggtaattaatatcgttgatcatcccagtcactcgtggtgttccagaagatcaatggagttgggggagaaataagtgcgcatagaggcaagtactactctttttatggcacagtgcctatgtcaaatcagggtgttattaccagttggttttttttaaaaaaaaatactgtactattacgc

SEQ ID NO: 13490 - protein, 331 aa, Zea mays subsp. mays
  peptide (1)..(331): Ceres Seq. ID no. 12405252
MESGRLIFNAPGSGAGQMLFLDCGAGGGPGGGLFHRGGRPMLGLEEGRGVKRPFFTSPDELLEEEYYDEQLPEKKRRLTPEQVLLLERSFEEENKLEPERKTELARKLGLQPRQVAVWFQNRRARWKTKQLERDFDRLKASFDALRADHDALLQDNNRLRSQVVSLTEKLQEKEDATEGGATADTAAPAVDVEASLADDVEEPAEPAATFEVLQEVKSEDRLSTGSGGSAVVDADALLYGRFAAAVDSSVESYFPGGEDHYHDCGTMGPVNHGAGGGIQSDDDGAGSDEGCSYYADEAAAAAAAAFFAGHATHHHADEDEDAGQISWWMWN

SEQ ID NO: 13491 - protein, 314 aa, Zea mays subsp. mays
  peptide (1)..(314): Ceres Seq. ID no. 12405253
MLFLDCGAGGGPGGGLFHRGGRPMLGLEEGRGVKRPFFTSPDELLEEEYYDEQLPEKKRRLTPEQVLLLERSFEEENKLEPERKTELARKLGLQPRQVAVWFQNRRARWKTKQLERDFDRLKASFDALRADHDALLQDNNRLRSQVVSLTEKLQEKEDATEGGATADTAAPAVDVEASLADDVEEPAEPAATFEVLQEVKSEDRLSTGSGGSAVVDADALLYGRFAAAVDSSVESYFPGGEDHYHDCGTMGPVNHGAGGGIQSDDDGAGSDEGCSYYADEAAAAAAAAFFAGHATHHHADEDEDAGQISWWMWN

SEQ ID NO: 13492 - protein, 291 aa, Zea mays subsp. mays
  peptide (1)..(291): Ceres Seq. ID no. 12405254
MLGLEEGRGVKRPFFTSPDELLEEEYYDEQLPEKKRRLTPEQVLLLERSFEEENKLEPERKTELARKLGLQPRQVAVWFQNRRARWKTKQLERDFDRLKASFDALRADHDALLQDNNRLRSQVVSLTEKLQEKEDATEGGATADTAAPAVDVEASLADDVEEPAEPAATFEVLQEVKSEDRLSTGSGGSAVVDADALLYGRFAAAVDSSVESYFPGGEDHYHDCGTMGPVNHGAGGGIQSDDDGAGSDEGCSYYADEAAAAAAAAFFAGHATHHHADEDEDAGQISWWMWN

SEQ ID NO: 13493 - DNA, 707 bp, Zea mays subsp. mays; identical to SEQ ID NO: 10264
  misc_feature (1)..(707): Ceres Seq. ID no. 12441460
  misc_feature (1)..(707): Ortholog of  Ceres SEQ ID NO 12610267 as cited in SEQ ID NO 51993
  misc_feature (1)..(707): Ortholog of  Ceres SEQ ID NO 13495070 as cited in SEQ ID NO 53216
  misc_feature (1)..(707): Ortholog of  Ceres SEQ ID NO 12598241 as cited in SEQ ID NO 61025
  misc_feature (1)..(707): Ortholog of  Ceres SEQ ID NO 13661333 as cited in SEQ ID NO 61620
  misc_feature (1)..(707): Ortholog of  Ceres SEQ ID NO 15173749 as cited in SEQ ID NO 61775
  misc_feature (1)..(707): Ortholog of  Ceres SEQ ID NO 13596812 as cited in SEQ ID NO 62283
  misc_feature (1)..(707): Ortholog of  Ceres SEQ ID NO 13623021 as cited in SEQ ID NO 0

SEQ ID NO: 13494 - protein, 145 aa, Zea mays subsp. mays; identical to SEQ ID NO: 10265
  peptide (1)..(145): Ceres Seq. ID no. 12441461

SEQ ID NO: 13495 - protein, 140 aa, Zea mays subsp. mays; identical to SEQ ID NO: 10266
  peptide (1)..(140): Ceres Seq. ID no. 12441462

SEQ ID NO: 13496 - protein, 139 aa, Zea mays subsp. mays; identical to SEQ ID NO: 4019
  peptide (1)..(139): Ceres Seq. ID no. 12441463

SEQ ID NO: 13497 - DNA, 1421 bp, Zea mays subsp. mays
  misc_feature (1)..(1421): Ceres Seq. ID no. 12405865
  misc_feature (1)..(1421): Ortholog of  Ceres SEQ ID NO 13597533 as cited in SEQ ID NO 64942
atacaacgaggtagatcctcctccgtaaagcgaaagcaaaaaccaaccaaacaagctagctagagctagccaagccgcggcgtgcctccgctccggccggcccgcccctgtcagagcccccaccgccgctgccacctccgccagccgtcaccccaggcgttggatcggggccctctcgatccgcgcccggcgaatccagacggacccgcattggggttggggccccttcgatccggcgcttggtgggggtttggctgggagctccaggctgaggggacggggcggggggacctgatccttcattccgttcggatttcgcttttcccccgtggggtctcgactgccggagggggaggaggacatggatttggcgtcggtcaacgaggagctggccgagatcgacgggcagatcggcgatatcctccgcgtattgcaaaatgggttccagaagctggagaagatcaaggatgccaaccgccacagcaggcagcttgaagagcttactgataagatgcgagactgcaagagactcatcaaagacttcgagcgagttagcaaagctgaggctgagcatactgatccagcaacagcaaaaatgttgcatgacagaaagcagtcgatgatcaaagaattaaactcctacgttgctctaaagaaacagcaggcaagtgaaaacaagagaatcgatctttttgatgggccaagtgctgaagatggctttggtgaagaaaatgtcctgttagcatcaaatatgacaaaccagcagttaatggatcaaggcaatcaactaatggatgaaactgatcaagctattgcacgatctaagcagactgtccaagaaaccgtcaatgtgggcacagaaactgcagctgctctgaaagcacagacagaacaaatgagcagagttgttaatgagttggattccatccatttctccatcaaaaaggcatctcaattggtgaaagaaatcggtcgacaggttgcaactgatcgatgcatcatggccatgctttttctcattgttgctggagtcatagctataataattgttaagattgtgaacccacacaacaaggacattcgcgacatccctggcttggcaccacccgtcagcaggcggctgttgcgatagaggacaggtgaattgcatacctggtgtaaaaattgatgtggcgcggcgccttggcaagcccatctgtattctacgtcttgtaaaacgctgctccagtcatgtggtatattgctgtaaaacttctcatgggatccactcctactccttggctacacacagtgcgtatatgttcctcctagttcgccttcctgtttttgcaaaactaactctgaacggtgttctgttagaatcatgtgcacacatgatggttgagatgtgtctatgatgttcattgtgacgaacgattctt

SEQ ID NO: 13498 - protein, 256 aa, Zea mays subsp. mays
  peptide (1)..(256): Ceres Seq. ID no. 12405866
MDLASVNEELAEIDGQIGDILRVLQNGFQKLEKIKDANRHSRQLEELTDKMRDCKRLIKDFERVSKAEAEHTDPATAKMLHDRKQSMIKELNSYVALKKQQASENKRIDLFDGPSAEDGFGEENVLLASNMTNQQLMDQGNQLMDETDQAIARSKQTVQETVNVGTETAAALKAQTEQMSRVVNELDSIHFSIKKASQLVKEIGRQVATDRCIMAMLFLIVAGVIAIIIVKIVNPHNKDIRDIPGLAPPVSRRLLR

SEQ ID NO: 13499 - protein, 206 aa, Zea mays subsp. mays
  peptide (1)..(206): Ceres Seq. ID no. 12405867
MRDCKRLIKDFERVSKAEAEHTDPATAKMLHDRKQSMIKELNSYVALKKQQASENKRIDLFDGPSAEDGFGEENVLLASNMTNQQLMDQGNQLMDETDQAIARSKQTVQETVNVGTETAAALKAQTEQMSRVVNELDSIHFSIKKASQLVKEIGRQVATDRCIMAMLFLIVAGVIAIIIVKIVNPHNKDIRDIPGLAPPVSRRLLR

SEQ ID NO: 13500 - protein, 178 aa, Zea mays subsp. mays
  peptide (1)..(178): Ceres Seq. ID no. 12405868
MLHDRKQSMIKELNSYVALKKQQASENKRIDLFDGPSAEDGFGEENVLLASNMTNQQLMDQGNQLMDETDQAIARSKQTVQETVNVGTETAAALKAQTEQMSRVVNELDSIHFSIKKASQLVKEIGRQVATDRCIMAMLFLIVAGVIAIIIVKIVNPHNKDIRDIPGLAPPVSRRLLR

SEQ ID NO: 13501 - DNA, 1576 bp, Zea mays subsp. mays
  misc_feature (1)..(1576): Ceres Seq. ID no. 12341390
  misc_feature (1)..(1576): Ortholog of  Ceres SEQ ID NO 12465151 as cited in SEQ ID NO 67782
atccgccgcttccgcttcgtcccaaatcccttttggcgggagacgagcagcaggctgcctccacttcccgcgcaaagcagtaaatcggagtaaccatggacggcggatcctccacaccggcgagccccccaccgacggtatccgcgtcggcggcgaatatggaggagtaccggaactggaagaagaacgcggcggtgctttacgacctcgtcatctcccacccgctcgagtggccatcgctcaccgtgcagtggctcccatcggagtcctcggcccgcagccaccggctcgtcgtgggtacgcacacctccgacgaggcccccaacaacctcatggtcttggacgcggtgctaccgctcccacctcgcctcgctgcagccgtcgctgcctcgggcggcgccgtcccgttcccatccgtatccgtctcgcgcgtggcgccacaccgtggcgaggtcaaccgcgcgcgctgcatgccgcagcgtccctatacggtggccaccaaaacgtgcgtcgacgaggtgcacgtgtaccatctcggcgatgacgacggcagcgggaagagcggcgccgaagttgtgctcaaggggcatgaggcggagggttatggcttgtcatggagcccgatgaaggaggggtggctgctgagcggctcgtatgataagaagatttgcttgtgggacatctcctctgggagtggcgctcctgttctggatgcacaacaggtgtttgtggctcatgaggatctcgttgaagatgttgcttggcacctgaaggatgaacatatatttggatctgttggggatgactgtaagttgatgatgtgggacttgcgtacaaacaaaccagaacaatctattcttgcacatcgaaaggaggtcaactctttgtcattcaatccattcaatgaatggatattggctacagcatctggagacacaactatcaacctatttgacatgcgaaaactatctagaagcttgcatacttttgacagtcatgaggcggaggtgtttcaggttgaatggaatccaaatttggctactgtattagcttcatctgccgcagacaagagagtgatgatatgggatattaataggattggcgatgagcagtcagaggaagacgcagacgacggaccaccggagctgctgttcgttcatggaggccacacagacaagatatcagagctgtcgtggaatcctagcgagaaatgggccattgccagcgtgtctgaagacaacatcctgcagatatgggagatggcagaaagcatatactgtgatgacctctccatgcaggttaactgactcgtgcctcgaagcataaagccagagtgggcatctataagaactctttaaatccgtgacatgcattaggctatctccagcagatctcctatcacatcctttatgttatcccctattttcaaacttctctctgcaaagagtcagttattgacttgagtaatcttgatagtctgaatctgattgagcctttaggcataaatgtaactttgaaattgtagggtcagggttgacttcttttccagtttggaacttactactccctgcagttc

SEQ ID NO: 13502 - protein, 403 aa, Zea mays subsp. mays
  peptide (1)..(403): Ceres Seq. ID no. 12341391
MDGGSSTPASPPPTVSASAANMEEYRNWKKNAAVLYDLVISHPLEWPSLTVQWLPSESSARSHRLVVGTHTSDEAPNNLMVLDAVLPLPPRLAAAVAASGGAVPFPSVSVSRVAPHRGEVNRARCMPQRPYTVATKTCVDEVHVYHLGDDDGSGKSGAEVVLKGHEAEGYGLSWSPMKEGWLLSGSYDKKICLWDISSGSGAPVLDAQQVFVAHEDLVEDVAWHLKDEHIFGSVGDDCKLMMWDLRTNKPEQSILAHRKEVNSLSFNPFNEWILATASGDTTINLFDMRKLSRSLHTFDSHEAEVFQVEWNPNLATVLASSAADKRVMIWDINRIGDEQSEEDADDGPPELLFVHGGHTDKISELSWNPSEKWAIASVSEDNILQIWEMAESIYCDDLSMQVN

SEQ ID NO: 13503 - protein, 382 aa, Zea mays subsp. mays
  peptide (1)..(382): Ceres Seq. ID no. 12341392
MEEYRNWKKNAAVLYDLVISHPLEWPSLTVQWLPSESSARSHRLVVGTHTSDEAPNNLMVLDAVLPLPPRLAAAVAASGGAVPFPSVSVSRVAPHRGEVNRARCMPQRPYTVATKTCVDEVHVYHLGDDDGSGKSGAEVVLKGHEAEGYGLSWSPMKEGWLLSGSYDKKICLWDISSGSGAPVLDAQQVFVAHEDLVEDVAWHLKDEHIFGSVGDDCKLMMWDLRTNKPEQSILAHRKEVNSLSFNPFNEWILATASGDTTINLFDMRKLSRSLHTFDSHEAEVFQVEWNPNLATVLASSAADKRVMIWDINRIGDEQSEEDADDGPPELLFVHGGHTDKISELSWNPSEKWAIASVSEDNILQIWEMAESIYCDDLSMQVN

SEQ ID NO: 13504 - protein, 324 aa, Zea mays subsp. mays
  peptide (1)..(324): Ceres Seq. ID no. 12341393
MVLDAVLPLPPRLAAAVAASGGAVPFPSVSVSRVAPHRGEVNRARCMPQRPYTVATKTCVDEVHVYHLGDDDGSGKSGAEVVLKGHEAEGYGLSWSPMKEGWLLSGSYDKKICLWDISSGSGAPVLDAQQVFVAHEDLVEDVAWHLKDEHIFGSVGDDCKLMMWDLRTNKPEQSILAHRKEVNSLSFNPFNEWILATASGDTTINLFDMRKLSRSLHTFDSHEAEVFQVEWNPNLATVLASSAADKRVMIWDINRIGDEQSEEDADDGPPELLFVHGGHTDKISELSWNPSEKWAIASVSEDNILQIWEMAESIYCDDLSMQVN

SEQ ID NO: 13505 - DNA, 1671 bp, Zea mays subsp. mays; identical to SEQ ID NO: 3040
  misc_feature (1)..(1671): Ceres Seq. ID no. 12594232
  misc_feature (1)..(1671): Ortholog of  Ceres SEQ ID NO 13600071 as cited in SEQ ID NO 0

SEQ ID NO: 13506 - protein, 491 aa, Zea mays subsp. mays; identical to SEQ ID NO: 3041
  peptide (1)..(491): Ceres Seq. ID no. 12594233

SEQ ID NO: 13507 - protein, 460 aa, Zea mays subsp. mays; identical to SEQ ID NO: 3042
  peptide (1)..(460): Ceres Seq. ID no. 12594234

SEQ ID NO: 13508 - protein, 280 aa, Zea mays subsp. mays; identical to SEQ ID NO: 2639
  peptide (1)..(280): Ceres Seq. ID no. 12594235

SEQ ID NO: 13509 - DNA, 1891 bp, Zea mays subsp. mays
  misc_feature (1)..(1891): Ceres Seq. ID no. 12361798
  misc_feature (1)..(1891): Ortholog of  Ceres SEQ ID NO 15168908 as cited in SEQ ID NO 20765
aggacgacgaccggtcccattccccccgccccaacttgtcaggactcaagaggctcccctcctccctcgccgcggaacacgcgcgccgtcgtcgccagcccgggttcatttctccgttccttggtgcggtggtagccgagcgctccggccatggcgttctatcggggcctcaccgcagtctcgagactgcgatcacgcatggcgcaggaggccaccacgctggggggtgtgaggtggctgcagatgcagagcgcgtccgatctcgatcttaagtcccagttgcaggaattgattccggaacaacaggatcgcttaaagaagctcaagtcagagcatggaaagacccagcttggaaacataactgtggatatggtccttggtggaatgagagggatgactggaatgctttgggaaacatccctacttgatccagaggagggtattcgttttaggggcctctcaattccagaatgccaaaaagtgctgccaacagcagttaagggcggcgaacctttgcctgagggtctcctttggcttcttttgacggggaaggtcccaaccaaagagcaagttgatgcactatcaaaggaattgcttgcgcgctcaactgttccagctcatgtctataagacaatagatgctctcccagtagatgcacatcctatgacacagtttaccacgggagtaatggctcttcaggttgagagtgaatttcaaaaggcttatgacaatggattgccaaagtcaaagttttgggagcctacttatgaagactgcttaaatttgattgctcggcttccaccagtgtcttcttatgtttaccggagaattttcaagagtgggaaatcaatagaagccgataattctttggactatgcggcaaatttctcacacatgcttggttttgacgaccaaaaaatgctggagctgatgcggctctatgtaacaattcacactgatcatgaaggcgggaatgtcagtgctcatactggtcatctggttgggagtgctctgtcagatccttatctttctttcgcagcggctctaaatgggctagctgggccactgcatggccttgcaaatcaggaagtgcttttatggatcaaatctgtaattgaggaaactgggagtggtgttaccacagatcaactcaaagactatgtctggaagacactaaagagtggaaaggttgttcctgggtttggtcatggagttctgcgtaagaccgacccacggtattcatgtcaaagggagtttgccctgaagcatttgcctgaggatccacttttccaattggtgtccaagttgtatgaagttgtacctcctatcctcactgagctgggcaaggtcaagaacccatggccaaatgttgatgctcacagtggagttttgctgaaccactttggactatctgaagcacggtattacactgtcttgttcggtgtttcaagaagcatggggataggatctcagctcatctgggaccgtgcccttggcctgccacttgagaggccgaagagtgttaccatggagtggctggagaactactgcaagaacaaggctgcttgaagcttttcacaaatgctgctttttcccaaccttggctgttaataatttaaacgcgagttatagaaatagtcattttcctttggccgttgaataacgcaagagcaatatgctcaggcggaagaattttgtatcttccgtaacttggtgaacatccagatacttgatctgcggcaacaatgggcagaagagattaggacatgctgattgatctttatacgccaacacttgtttttctttaacattacttgttcgctgcagctttaatccagctgtttgtaactgcaatttatagcaatttatagagatttgggctatggcatgc

SEQ ID NO: 13510 - protein, 472 aa, Zea mays subsp. mays
  peptide (1)..(472): Ceres Seq. ID no. 12361799
MAFYRGLTAVSRLRSRMAQEATTLGGVRWLQMQSASDLDLKSQLQELIPEQQDRLKKLKSEHGKTQLGNITVDMVLGGMRGMTGMLWETSLLDPEEGIRFRGLSIPECQKVLPTAVKGGEPLPEGLLWLLLTGKVPTKEQVDALSKELLARSTVPAHVYKTIDALPVDAHPMTQFTTGVMALQVESEFQKAYDNGLPKSKFWEPTYEDCLNLIARLPPVSSYVYRRIFKSGKSIEADNSLDYAANFSHMLGFDDQKMLELMRLYVTIHTDHEGGNVSAHTGHLVGSALSDPYLSFAAALNGLAGPLHGLANQEVLLWIKSVIEETGSGVTTDQLKDYVWKTLKSGKVVPGFGHGVLRKTDPRYSCQREFALKHLPEDPLFQLVSKLYEVVPPILTELGKVKNPWPNVDAHSGVLLNHFGLSEARYYTVLFGVSRSMGIGSQLIWDRALGLPLERPKSVTMEWLENYCKNKAA

SEQ ID NO: 13511 - protein, 456 aa, Zea mays subsp. mays
  peptide (1)..(456): Ceres Seq. ID no. 12361800
MAQEATTLGGVRWLQMQSASDLDLKSQLQELIPEQQDRLKKLKSEHGKTQLGNITVDMVLGGMRGMTGMLWETSLLDPEEGIRFRGLSIPECQKVLPTAVKGGEPLPEGLLWLLLTGKVPTKEQVDALSKELLARSTVPAHVYKTIDALPVDAHPMTQFTTGVMALQVESEFQKAYDNGLPKSKFWEPTYEDCLNLIARLPPVSSYVYRRIFKSGKSIEADNSLDYAANFSHMLGFDDQKMLELMRLYVTIHTDHEGGNVSAHTGHLVGSALSDPYLSFAAALNGLAGPLHGLANQEVLLWIKSVIEETGSGVTTDQLKDYVWKTLKSGKVVPGFGHGVLRKTDPRYSCQREFALKHLPEDPLFQLVSKLYEVVPPILTELGKVKNPWPNVDAHSGVLLNHFGLSEARYYTVLFGVSRSMGIGSQLIWDRALGLPLERPKSVTMEWLENYCKNKAA

SEQ ID NO: 13512 - protein, 441 aa, Zea mays subsp. mays
  peptide (1)..(441): Ceres Seq. ID no. 12361801
MQSASDLDLKSQLQELIPEQQDRLKKLKSEHGKTQLGNITVDMVLGGMRGMTGMLWETSLLDPEEGIRFRGLSIPECQKVLPTAVKGGEPLPEGLLWLLLTGKVPTKEQVDALSKELLARSTVPAHVYKTIDALPVDAHPMTQFTTGVMALQVESEFQKAYDNGLPKSKFWEPTYEDCLNLIARLPPVSSYVYRRIFKSGKSIEADNSLDYAANFSHMLGFDDQKMLELMRLYVTIHTDHEGGNVSAHTGHLVGSALSDPYLSFAAALNGLAGPLHGLANQEVLLWIKSVIEETGSGVTTDQLKDYVWKTLKSGKVVPGFGHGVLRKTDPRYSCQREFALKHLPEDPLFQLVSKLYEVVPPILTELGKVKNPWPNVDAHSGVLLNHFGLSEARYYTVLFGVSRSMGIGSQLIWDRALGLPLERPKSVTMEWLENYCKNKAA

SEQ ID NO: 13513 - DNA, 1082 bp, Zea mays subsp. mays
  misc_feature (1)..(1082): Ceres Seq. ID no. 12342470
  misc_feature (1)..(1082): Ortholog of  Ceres SEQ ID NO 15170458 as cited in SEQ ID NO 52842
  misc_feature (1)..(1082): Ortholog of  Ceres SEQ ID NO 14304224 as cited in SEQ ID NO 56350
  misc_feature (1)..(1082): Ortholog of  Ceres SEQ ID NO 13597679 as cited in SEQ ID NO 65073
aagcattatcggcgcatgtccacgttgattcatcaatcagttccacaatccacttgcctcggccgctatcgtgaccgggaacaacaactgcgagatggccacggtggagacctcgggcacggcgatagggtcctccgggagatgggcactacacggcaagacagccctcgtcaccggcggcacccgcggcatcgggcgtgcggtagtggaggagctggcggcgctgggggcggccgtgcacacatgctcccggaaggcggaggagctcggcgagcgcatcaaggagtgggaggccaggggattcagcgttaccgggtccgtctgcgacctctccgagagggaccagcgggagcggttgctccgcgaggttgccgaccgcttcggcggcaagctcaacatcctcgtaaacaatgtaggaacaaacataaggaaaccaactactgagtttactgcagaggaatactcgtttctgatggctactaatcttgaatctgcatatcacttgtgccaaattgcacatcctcttttgaaattatctgggtcaggcagcattatattcatatcatctgttgctggagcgataggaatctttagtggaactatatatgctatgactaaaggtgccattaaccagctaaccaagaatttagcttgtgaatgggctaaggacaacataagagccaactctgtcgctccgtggtacatcaccacttcacttacggaaggaattttggcaaataagaactttgaggaacaagttgtgagtcgaactccgcttggacgtgtcggagaacctggagaagtatcggcacttgttgcttttctttgcatgccgggttccacttatattagcggccagacgattgcggtcgacggaggtatgactgtgaacgggttttaccctcccaagccctaggcggcagctgccatgtttctttgtgctgaggaaacgacaatagctgttgttcttggttgttgagaaaaaaaatctaataaaatgtatgtaaaggtaaggttgtcatgttgatactgttcattacattacataattctatcagggcaatgtgaagaacgttgtgttt

SEQ ID NO: 13514 - protein, 273 aa, Zea mays subsp. mays
  peptide (1)..(273): Ceres Seq. ID no. 12342471
MATVETSGTAIGSSGRWALHGKTALVTGGTRGIGRAVVEELAALGAAVHTCSRKAEELGERIKEWEARGFSVTGSVCDLSERDQRERLLREVADRFGGKLNILVNNVGTNIRKPTTEFTAEEYSFLMATNLESAYHLCQIAHPLLKLSGSGSIIFISSVAGAIGIFSGTIYAMTKGAINQLTKNLACEWAKDNIRANSVAPWYITTSLTEGILANKNFEEQVVSRTPLGRVGEPGEVSALVAFLCMPGSTYISGQTIAVDGGMTVNGFYPPKP

SEQ ID NO: 13515 - protein, 147 aa, Zea mays subsp. mays
  peptide (1)..(147): Ceres Seq. ID no. 12342472
MATNLESAYHLCQIAHPLLKLSGSGSIIFISSVAGAIGIFSGTIYAMTKGAINQLTKNLACEWAKDNIRANSVAPWYITTSLTEGILANKNFEEQVVSRTPLGRVGEPGEVSALVAFLCMPGSTYISGQTIAVDGGMTVNGFYPPKP

SEQ ID NO: 13516 - protein, 147 aa, Zea mays subsp. mays
  peptide (1)..(147): Ceres Seq. ID no. 12342473
KHYRRMSTLIHQSVPQSTCLGRYRDREQQLRDGHGGDLGHGDRVLREMGTTRQDSPRHRRHPRHRACGSGGAGGAGGGRAHMLPEGGGARRAHQGVGGQGIQRYRVRLRPLREGPAGAVAPRGCRPLRRQAQHPRKQCRNKHKETNY

SEQ ID NO: 13517 - DNA, 1405 bp, Zea mays subsp. mays
  misc_feature (1)..(1405): Ceres Seq. ID no. 12374348
  misc_feature (1)..(1405): Ortholog of  Ceres SEQ ID NO 13577044 as cited in SEQ ID NO 58682
  misc_feature (1)..(1405): Ortholog of  Ceres SEQ ID NO 12620877 as cited in SEQ ID NO 66686
gattattctgtttgctctcgttcaagtcatcgtctggtcgcgtcggcagcagacacccagagccggagggagcgccatggccgcgtcggatctggagagcaaagccaaggaggccttcgtcgacgacgacttcgagctggccgccgaactctacacccaggccatcgacgccgggcccgccactgccgatctctacgccgaccgcgcccaggcgcacatcaagctcggcaactacactgaggctgtggcagatgctaacaaagcaattggtcttgatcctacaatgcataaagcctactaccggaaaggtgctgcatgcattaatcttgaagaataccaaactgcaaaggctgctcttgagttaggttcttcctatgcaccaggcgattcaaggtttacccgtctattgaaggaatgtgatgagcgcattgctgaggaatctagccaggcaccagcaaagaatgtcgatgctcctgtagctgctactgttgaggacaaggaggatgtcgcaaatatggataatacaccgccagtggtagaacccccaagcaaacctaaatataggcatgactactacaacagtgccacagaagtggtcctcacaatatatgctaagggtgttcctgctgatagtgtagtcattgattttggtgaacagatgttaagtgtatccattgaagtacctggtgaagaaccgtaccattttcagccccgtctgttttctaaggttatccctgagaaatgcaagtatcaagttttgtccaccaaggtcgaaatacgccttgcaaaagctgagcaggtgacatggacaaccctggattatagtggaagaccaaaggctattccccagaagataagcacaccagctgaaacagccccaagaccttcatacccatcttcaaagtcaaaaaaggactgggataaactggaagctgaagtaaaaaaggaggagaaggaagaaaaacttgaaggtgatgctgcattgaacaagttcttccgtgatatctacaaggatgctgatgaagatatgcggagggccatggacaagtcattcagggaatctaatggtaccgttctctcaaccaattggaaagatgttggatcaaagacggtggaagcgagccctcctgatggtatggagctcaagaagtgggaaatttgaagtttggactgcccctcttgtaaatccaggtcttggaagttatgacctagttctgtccacccatttggtgtcgtaagtttggttaagtgtgtgtgtgtttttggttcagctgtcgttcgaggaaaagctactgtaagttgtggactgtgtaaaagctgcaatagattgtgggttgtgaaaaaggtgtatgctgtttaatttaaacaagcataaaacttacacgtatctctattttttcttttt

SEQ ID NO: 13518 - protein, 386 aa, Zea mays subsp. mays
  peptide (1)..(386): Ceres Seq. ID no. 12374349
IILFALVQVIVWSRRQQTPRAGGSAMAASDLESKAKEAFVDDDFELAAELYTQAIDAGPATADLYADRAQAHIKLGNYTEAVADANKAIGLDPTMHKAYYRKGAACINLEEYQTAKAALELGSSYAPGDSRFTRLLKECDERIAEESSQAPAKNVDAPVAATVEDKEDVANMDNTPPVVEPPSKPKYRHDYYNSATEVVLTIYAKGVPADSVVIDFGEQMLSVSIEVPGEEPYHFQPRLFSKVIPEKCKYQVLSTKVEIRLAKAEQVTWTTLDYSGRPKAIPQKISTPAETAPRPSYPSSKSKKDWDKLEAEVKKEEKEEKLEGDAALNKFFRDIYKDADEDMRRAMDKSFRESNGTVLSTNWKDVGSKTVEASPPDGMELKKWEI

SEQ ID NO: 13519 - protein, 361 aa, Zea mays subsp. mays
  peptide (1)..(361): Ceres Seq. ID no. 12374350
MAASDLESKAKEAFVDDDFELAAELYTQAIDAGPATADLYADRAQAHIKLGNYTEAVADANKAIGLDPTMHKAYYRKGAACINLEEYQTAKAALELGSSYAPGDSRFTRLLKECDERIAEESSQAPAKNVDAPVAATVEDKEDVANMDNTPPVVEPPSKPKYRHDYYNSATEVVLTIYAKGVPADSVVIDFGEQMLSVSIEVPGEEPYHFQPRLFSKVIPEKCKYQVLSTKVEIRLAKAEQVTWTTLDYSGRPKAIPQKISTPAETAPRPSYPSSKSKKDWDKLEAEVKKEEKEEKLEGDAALNKFFRDIYKDADEDMRRAMDKSFRESNGTVLSTNWKDVGSKTVEASPPDGMELKKWEI

SEQ ID NO: 13520 - protein, 292 aa, Zea mays subsp. mays
  peptide (1)..(292): Ceres Seq. ID no. 12374351
MHKAYYRKGAACINLEEYQTAKAALELGSSYAPGDSRFTRLLKECDERIAEESSQAPAKNVDAPVAATVEDKEDVANMDNTPPVVEPPSKPKYRHDYYNSATEVVLTIYAKGVPADSVVIDFGEQMLSVSIEVPGEEPYHFQPRLFSKVIPEKCKYQVLSTKVEIRLAKAEQVTWTTLDYSGRPKAIPQKISTPAETAPRPSYPSSKSKKDWDKLEAEVKKEEKEEKLEGDAALNKFFRDIYKDADEDMRRAMDKSFRESNGTVLSTNWKDVGSKTVEASPPDGMELKKWEI

SEQ ID NO: 13521 - DNA, 1452 bp, Zea mays subsp. mays
  misc_feature (1)..(1452): Ceres Seq. ID no. 12364192
  misc_feature (1)..(1452): Ortholog of  Ceres SEQ ID NO 14308598 as cited in SEQ ID NO 60416
  misc_feature (1)..(1452): Ortholog of  Ceres SEQ ID NO 13502952 as cited in SEQ ID NO 62271
  misc_feature (1)..(1452): Ortholog of  Ceres SEQ ID NO 13502973 as cited in SEQ ID NO 68052
  misc_feature (1)..(1452): Ortholog of  Ceres SEQ ID NO 13596000 as cited in SEQ ID NO 68188
gcacgagaccattacctagaacatcctaatcaaagacgctcgtgccagcaggccattcttctcgccttactccctcacagaacccagtaaaatatcgccagtcccgccgtcgagatggccccacgccgcctgctcgtcctcgccgtcgtcgccctcgcggccaccgccgccgcggccaactccggcttcgcggactccaacccgatccgccccgtcaccgaccgcgcggcctccgcgctcgagtccacggtcttcgccgcgctcggccgcacccgcgacgcgctccgcttcgcacgcttcgccgtcaggtacggcaagagctacgagagcgcggcggaggtccacaagcggttcaggatcttctccgagagcctccagctggtccgctccaccaaccgcaaaggcctctcctaccgcctcggcatcaaccgcttcgcggacatgagctgggaggagttccgtgcgacccggctcggcgcagcccagaactgctccgccacgcttaccggcaaccaccggatgcgcgccgccgccgttgcgctgccggagacgaaagactggagggaggatgggattgtgagcccagtgaaaaaccagggccactgtggatcatgctggaccttcagcactactggtgcacttgaggctgcatatacccaggcaactggcaagcccatctctctctctgagcaacagcttgttgactgtggttttgcattcaacaatttcggatgcaacggaggccttccatcccaggcctttgaatacatcaaatacaatggtggccttgacactgaggaatcttacccttaccaaggtgtcaatggaatctgcaagtttaagaatgagaatgttggagtcaaggttttggactcggttaacatcaccctgggtgctgaggatgaactgaaggatgctgttggtctggttcgcccagttagtgttgccttcgaggtgatcactggtttcaggctgtacaagagcggagtttacactagcgaccattgtggaactacaccgatggatgtgaaccacgctgttctggctgttggctacggtgtcgaagatggtgtaccctactggctcatcaagaactcatggggcgctgactggggtgatgagggttacttcaagatggaaatgggcaagaacatgtgcggtgttgctacgtgtgcatcctaccctattgtcgcatgaggcccttacgaaatgttacatggtctgtttggcatcaataatgcatgtttaacctgagcttggcgatgggttatacagaacggaaactctgtttgtgaatagaaaatcatgaagggaaggagttgaccggattcctgcttgtacgtctccccgactgtgtaggtagattgtcagttggggttccgaagtactctactcatacgtgtgtatgacagtttatttatgaaacaaaatacgcattgatcgttatggtcc

SEQ ID NO: 13522 - protein, 360 aa, Zea mays subsp. mays
  peptide (1)..(360): Ceres Seq. ID no. 12364193
MAPRRLLVLAVVALAATAAAANSGFADSNPIRPVTDRAASALESTVFAALGRTRDALRFARFAVRYGKSYESAAEVHKRFRIFSESLQLVRSTNRKGLSYRLGINRFADMSWEEFRATRLGAAQNCSATLTGNHRMRAAAVALPETKDWREDGIVSPVKNQGHCGSCWTFSTTGALEAAYTQATGKPISLSEQQLVDCGFAFNNFGCNGGLPSQAFEYIKYNGGLDTEESYPYQGVNGICKFKNENVGVKVLDSVNITLGAEDELKDAVGLVRPVSVAFEVITGFRLYKSGVYTSDHCGTTPMDVNHAVLAVGYGVEDGVPYWLIKNSWGADWGDEGYFKMEMGKNMCGVATCASYPIVA

SEQ ID NO: 13523 - protein, 251 aa, Zea mays subsp. mays
  peptide (1)..(251): Ceres Seq. ID no. 12364194
MSWEEFRATRLGAAQNCSATLTGNHRMRAAAVALPETKDWREDGIVSPVKNQGHCGSCWTFSTTGALEAAYTQATGKPISLSEQQLVDCGFAFNNFGCNGGLPSQAFEYIKYNGGLDTEESYPYQGVNGICKFKNENVGVKVLDSVNITLGAEDELKDAVGLVRPVSVAFEVITGFRLYKSGVYTSDHCGTTPMDVNHAVLAVGYGVEDGVPYWLIKNSWGADWGDEGYFKMEMGKNMCGVATCASYPIVA

SEQ ID NO: 13524 - protein, 225 aa, Zea mays subsp. mays
  peptide (1)..(225): Ceres Seq. ID no. 12364195
MRAAAVALPETKDWREDGIVSPVKNQGHCGSCWTFSTTGALEAAYTQATGKPISLSEQQLVDCGFAFNNFGCNGGLPSQAFEYIKYNGGLDTEESYPYQGVNGICKFKNENVGVKVLDSVNITLGAEDELKDAVGLVRPVSVAFEVITGFRLYKSGVYTSDHCGTTPMDVNHAVLAVGYGVEDGVPYWLIKNSWGADWGDEGYFKMEMGKNMCGVATCASYPIVA

SEQ ID NO: 13525 - DNA, 1422 bp, Zea mays subsp. mays
  misc_feature (1)..(1422): Ceres Seq. ID no. 12353579
  misc_feature (1)..(1422): Ortholog of  Ceres SEQ ID NO 14308278 as cited in SEQ ID NO 55403
  misc_feature (1)..(1422): Ortholog of  Ceres SEQ ID NO 12618176 as cited in SEQ ID NO 64489
  misc_feature (1)..(1422): Ortholog of  Ceres SEQ ID NO 15179231 as cited in SEQ ID NO 0
gacagccacggccgcgacggcgtccgcgtgcaccggacaccacggccagacccagacggcaacgggaggccacacagccctctgaccaaacgcacggatccggccagccacccaccccgcccccctagcggccgccacccacccgtgcgcgcggcgcaccaaggcctggcccggcagtggcagccaggctctcacacgcctcgcctagtcgccttgccgccgcgcgttatataagccgccccggcaggcacggtcggtcgatccagcaatacccgacggcgcaagccagtgccgcgcccagatctccgcgacagatcagtcgttcgtccagctaactgcactgcacgcaatggccaccacggcgaccgaggcgaccaagacgactgcaccggcgcaggagcagcaggccaacggcaacggcaacggcgagcagaagacgcgccactccgaggtcggccacaagagcctgctcaagagcgacgacctctaccagtacatcctggacacgagcgtgtacccgcgggagccggagagcatgaaggagctgcgcgagatcaccgccaagcacccatggaacctgatgaccacctccgccgacgagggccagttcctcaacatgctcatcaagctcatcggcgccaagaagaccatggagatcggcgtctacaccggctactcgctcctcgccaccgcgctcgcactcccggaggacggcacgatcttggccatggacatcaaccgcgagaactacgagctaggccttccctgcatcaacaaggccggcgtgggccacaagatcgacttccgcgagggccccgcgctccccgtcctggacgacctcgtggcggacaaggagcagcacgggtcgttcgacttcgccttcgtggacgccgacaaggacaactacctcaactaccacgagcggctcctgaagctggtgaggcccggcggcctcatcggctacgacaacacgctgtggaacggctccgtcgtgctccccgacgacgcgcccatgcgcaagtacatccgcttctaccgcgacttcgtcctcgccctcaacagcgcgctcgccgccgacgaccgcgtcgagatctgccagctccccgtcggcgacggcgtcacgctctgccgccgcgtcaagtgaaaaaaagaaagaaaaaaaaaacacacataccctgcgttcctgctgcccccggctccgtctggcccccaccgccaccgacggcggcgccgcaccccccgttccaatcatatcgtagacgacgcgcagcattaaattatcaatcaccggctctggctctttcttggccctgtactgtactactatactaatgtcccttcttgtttttttttcttgggaattgtcgccgtttcagtatacgtaaaatctcgatgtcgataatacagtactactaccaattt

SEQ ID NO: 13526 - protein, 264 aa, Zea mays subsp. mays
  peptide (1)..(264): Ceres Seq. ID no. 12353580
MATTATEATKTTAPAQEQQANGNGNGEQKTRHSEVGHKSLLKSDDLYQYILDTSVYPREPESMKELREITAKHPWNLMTTSADEGQFLNMLIKLIGAKKTMEIGVYTGYSLLATALALPEDGTILAMDINRENYELGLPCINKAGVGHKIDFREGPALPVLDDLVADKEQHGSFDFAFVDADKDNYLNYHERLLKLVRPGGLIGYDNTLWNGSVVLPDDAPMRKYIRFYRDFVLALNSALAADDRVEICQLPVGDGVTLCRRVK

SEQ ID NO: 13527 - protein, 253 aa, Zea mays subsp. mays
  peptide (1)..(253): Ceres Seq. ID no. 12353581
MEPDDHLRRRGPVPQHAHQAHRRQEDHGDRRLHRLLAPRHRARTPGGRHDLGHGHQPRELRARPSLHQQGRRGPQDRLPRGPRAPRPGRPRGGQGAARVVRLRLRGRRQGQLPQLPRAAPEAGEARRPHRLRQHAVERLRRAPRRRAHAQVHPLLPRLRPRPQQRARRRRPRRDLPAPRRRRRHALPPRQVKKRKKKKTHIPCVPAAPGSVWPPPPPTAAPHPPFQSYRRRRAALNYQSPALALSWPCTVLLY

SEQ ID NO: 13528 - protein, 202 aa, Zea mays subsp. mays
  peptide (1)..(202): Ceres Seq. ID no. 12353582
MKELREITAKHPWNLMTTSADEGQFLNMLIKLIGAKKTMEIGVYTGYSLLATALALPEDGTILAMDINRENYELGLPCINKAGVGHKIDFREGPALPVLDDLVADKEQHGSFDFAFVDADKDNYLNYHERLLKLVRPGGLIGYDNTLWNGSVVLPDDAPMRKYIRFYRDFVLALNSALAADDRVEICQLPVGDGVTLCRRVK

SEQ ID NO: 13529 - DNA, 1539 bp, Zea mays subsp. mays
  misc_feature (1)..(1539): Ceres Seq. ID no. 12355783
  misc_feature (1)..(1539): Ortholog of  Ceres SEQ ID NO 13657220 as cited in SEQ ID NO 66169
agtgcctccttaaacctcactgacgattcttcgttcatgtctccctcgcccaggggccgcaagagggcctgcgtcacctattgcatcagctacatcctcagctgcatcaccaagcactcccccgagtacagggtcctcatgatcggccgcatcctcgggggcatcgccacctcgctgctcttctccgccttcgagtcctggctcgtcgccgagcacaacaagagaggctttgacccgcagtggctgtccataacattctccaaagccatcttccttgggaacggcttaattgccattgtatctgggctatttgcgaaccttcttgctgagaacttgggttttggtcctgtggctccatttgatgcggctgcgtgctttctggcgattggcatggctatcataatgtcctcatggagtgaaaactacggagatccatctgaaagcaaggacctgatggcccagttcaaggttgcggctaaggcaattgcgtcagatgaaaagattgcattactgggagccatacagtcattgtttgagggctccatgtacacatttgtcttcctatggactccagcattgagtccaaatgaagaagacattcctcatggttttatttttgctacattcatgctgtcatccatgctgggtagctccatcgcgtcacgtctattagcccgaaagctcaaggttgaaggctatatgcagatcgtgttctcgatatcggctgtcacccttgtcctccctgtcgccaccaacatcttagtgccaacgtcttctgtgaaaggaggcagcgtatcaattggaggttctcttcagcttcttggtttctgcacctttgaggcatgtgttggcatattctggccgtcaatcatgaagatgagatctcagtacattcctgaggaagcgagaagcacaatcatgaacttcttccgcataccactcaacttatttgtttgtgtggtgctttacaacgtgaatgcattccctatcactgtcatgtttgggatgtgttctatcttcctcttcatggcagcaatcttgcagagacggctgatggttgtctctgatcaagtacacaaatcatcaactacacaagaaatgatcggggaagatgagccactaaatccttaggtgtcgacagaaccatacatgcgaaatcagatattgaagacgacgtacatactgcatttcgtttcgtcacctgtgcaataagatggacgtcaaaaccatgtagtagagtctagtggttttcgtttctgtagtgtagatttgaccaggctgctaagtttgcacctgtcccgagaagattagatgagcaagtcaatcaatattggctattcgcattgttgtttcttttttttaaaaaaaaaaaagatgttcgctttaaagtttaaacgatacggtatatatccttgtaagtgttgcattgctgcatctgatgacaattctggtggtgctgttactgactgttgagggctctctctacttggtcgttgtaagaactgttgcttcttaatgaaaaatgggctcaacaaattc

SEQ ID NO: 13530 - protein, 376 aa, Zea mays subsp. mays
  peptide (1)..(376): Ceres Seq. ID no. 12355784
SASLNLTDDSSFMSPSPRGRKRACVTYCISYILSCITKHSPEYRVLMIGRILGGIATSLLFSAFESWLVAEHNKRGFDPQWLSITFSKAIFLGNGLIAIVSGLFANLLAENLGFGPVAPFDAAACFLAIGMAIIMSSWSENYGDPSESKDLMAQFKVAAKAIASDEKIALLGAIQSLFEGSMYTFVFLWTPALSPNEEDIPHGFIFATFMLSSMLGSSIASRLLARKLKVEGYMQIVFSISAVTLVLPVATNILVPTSSVKGGSVSIGGSLQLLGFCTFEACVGIFWPSIMKMRSQYIPEEARSTIMNFFRIPLNLFVCVVLYNVNAFPITVMFGMCSIFLFMAAILQRRLMVVSDQVHKSSTTQEMIGEDEPLNP

SEQ ID NO: 13531 - protein, 364 aa, Zea mays subsp. mays
  peptide (1)..(364): Ceres Seq. ID no. 12355785
MSPSPRGRKRACVTYCISYILSCITKHSPEYRVLMIGRILGGIATSLLFSAFESWLVAEHNKRGFDPQWLSITFSKAIFLGNGLIAIVSGLFANLLAENLGFGPVAPFDAAACFLAIGMAIIMSSWSENYGDPSESKDLMAQFKVAAKAIASDEKIALLGAIQSLFEGSMYTFVFLWTPALSPNEEDIPHGFIFATFMLSSMLGSSIASRLLARKLKVEGYMQIVFSISAVTLVLPVATNILVPTSSVKGGSVSIGGSLQLLGFCTFEACVGIFWPSIMKMRSQYIPEEARSTIMNFFRIPLNLFVCVVLYNVNAFPITVMFGMCSIFLFMAAILQRRLMVVSDQVHKSSTTQEMIGEDEPLNP

SEQ ID NO: 13532 - protein, 330 aa, Zea mays subsp. mays
  peptide (1)..(330): Ceres Seq. ID no. 12355786
MIGRILGGIATSLLFSAFESWLVAEHNKRGFDPQWLSITFSKAIFLGNGLIAIVSGLFANLLAENLGFGPVAPFDAAACFLAIGMAIIMSSWSENYGDPSESKDLMAQFKVAAKAIASDEKIALLGAIQSLFEGSMYTFVFLWTPALSPNEEDIPHGFIFATFMLSSMLGSSIASRLLARKLKVEGYMQIVFSISAVTLVLPVATNILVPTSSVKGGSVSIGGSLQLLGFCTFEACVGIFWPSIMKMRSQYIPEEARSTIMNFFRIPLNLFVCVVLYNVNAFPITVMFGMCSIFLFMAAILQRRLMVVSDQVHKSSTTQEMIGEDEPLNP

SEQ ID NO: 13533 - DNA, 1411 bp, Zea mays subsp. mays
  misc_feature (1)..(1411): Ceres Seq. ID no. 12353544
  misc_feature (1)..(1411): Ortholog of  Ceres SEQ ID NO 14301403 as cited in SEQ ID NO 53105
aggaactatcgaaagaagaaaaagttgctgcttatgggagtacattgataagagattcatttgatgaacctgattatgcccttatagatacacttttctcactgggtgaagcttatctatttgctcagcttgttgatttcatagacaagaatcctggaaaagtacctgcaggcacagactatccacttatgtacagagatgtgaggtctgcggttgacttgtgtcatcgtgatggaactctaaagcggatggttgcgaaggatcctgccaggtacatcaatgaggacttggcaattgtaccaatgcttgaaatgatcaggaaatctggacgctcaacattcttagtgacaaatagtttgtgggactacaccgatgttgtcatgaactacctttgtgggccatacacttcaggtgtaggctctggtctcaatcacaagtggcttcaatattttgatattgtaataacaggcagttcgaagccaagtttcttccatgatgataaccgtgcaggattgtttgaagttgagcctgattctggaaaacttctgaatgctgatattcagatcggaagcccaagatcaagtcatcaacactcaacaccagttcagaaagtttatcaggggggcaatgttggtcatctccacagattactttctgttgcttctagttcacagattctctatgttggtgatcacatatacggagatattctgcggagcaagaaagttctaggctggcggactatgctggtgattccagaactagaacaagagctgaagcttctctcagaatcaaagtctactcgaaaggagcttagacatcttagaatggagcgtgattcgattgaagacaaaatccatcatcttgaatggtctcttaagcttgatgatatctcagaaaaccagaaggagaaattgttctctgaacatgacaatctgctgaaacagagagggcatgttcgtggtcttcatcaagaagctcagaggcaacatcatcagaagtttcataaggtgtggggacagctcatgaagactgggtaccaaaattccagatttgctcatcaggttgagagatttgcttgcttgtacagcagccaggttacaaacttcggtttgtattctcctgacaaatactatcgtccgagcgaagattacatgccccacgagtttgatgtgcttgggctgtaggagcagcccctactgctggtcggagttcctcgttgtaattgatccatagcctaggaggggacatcgtagttgccgtattatataacaggaagcttcacccattgtgaaggagagaaggtttataactatagtagctacatttctacttatcagtaagtttacctgtatataaatatgtacataactgatatatgatgcgtgttatttgtgagcacgcgataagt

SEQ ID NO: 13534 - protein, 394 aa, Zea mays subsp. mays
  peptide (1)..(394): Ceres Seq. ID no. 12353545
ELSKEEKVAAYGSTLIRDSFDEPDYALIDTLFSLGEAYLFAQLVDFIDKNPGKVPAGTDYPLMYRDVRSAVDLCHRDGTLKRMVAKDPARYINEDLAIVPMLEMIRKSGRSTFLVTNSLWDYTDVVMNYLCGPYTSGVGSGLNHKWLQYFDIVITGSSKPSFFHDDNRAGLFEVEPDSGKLLNADIQIGSPRSSHQHSTPVQKVYQGGNVGHLHRLLSVASSSQILYVGDHIYGDILRSKKVLGWRTMLVIPELEQELKLLSESKSTRKELRHLRMERDSIEDKIHHLEWSLKLDDISENQKEKLFSEHDNLLKQRGHVRGLHQEAQRQHHQKFHKVWGQLMKTGYQNSRFAHQVERFACLYSSQVTNFGLYSPDKYYRPSEDYMPHEFDVLGL

SEQ ID NO: 13535 - protein, 332 aa, Zea mays subsp. mays
  peptide (1)..(332): Ceres Seq. ID no. 12353546
MYRDVRSAVDLCHRDGTLKRMVAKDPARYINEDLAIVPMLEMIRKSGRSTFLVTNSLWDYTDVVMNYLCGPYTSGVGSGLNHKWLQYFDIVITGSSKPSFFHDDNRAGLFEVEPDSGKLLNADIQIGSPRSSHQHSTPVQKVYQGGNVGHLHRLLSVASSSQILYVGDHIYGDILRSKKVLGWRTMLVIPELEQELKLLSESKSTRKELRHLRMERDSIEDKIHHLEWSLKLDDISENQKEKLFSEHDNLLKQRGHVRGLHQEAQRQHHQKFHKVWGQLMKTGYQNSRFAHQVERFACLYSSQVTNFGLYSPDKYYRPSEDYMPHEFDVLGL

SEQ ID NO: 13536 - protein, 312 aa, Zea mays subsp. mays
  peptide (1)..(312): Ceres Seq. ID no. 12353547
MVAKDPARYINEDLAIVPMLEMIRKSGRSTFLVTNSLWDYTDVVMNYLCGPYTSGVGSGLNHKWLQYFDIVITGSSKPSFFHDDNRAGLFEVEPDSGKLLNADIQIGSPRSSHQHSTPVQKVYQGGNVGHLHRLLSVASSSQILYVGDHIYGDILRSKKVLGWRTMLVIPELEQELKLLSESKSTRKELRHLRMERDSIEDKIHHLEWSLKLDDISENQKEKLFSEHDNLLKQRGHVRGLHQEAQRQHHQKFHKVWGQLMKTGYQNSRFAHQVERFACLYSSQVTNFGLYSPDKYYRPSEDYMPHEFDVLGL

SEQ ID NO: 13537 - DNA, 2052 bp, Zea mays subsp. mays
  misc_feature (1)..(2052): Ceres Seq. ID no. 12341362
  misc_feature (1)..(2052): Ortholog of  Ceres SEQ ID NO 15175785 as cited in SEQ ID NO 56970
  misc_feature (1)..(2052): Ortholog of  Ceres SEQ ID NO 15178157 as cited in SEQ ID NO 57481
  misc_feature (1)..(2052): Ortholog of  Ceres SEQ ID NO 13597407 as cited in SEQ ID NO 64106
  misc_feature (1)..(2052): Ortholog of  Ceres SEQ ID NO 14303309 as cited in SEQ ID NO 67739
  misc_feature (1)..(2052): Ortholog of  Ceres SEQ ID NO 15180690 as cited in SEQ ID NO 0
tctcacctccctcgcactccattggatttgggggagctcggggggcgcgggccactgatgatccccggaacgagcaccgatccgtggcgaggaaactccaccgggtagccggcccgggagcgcggggcacggcgatggcgggcgccggggcagcggccaatggcggcaggaacaagtacgcggttctcgatcggagcgaggagcgacagacggacgctaggacggagcggcggaggaggccgttggcgcccgagagcgagagggggagaagggagcggttcgtgtacgcctgcgcggtcttcgcctccctcaacgccgtcctgctcggctacgatgttggcgtaatgagtggcgcgatcatctacatgcagaaagacctccacataaccgagtttcagcaagaaatcctagtaggctgtctgagcgtggtctcactcttgggaagcctatcaggggggcgaacatctgacgcaattggcagaaaatggacaatgggcctcggtgcaattgtgttccagataggcgcgaccatcatgacgtttgctccatcattcactgtgcttatgatagggaggctccttgctggggttggcattggctttggtgccatggtatctggagtgtacattgctgagatctcccccgcaggtgcccgagggacgctcacatcccttcctgagatctgcatcaattttgggatccttcttggctacgtttccaattatgccttctcaggcctttctgagcacatcaattggaggattatgcttggtgtcggtatcctcccatcagtcttcattggctttgcgcttttcgtgatcccggagtcccctaggtggttgatgatggagaagagagtttcagaagcaagggcagtgctgctgcagattagcgagtctgaagctgaagctgaagaacggctggctgagatcgaggaagccgcaggtctgatgaaatcaatgaaatctgaggacaaagaagtgtggagggaacttttgaacccgtctcccgccgtccgtcggatgctgtacgctggttgcggtattcagttgttccaacagatcacaggaattgatgctactgtctattacagcccaacaattttcaaagatgctggcatcaagtctgatcaggagcttctcgctgcaactgttgctgtgggtttcactaagacagtgttcatcttggttgcaattttcctaattgatagagttggacggaagccacttctttatgtgagcaccattggcatgaccatctgcttatttctcttgggggttgcacttacactgcaaaaccatgcggtggggcttatgtctccacgtgttggtatcgacctagcaattttcgcagtttgtggcaacgtggcattcttttcaattggcatgggaccaatatgttgggtcttgtcctcagaggtatttcctttaagattacgagctcaagggtcagcgcttggtcaagtaggtggtagagtgagcagtggtttggtttccatgtcattcctttctatggcccgtgctatatcagtggcaggaatgttcttcgtctttgctgcaatatccactatctctgtactgtttgtgtacttttgtgtgccagaaacaaaagggaaaacactggagcagatcgaaatgatgtttgaaagtggggacgaatggggaggaggtgaaattgagcttgaggatacacagcatttaataccgagtatcaagaagtctgtgcctcttggttgatatttgtagcatcaataaaattcttattagctccatgtttcaatgacgagccaaccaaaccagctggattctgaactttggtttcgagtgatctggccacactgagccacgaccgatctgataaaagataagcttgatagacataggtgcaacgtagaagattaattgtgatgttagttcaaaatgtcaatgattttactgggaggcggtctgtaatgtatgatcttacatctcttgtaccttcttacatctctcgtacctcccagcggaagaatatactcgcagaaaagttttctactgtgcatttttttataac

SEQ ID NO: 13538 - protein, 577 aa, Zea mays subsp. mays
  peptide (1)..(577): Ceres Seq. ID no. 12341363
SPPSHSIGFGGARGARATDDPRNEHRSVARKLHRVAGPGARGTAMAGAGAAANGGRNKYAVLDRSEERQTDARTERRRRPLAPESERGRRERFVYACAVFASLNAVLLGYDVGVMSGAIIYMQKDLHITEFQQEILVGCLSVVSLLGSLSGGRTSDAIGRKWTMGLGAIVFQIGATIMTFAPSFTVLMIGRLLAGVGIGFGAMVSGVYIAEISPAGARGTLTSLPEICINFGILLGYVSNYAFSGLSEHINWRIMLGVGILPSVFIGFALFVIPESPRWLMMEKRVSEARAVLLQISESEAEAEERLAEIEEAAGLMKSMKSEDKEVWRELLNPSPAVRRMLYAGCGIQLFQQITGIDATVYYSPTIFKDAGIKSDQELLAATVAVGFTKTVFILVAIFLIDRVGRKPLLYVSTIGMTICLFLLGVALTLQNHAVGLMSPRVGIDLAIFAVCGNVAFFSIGMGPICWVLSSEVFPLRLRAQGSALGQVGGRVSSGLVSMSFLSMARAISVAGMFFVFAAISTISVLFVYFCVPETKGKTLEQIEMMFESGDEWGGGEIELEDTQHLIPSIKKSVPLG

SEQ ID NO: 13539 - protein, 533 aa, Zea mays subsp. mays
  peptide (1)..(533): Ceres Seq. ID no. 12341364
MAGAGAAANGGRNKYAVLDRSEERQTDARTERRRRPLAPESERGRRERFVYACAVFASLNAVLLGYDVGVMSGAIIYMQKDLHITEFQQEILVGCLSVVSLLGSLSGGRTSDAIGRKWTMGLGAIVFQIGATIMTFAPSFTVLMIGRLLAGVGIGFGAMVSGVYIAEISPAGARGTLTSLPEICINFGILLGYVSNYAFSGLSEHINWRIMLGVGILPSVFIGFALFVIPESPRWLMMEKRVSEARAVLLQISESEAEAEERLAEIEEAAGLMKSMKSEDKEVWRELLNPSPAVRRMLYAGCGIQLFQQITGIDATVYYSPTIFKDAGIKSDQELLAATVAVGFTKTVFILVAIFLIDRVGRKPLLYVSTIGMTICLFLLGVALTLQNHAVGLMSPRVGIDLAIFAVCGNVAFFSIGMGPICWVLSSEVFPLRLRAQGSALGQVGGRVSSGLVSMSFLSMARAISVAGMFFVFAAISTISVLFVYFCVPETKGKTLEQIEMMFESGDEWGGGEIELEDTQHLIPSIKKSVPLG

SEQ ID NO: 13540 - protein, 463 aa, Zea mays subsp. mays
  peptide (1)..(463): Ceres Seq. ID no. 12341365
MSGAIIYMQKDLHITEFQQEILVGCLSVVSLLGSLSGGRTSDAIGRKWTMGLGAIVFQIGATIMTFAPSFTVLMIGRLLAGVGIGFGAMVSGVYIAEISPAGARGTLTSLPEICINFGILLGYVSNYAFSGLSEHINWRIMLGVGILPSVFIGFALFVIPESPRWLMMEKRVSEARAVLLQISESEAEAEERLAEIEEAAGLMKSMKSEDKEVWRELLNPSPAVRRMLYAGCGIQLFQQITGIDATVYYSPTIFKDAGIKSDQELLAATVAVGFTKTVFILVAIFLIDRVGRKPLLYVSTIGMTICLFLLGVALTLQNHAVGLMSPRVGIDLAIFAVCGNVAFFSIGMGPICWVLSSEVFPLRLRAQGSALGQVGGRVSSGLVSMSFLSMARAISVAGMFFVFAAISTISVLFVYFCVPETKGKTLEQIEMMFESGDEWGGGEIELEDTQHLIPSIKKSVPLG

SEQ ID NO: 13541 - DNA, 1414 bp, Zea mays subsp. mays
  misc_feature (1)..(1414): Ceres Seq. ID no. 12374326
  misc_feature (1)..(1414): Ortholog of  Ceres SEQ ID NO 13596807 as cited in SEQ ID NO 62275
aagcgacatgttcacgcctgttggttcggttcggtttcggcatggaggtagctgagagaccgatggcctcgtcccacctggcagctctcgtctccctgctgatcccctgcctccttgcgcttctgctgctccgcctcgccgccgtgctggacccggaccccgacgccgccgtgccccgcatcaaggcggccgcgcccctccctctccggttccgccacgatggcgccttcaagatcctccaggtggcggacatgcacttcggcaacggcgccaccacgcgctgccgggacgtgggccccgaaggcggcggcgcgcgctgctccgacctcaacaccacgcggttcctgcgccgtgtcatcgaggccgagaagcccgacctcatcgccttcaccggggacaacatatttgggggcagtgcaactgacgcagcagaatcactactcagagcaatcagccctgctatcgaatacagggtgccatgggctgccatcttaggtaatcatgaccaagagtcgacaatgacccgggaggagctgatgaccttcatgtctctaatggactactcggtatctcaagtaaacccacctggttttttggtacatgggtttgggaattatcatgttggcatccatgggccattcggatccgagctggtcaatactagcctgcttaacctttacttcctggatagcggtgatcgtgaaatggtgaatggagttaaaacatatggatggatcagagagtctcaactcgcctggcttcgttctacttccctggagcttcagaaaaaaatacatgccccagcattagcgttcttccacataccaatcccagaggtccgagggctctggtactcaggcttcaagggtcagtaccaggaaggggtggcttgctcatctgtacattctggtgtccttgggacccttgtctccatgggagatgtaaaatctgtctttttgggtcacgaccatcttaatgatttttgtggcaatctcaatgggatctggttctgttatggtggtggctttggttatcatgcctatggaagaccccattggccaaggagagctcggataatttacagtgaactcaaaaaggggcagaggtcgtggttggaagttgactcgatctcgacttggaagctgctagatgatgaaaagctcacaaaaattgatgaacaggttatctggagacatagcacaggtgattctgaccacagagtctacttgtgaagaccatgaacctaaaactacttcctgtatgtgtcatgtgtataatgtttgtcgcaaagattcctccaattttataggtcgattgattattggtagtatggtgtggcacggacctattttagatttcacatttggttcaatgttgatatgctaaccctggtttgggtcgctgacctgttttc

SEQ ID NO: 13542 - protein, 409 aa, Zea mays subsp. mays
  peptide (1)..(409): Ceres Seq. ID no. 12374327
ATCSRLLVRFGFGMEVAERPMASSHLAALVSLLIPCLLALLLLRLAAVLDPDPDAAVPRIKAAAPLPLRFRHDGAFKILQVADMHFGNGATTRCRDVGPEGGGARCSDLNTTRFLRRVIEAEKPDLIAFTGDNIFGGSATDAAESLLRAISPAIEYRVPWAAILGNHDQESTMTREELMTFMSLMDYSVSQVNPPGFLVHGFGNYHVGIHGPFGSELVNTSLLNLYFLDSGDREMVNGVKTYGWIRESQLAWLRSTSLELQKKIHAPALAFFHIPIPEVRGLWYSGFKGQYQEGVACSSVHSGVLGTLVSMGDVKSVFLGHDHLNDFCGNLNGIWFCYGGGFGYHAYGRPHWPRRARIIYSELKKGQRSWLEVDSISTWKLLDDEKLTKIDEQVIWRHSTGDSDHRVYL

SEQ ID NO: 13543 - protein, 396 aa, Zea mays subsp. mays
  peptide (1)..(396): Ceres Seq. ID no. 12374328
MEVAERPMASSHLAALVSLLIPCLLALLLLRLAAVLDPDPDAAVPRIKAAAPLPLRFRHDGAFKILQVADMHFGNGATTRCRDVGPEGGGARCSDLNTTRFLRRVIEAEKPDLIAFTGDNIFGGSATDAAESLLRAISPAIEYRVPWAAILGNHDQESTMTREELMTFMSLMDYSVSQVNPPGFLVHGFGNYHVGIHGPFGSELVNTSLLNLYFLDSGDREMVNGVKTYGWIRESQLAWLRSTSLELQKKIHAPALAFFHIPIPEVRGLWYSGFKGQYQEGVACSSVHSGVLGTLVSMGDVKSVFLGHDHLNDFCGNLNGIWFCYGGGFGYHAYGRPHWPRRARIIYSELKKGQRSWLEVDSISTWKLLDDEKLTKIDEQVIWRHSTGDSDHRVYL

SEQ ID NO: 13544 - protein, 389 aa, Zea mays subsp. mays
  peptide (1)..(389): Ceres Seq. ID no. 12374329
MASSHLAALVSLLIPCLLALLLLRLAAVLDPDPDAAVPRIKAAAPLPLRFRHDGAFKILQVADMHFGNGATTRCRDVGPEGGGARCSDLNTTRFLRRVIEAEKPDLIAFTGDNIFGGSATDAAESLLRAISPAIEYRVPWAAILGNHDQESTMTREELMTFMSLMDYSVSQVNPPGFLVHGFGNYHVGIHGPFGSELVNTSLLNLYFLDSGDREMVNGVKTYGWIRESQLAWLRSTSLELQKKIHAPALAFFHIPIPEVRGLWYSGFKGQYQEGVACSSVHSGVLGTLVSMGDVKSVFLGHDHLNDFCGNLNGIWFCYGGGFGYHAYGRPHWPRRARIIYSELKKGQRSWLEVDSISTWKLLDDEKLTKIDEQVIWRHSTGDSDHRVYL

SEQ ID NO: 13545 - DNA, 1458 bp, Zea mays subsp. mays; identical to SEQ ID NO: 11502
  misc_feature (1)..(1458): Ceres Seq. ID no. 12373464
  misc_feature (1)..(1458): Ortholog of  Ceres SEQ ID NO 12364737 as cited in SEQ ID NO 51089
  misc_feature (1)..(1458): Ortholog of  Ceres SEQ ID NO 14311515 as cited in SEQ ID NO 51680
  misc_feature (1)..(1458): Ortholog of  Ceres SEQ ID NO 14316263 as cited in SEQ ID NO 55294
  misc_feature (1)..(1458): Ortholog of  Ceres SEQ ID NO 13582301 as cited in SEQ ID NO 56509
  misc_feature (1)..(1458): Ortholog of  Ceres SEQ ID NO 13595567 as cited in SEQ ID NO 56760
  misc_feature (1)..(1458): Ortholog of  Ceres SEQ ID NO 14315035 as cited in SEQ ID NO 56880
  misc_feature (1)..(1458): Ortholog of  Ceres SEQ ID NO 13594276 as cited in SEQ ID NO 57728
  misc_feature (1)..(1458): Ortholog of  Ceres SEQ ID NO 13594147 as cited in SEQ ID NO 58975
  misc_feature (1)..(1458): Ortholog of  Ceres SEQ ID NO 15176751 as cited in SEQ ID NO 59719
  misc_feature (1)..(1458): Ortholog of  Ceres SEQ ID NO 13655302 as cited in SEQ ID NO 63307
  misc_feature (1)..(1458): Ortholog of  Ceres SEQ ID NO 13597380 as cited in SEQ ID NO 64054
  misc_feature (1)..(1458): Ortholog of  Ceres SEQ ID NO 12625474 as cited in SEQ ID NO 64169
  misc_feature (1)..(1458): Ortholog of  Ceres SEQ ID NO 13597502 as cited in SEQ ID NO 64681

SEQ ID NO: 13546 - protein, 369 aa, Zea mays subsp. mays; identical to SEQ ID NO: 11503
  peptide (1)..(369): Ceres Seq. ID no. 12373465

SEQ ID NO: 13547 - protein, 198 aa, Zea mays subsp. mays; identical to SEQ ID NO: 11504
  peptide (1)..(198): Ceres Seq. ID no. 12373466

SEQ ID NO: 13548 - protein, 187 aa, Zea mays subsp. mays; identical to SEQ ID NO: 11505
  peptide (1)..(187): Ceres Seq. ID no. 12373467

SEQ ID NO: 13549 - DNA, 1453 bp, Zea mays subsp. mays
  misc_feature (1)..(1453): Ceres Seq. ID no. 12365159
  misc_feature (1)..(1453): Ortholog of  Ceres SEQ ID NO 14308586 as cited in SEQ ID NO 55143
  misc_feature (1)..(1453): Ortholog of  Ceres SEQ ID NO 14314308 as cited in SEQ ID NO 57259
  misc_feature (1)..(1453): Ortholog of  Ceres SEQ ID NO 15226216 as cited in SEQ ID NO 62291
gcacgagaccattacctagaacatcctaatcgaaaaaatcttttttcctcttgacggcgcacataaatccgcgccaaatcgtcaaaccaaaaccaggccgcgcccgcctcgtcagtcctcagtcctcactttcgggccgagctccggatatccagcggcggcaatggcagccgaagccagcgccgtccagcagctcgctggcctcctggaccaagtggacgcgccgctgaagaagacatttgagaatgtgcatcagggctacccaacagagacattattgcgtttccttaaagctagagagtggcatgtgaataaggctcacaggatgcttgaagattctttgaattggaggatgcaaaatgaaatcgatagtatattggagaaacctattatcccagtagatttgtatagatcaattcgtgatacacagcttattgggttatcaggatactccaaagagggcattcctgtatttgcagttggtgttgggctgagtacatatgacaaagcttcggttaactactatgtgcaatctcacattcagatcaatgagtaccgagatcgttttattttgcctacagtgacaaagaagtatgggagacctattaccacctgtataaaggttctcgatatgactggtctgaaattgtcagcactacaccaaatgaagattgtgactgcaatatctacagttgatgatttgaattaccctgaaaagactgagacctattatatagtaaacgctccatacatattttctgcatgttggaaggtcgtgaagcctctgttgcaagagagaacaaggaagaaagttcatgtgttgcgtggctgcgggagagacgagcttctacagatcatggactactcctccctcccccatttctgcagacaggagggctcgggctcatccaaacattcgtcaggcgacgccgataactgcttctctctcgaccacccgttccaccaggagctctacagcttcatccaggagcaggcgctgaaccaggagctcatcaagcagggctccttgcacgtgaaaatccccgagcaggaccctgaggacgcaaagatcgtggaggtcatcgaggccgagttccacaagcttggcgtgcagaacgggtccgccaatggcatcgaccaagcatagcacctttgtctaataagaccagcctgattcaaccgagacgttgcttgccacttctgatgcaactaatcctactgtttattttttttggtggggtgggcccacccccgttgctgtttcctggggggaggggggtgattggtattggtggtatacatagcaaagtcatttgcagatccatccatgatgcaggactgagatagacgatatcacctgtgtaaacttgcagatttgcaatgtgtcctcatctcatatgtatgctgagttgagatgaaatgaataaatcatcctacaagttttttttgagcc

SEQ ID NO: 13550 - protein, 327 aa, Zea mays subsp. mays
  peptide (1)..(327): Ceres Seq. ID no. 12365160
MAAEASAVQQLAGLLDQVDAPLKKTFENVHQGYPTETLLRFLKAREWHVNKAHRMLEDSLNWRMQNEIDSILEKPIIPVDLYRSIRDTQLIGLSGYSKEGIPVFAVGVGLSTYDKASVNYYVQSHIQINEYRDRFILPTVTKKYGRPITTCIKVLDMTGLKLSALHQMKIVTAISTVDDLNYPEKTETYYIVNAPYIFSACWKVVKPLLQERTRKKVHVLRGCGRDELLQIMDYSSLPHFCRQEGSGSSKHSSGDADNCFSLDHPFHQELYSFIQEQALNQELIKQGSLHVKIPEQDPEDAKIVEVIEAEFHKLGVQNGSANGIDQA

SEQ ID NO: 13551 - protein, 273 aa, Zea mays subsp. mays
  peptide (1)..(273): Ceres Seq. ID no. 12365161
MLEDSLNWRMQNEIDSILEKPIIPVDLYRSIRDTQLIGLSGYSKEGIPVFAVGVGLSTYDKASVNYYVQSHIQINEYRDRFILPTVTKKYGRPITTCIKVLDMTGLKLSALHQMKIVTAISTVDDLNYPEKTETYYIVNAPYIFSACWKVVKPLLQERTRKKVHVLRGCGRDELLQIMDYSSLPHFCRQEGSGSSKHSSGDADNCFSLDHPFHQELYSFIQEQALNQELIKQGSLHVKIPEQDPEDAKIVEVIEAEFHKLGVQNGSANGIDQA

SEQ ID NO: 13552 - protein, 264 aa, Zea mays subsp. mays
  peptide (1)..(264): Ceres Seq. ID no. 12365162
MQNEIDSILEKPIIPVDLYRSIRDTQLIGLSGYSKEGIPVFAVGVGLSTYDKASVNYYVQSHIQINEYRDRFILPTVTKKYGRPITTCIKVLDMTGLKLSALHQMKIVTAISTVDDLNYPEKTETYYIVNAPYIFSACWKVVKPLLQERTRKKVHVLRGCGRDELLQIMDYSSLPHFCRQEGSGSSKHSSGDADNCFSLDHPFHQELYSFIQEQALNQELIKQGSLHVKIPEQDPEDAKIVEVIEAEFHKLGVQNGSANGIDQA

SEQ ID NO: 13553 - DNA, 849 bp, Zea mays subsp. mays
  misc_feature (1)..(849): Ceres Seq. ID no. 12379687
  misc_feature (1)..(849): Ortholog of  Ceres SEQ ID NO 12617704 as cited in SEQ ID NO 65314
ctctaaagttttgctctggccaaacacgtcaatagtagagattttggactagattcgtgcaaaacactagaaaagaaaaggccatcgaaaacgccgccgccgcctctgatgctttccgccgtgcgatgtggtgcccttcgccggtggcgcccgccgccgcacctcctcccacgcatcctttcctcctcctttggtacatctcccgcgcgaccacaggtgggggcgctgctggagctcccggaggtggagaaggtactgcgcgacgtacgagcgggtgacgtgcgcgtattccccgtcggcgagagcggtctgcacggcggggcctgcgccgactacatggtcgtcgccacaggccgctccgattggcacgtccgtaacatcgcgcaggcgctcctctacaagataaagcaaaagcagaagggctctgatagaatattgatgccaagtgtagaaggtcagcaagcgggaaaatgggttgtcattgattctggaagcataatcatccatgcacttgaagaaagggcaagagagtattatgatttagagagcatttggtcaaaagaggtgtcccctaacacttccattcaggagttggagacctcgctggtgaagacacgtcgccggaacctatcacagaaacccatgaagagcatctgaactaggggatctggtacgatgatccgtgaaccgagataaattacgggaggtcgagcttttatctctttccattttgtagcatcttttacttacctaaacttgtcttattatggtggtagttaatgtaagattcactgcaaacattactgagttcaccatggggtaaatccagtctcacatgagtcatctagt

SEQ ID NO: 13554 - protein, 182 aa, Zea mays subsp. mays
  peptide (1)..(182): Ceres Seq. ID no. 12379688
MLSAVRCGALRRWRPPPHLLPRILSSSFGTSPARPQVGALLELPEVEKVLRDVRAGDVRVFPVGESGLHGGACADYMVVATGRSDWHVRNIAQALLYKIKQKQKGSDRILMPSVEGQQAGKWVVIDSGSIIIHALEERAREYYDLESIWSKEVSPNTSIQELETSLVKTRRRNLSQKPMKSI

SEQ ID NO: 13555 - protein, 106 aa, Zea mays subsp. mays
  peptide (1)..(106): Ceres Seq. ID no. 12379689
MVVATGRSDWHVRNIAQALLYKIKQKQKGSDRILMPSVEGQQAGKWVVIDSGSIIIHALEERAREYYDLESIWSKEVSPNTSIQELETSLVKTRRRNLSQKPMKSI

SEQ ID NO: 13556 - DNA, 1623 bp, Zea mays subsp. mays
  misc_feature (1)..(1623): Ceres Seq. ID no. 12462280
  misc_feature (1)..(1623): Ortholog of  Ceres SEQ ID NO 14314896 as cited in SEQ ID NO 54010
  misc_feature (1)..(1623): Ortholog of  Ceres SEQ ID NO 14308813 as cited in SEQ ID NO 55485
  misc_feature (1)..(1623): Ortholog of  Ceres SEQ ID NO 13655744 as cited in SEQ ID NO 64032
tgccttctgcgccctccatttcggcctctgtcccttgcaagttcaatctcacctccaaccatgggtaaagagaagtcccacatcaacattgtggttattggccacgttgactctggcaagtcgaccaccacaggacacctgatctacaagcttggaggcattgacaagcgtgtgatcgagaggttcgagaaggaggctgctgaaatgaacaagcggtccttcaagtacgcatgggtgctcgacaagctcaaggctgagcgtgagagaggtatcaccattgatatcgctctgtggaagtttgagaccaccaagtactactgcacggtcattgatgcccctggacaccgtgacttcatcaagaacatgatcactggtacctcccaggctgactgtgctgtccttatcattgactccaccactggtggttttgaggctggtatctccaaggatggccagacccgtgaacatgctctccttgcgttcacccttggtgtgaagcagatgatttgctgctgcaacaagatggatgcaaccactcccaaatactccaaggcacgttatgatgagattgtgaaggaagtctcatcctacctcaagaaagttgggtacaaccctgataagattgccttcgttcccatttctggttttgagggcgacaacatgattgagaggtccaccaaccttgactggtacaaaggcccaaccctgcttgaggctcttgaccagatcaccgagcccaagaggccttcagacaagcccctgcgtctagccctccaggatgtgtacaagattggtggtattggaactgtaccggttggtcgtgtggagactggtgtcatcaagcctggtatggtagtcacctttggtccaactggcctgactactgaggtgaagtctgttgagatgcaccatgaggcgcttcaggaggctcttccgggcgacaatgttggcttcaacgtgaagaacgttgctgtcaaggatctcaagcgtgggttcgtggcctccaactccaaggatgaccctgccaaggaggctgccagcttcacctcccaggtcatcatcatgaaccaccctgggcagattggcaacggctatgccccagtgctggactgccacacctcccacatcgccgtcaagtttgctgagctcattaccaagatcgacaggcgatctggcaaggagctcgagaaggagcccaagttcctgaagaacggtgatgctggtatggtgaagatgattcccaccaagcctatggtggtggagacattctccgcgtatcctcccctgggtaggtttgccgtccgcgacatgaggcagacggttgctgttggagtcatcaagagtgtggagaagaaggacccaaccggcgccaaggtgaccaaggcggccgccaagaagaaatgatcgatccgtgtctgctttgcagtgcctggataacttgccactaaagttgtgtatgcggttgttgctgttattgcgtggactgtttgctgcggtgtctcctgtttgtttgggtagcgcagcgtctggcctcttcaggtgtctgttgtctgttgtctttactatcagtaatgctcctgagacttctatttgtccttttggcgccgctaaatggaattttcg

SEQ ID NO: 13557 - protein, 467 aa, Zea mays subsp. mays
  peptide (1)..(467): Ceres Seq. ID no. 12462281
CLLRPPFRPLSLASSISPPTMGKEKSHINIVVIGHVDSGKSTTTGHLIYKLGGIDKRVIERFEKEAAEMNKRSFKYAWVLDKLKAERERGITIDIALWKFETTKYYCTVIDAPGHRDFIKNMITGTSQADCAVLIIDSTTGGFEAGISKDGQTREHALLAFTLGVKQMICCCNKMDATTPKYSKARYDEIVKEVSSYLKKVGYNPDKIAFVPISGFEGDNMIERSTNLDWYKGPTLLEALDQITEPKRPSDKPLRLALQDVYKIGGIGTVPVGRVETGVIKPGMVVTFGPTGLTTEVKSVEMHHEALQEALPGDNVGFNVKNVAVKDLKRGFVASNSKDDPAKEAASFTSQVIIMNHPGQIGNGYAPVLDCHTSHIAVKFAELITKIDRRSGKELEKEPKFLKNGDAGMVKMIPTKPMVVETFSAYPPLGRFAVRDMRQTVAVGVIKSVEKKDPTGAKVTKAAAKKK

SEQ ID NO: 13558 - protein, 447 aa, Zea mays subsp. mays
  peptide (1)..(447): Ceres Seq. ID no. 12462282
MGKEKSHINIVVIGHVDSGKSTTTGHLIYKLGGIDKRVIERFEKEAAEMNKRSFKYAWVLDKLKAERERGITIDIALWKFETTKYYCTVIDAPGHRDFIKNMITGTSQADCAVLIIDSTTGGFEAGISKDGQTREHALLAFTLGVKQMICCCNKMDATTPKYSKARYDEIVKEVSSYLKKVGYNPDKIAFVPISGFEGDNMIERSTNLDWYKGPTLLEALDQITEPKRPSDKPLRLALQDVYKIGGIGTVPVGRVETGVIKPGMVVTFGPTGLTTEVKSVEMHHEALQEALPGDNVGFNVKNVAVKDLKRGFVASNSKDDPAKEAASFTSQVIIMNHPGQIGNGYAPVLDCHTSHIAVKFAELITKIDRRSGKELEKEPKFLKNGDAGMVKMIPTKPMVVETFSAYPPLGRFAVRDMRQTVAVGVIKSVEKKDPTGAKVTKAAAKKK

SEQ ID NO: 13559 - protein, 399 aa, Zea mays subsp. mays
  peptide (1)..(399): Ceres Seq. ID no. 12462283
MNKRSFKYAWVLDKLKAERERGITIDIALWKFETTKYYCTVIDAPGHRDFIKNMITGTSQADCAVLIIDSTTGGFEAGISKDGQTREHALLAFTLGVKQMICCCNKMDATTPKYSKARYDEIVKEVSSYLKKVGYNPDKIAFVPISGFEGDNMIERSTNLDWYKGPTLLEALDQITEPKRPSDKPLRLALQDVYKIGGIGTVPVGRVETGVIKPGMVVTFGPTGLTTEVKSVEMHHEALQEALPGDNVGFNVKNVAVKDLKRGFVASNSKDDPAKEAASFTSQVIIMNHPGQIGNGYAPVLDCHTSHIAVKFAELITKIDRRSGKELEKEPKFLKNGDAGMVKMIPTKPMVVETFSAYPPLGRFAVRDMRQTVAVGVIKSVEKKDPTGAKVTKAAAKKK

SEQ ID NO: 13560 - DNA, 2017 bp, Zea mays subsp. mays
  misc_feature (1)..(2017): Ceres Seq. ID no. 12434851
  misc_feature (1)..(2017): Ortholog of  Ceres SEQ ID NO 13639663 as cited in SEQ ID NO 57850
cgcaattaaccctcactaaagggaacaaaagctggagctccaccgcggtggcggccgctctagaactagtggatcccccgggctgcaggaattcgcacgagaccattacctagaacatcctaatcgaaaaatgcatcccgattactatctgccgagccgaccagcggcaccagaacccacaaggttcactcatggcgcccacgtccatgctcccgttcgcgccctccaatacgtcgctgccctattcctcccgcgccacaactgccgccgcgttcgctcctcgtgggctccaccacgccgcggccggaaggagcggcggcggccaacggctcgcgtgcgctgcgcctcggcgccgccgcggagggggtcttgtggtcagggcgtcgnccgactactacgcgacgctgggcgtgccgcgcgccgccagtaacagagacatcaaggccgcgtaccggaagctcgcgcgccagtatcatcctgatgtcaataaggagcctggagcgactgaaaagtttaaagagataagtgcagcatatgaggtgctgtcagatgaaaagaagagggcgttgtatgaccaatatggtgaagctggtgttaagagtgcagttggaggctccggtggagcttacacaaccaatccatttgatctgtttgagacattttttggagcaagcatgggtggtttttctggcatggaccagagcgcgtttaggacaagcaggcgaagcactgctatacagggtgaagacatcagatatgatgtgattctggggttcacagaggcgatatttggaacagagaaagatattatattatctcatttggaaacatgtgatacatgtggtggttctggatcaaaggctggctccaagatgagaatatgttccacatgtggtgggcgagggcaagtaatgcgaactgagcaaacaccatttggtctgttctcccaggtttctatttgccccacttgtgcaggagagggcgaagtcatttcagagtattgcaggaaatgttctggagaggggcgtatccgtgtcagaaaggagatcaaagtaaaaatccctccaggagtgagcaaaggcagtactcttcgtgtacgtggggaaggtgatgctggaccaaaaggtgggcctcctggagatctctttgtttgccttgatatagaggagccatcagatatcaagagggatggtataaacttgtattcaactgtgtcaataagctatcttgaagctattttgggcactgttatgcaagtcagaactgttgatggaaccagtgaccttcgaatacctccaggtatccaacctggtgatgtaattgtcttagcgaagcaaggagttccatcattgaataagccgtctatacgtggtgatcatctcttcactgttaaagtcgcaataccgaagcgcataagtgggcgtgaaagagaattacttgaggaacttgcatctttgagtaatggtcgctttgcacgaacagacactaagccaaaacctgcccagccaaaagccatacatcaagagaaagaagttggtgctagtcaagaagatacaagcaaatctaaagaagcagagggtgactggttgaagaaacttacagattttgctgggtccattgttaatggcgctgcgaagtggctgaacgacaacctgtaggctgtaaatatttactgcaggatagaagattgtcttacatggtgctgtagtccaatcaaagttcttagattcattggtggtccccacgagctcgtatattcgttttattggagagctgcaagattttcaggctgagtggcaaccgagggagtgaaagttgtcaactaatatcgtcgcggcgttggtcccttgtcattcttgccaagcaattatttttatgtagttggagtccttttcagtctggcaagcggcgtagaagtctgaagctgtgggatgctgatcccaaaccccgggactagacaaacactgtacttgaggttttggattaatcaaattcaccgatatcgaattgcaaactt

SEQ ID NO: 13561 - protein, 488 aa, Zea mays subsp. mays
  peptide (1)..(488): Ceres Seq. ID no. 12434852
  misc_feature (66)..(66): Xaa is any aa, unknown or other
MAPTSMLPFAPSNTSLPYSSRATTAAAFAPRGLHHAAAGRSGGGQRLACAAPRRRRGGGLVVRASXDYYATLGVPRAASNRDIKAAYRKLARQYHPDVNKEPGATEKFKEISAAYEVLSDEKKRALYDQYGEAGVKSAVGGSGGAYTTNPFDLFETFFGASMGGFSGMDQSAFRTSRRSTAIQGEDIRYDVILGFTEAIFGTEKDIILSHLETCDTCGGSGSKAGSKMRICSTCGGRGQVMRTEQTPFGLFSQVSICPTCAGEGEVISEYCRKCSGEGRIRVRKEIKVKIPPGVSKGSTLRVRGEGDAGPKGGPPGDLFVCLDIEEPSDIKRDGINLYSTVSISYLEAILGTVMQVRTVDGTSDLRIPPGIQPGDVIVLAKQGVPSLNKPSIRGDHLFTVKVAIPKRISGRERELLEELASLSNGRFARTDTKPKPAQPKAIHQEKEVGASQEDTSKSKEAEGDWLKKLTDFAGSIVNGAAKWLNDNL

SEQ ID NO: 13562 - protein, 483 aa, Zea mays subsp. mays
  peptide (1)..(483): Ceres Seq. ID no. 12434853
  misc_feature (61)..(61): Xaa is any aa, unknown or other
MLPFAPSNTSLPYSSRATTAAAFAPRGLHHAAAGRSGGGQRLACAAPRRRRGGGLVVRASXDYYATLGVPRAASNRDIKAAYRKLARQYHPDVNKEPGATEKFKEISAAYEVLSDEKKRALYDQYGEAGVKSAVGGSGGAYTTNPFDLFETFFGASMGGFSGMDQSAFRTSRRSTAIQGEDIRYDVILGFTEAIFGTEKDIILSHLETCDTCGGSGSKAGSKMRICSTCGGRGQVMRTEQTPFGLFSQVSICPTCAGEGEVISEYCRKCSGEGRIRVRKEIKVKIPPGVSKGSTLRVRGEGDAGPKGGPPGDLFVCLDIEEPSDIKRDGINLYSTVSISYLEAILGTVMQVRTVDGTSDLRIPPGIQPGDVIVLAKQGVPSLNKPSIRGDHLFTVKVAIPKRISGRERELLEELASLSNGRFARTDTKPKPAQPKAIHQEKEVGASQEDTSKSKEAEGDWLKKLTDFAGSIVNGAAKWLNDNL

SEQ ID NO: 13563 - protein, 327 aa, Zea mays subsp. mays
  peptide (1)..(327): Ceres Seq. ID no. 12434854
MGGFSGMDQSAFRTSRRSTAIQGEDIRYDVILGFTEAIFGTEKDIILSHLETCDTCGGSGSKAGSKMRICSTCGGRGQVMRTEQTPFGLFSQVSICPTCAGEGEVISEYCRKCSGEGRIRVRKEIKVKIPPGVSKGSTLRVRGEGDAGPKGGPPGDLFVCLDIEEPSDIKRDGINLYSTVSISYLEAILGTVMQVRTVDGTSDLRIPPGIQPGDVIVLAKQGVPSLNKPSIRGDHLFTVKVAIPKRISGRERELLEELASLSNGRFARTDTKPKPAQPKAIHQEKEVGASQEDTSKSKEAEGDWLKKLTDFAGSIVNGAAKWLNDNL

SEQ ID NO: 13564 - DNA, 1467 bp, Zea mays subsp. mays
  misc_feature (1)..(1467): Ceres Seq. ID no. 12368243
  misc_feature (1)..(1467): Ortholog of  Ceres SEQ ID NO 15174547 as cited in SEQ ID NO 59586
  misc_feature (1)..(1467): Ortholog of  Ceres SEQ ID NO 15169470 as cited in SEQ ID NO 66036
gcacgagaccattacctagaacatcctaatcgaaaaagaggaaacgccctgcacagcacgactcctccccatctaccgctacctttctacctacccatctagcacccctcgctcgccaagccaaggtctgagccgttcgaggagaaggacggagttaagctgccgagctacaggggcgacaacgtcaacggcgacgacttcaccgagaagagccgcgtgccggacccgcagaggatgatccgcgcctacgcacagtcggtggcgacactcaacctgctccgcgcgttcgccaccggagggtacgctgccatgcagcgcgtcactcagtggaacctcgatttcatggatcacaacgagcaaggtgataggtaccgtgaattggcccatagggtggatgatgctcttgggttcatgactgcatcggggcttacagtcgaccacccgataatgacgactactgacttctggacctcgcacgagtgccttctcttaccctacgagcaggctcttacccgtgaggattccaccagtggccttttctatgattgttcggcccacatgttgtgggttggtgagcgcactcgacaactcgatggagctcatgttgaattcctccgtggtgttgccaaccctctgggcataaaggtgagcgacaaaatgaaccccagtgagttggtgaagctgattgatattctgaacccttcaaacaaacctggaaggatcaccataattacaaggatgggggcagagaacatgagggtgaagttgcctcatctcatccgtgctgttcgcaatgctggactgattgtcacatggattactgatcctatgcatggaaacaccatcaaggccccttgtggcctgaagactcgtccatttgactccattctggctgaagtgcgtgcttcttcgatgtgcatgaccaagaaggaagccaccctgggggcgtccaccttgaaatgactgggcagaacgtgaccgagtatcggtggatcacggaccgtgaccttcgacgatctgagcgaccgctaccacacccactgcgacccaaggctgaatgcctcccagtccctggagctcgcctttatcatcgcagagaggctgaggaagaggaggatgcgatcggggctcaacagcagcctgccactgccgccactggcttctgagtagccggagccaaacacaaaggagggtaggaatagctgtggtgactcggaagagaaagagacagtcgacgccttgttttgttgatgcttagtgtggtgacctggtggtggtggtggtgggtgttcttggcacaagttacatgctggggatagctataggaggtacctgttgaggtgtgtaagacagtagctagcaaccgtatgccttggtttcctgtttgggtgcgtgacttgccgactttctagctgcttctggggttttgacctcggtaaggaaagaataaaaagataatcggagtgc

SEQ ID NO: 13565 - protein, 242 aa, Zea mays subsp. mays
  peptide (1)..(242): Ceres Seq. ID no. 12368244
MIRAYAQSVATLNLLRAFATGGYAAMQRVTQWNLDFMDHNEQGDRYRELAHRVDDALGFMTASGLTVDHPIMTTTDFWTSHECLLLPYEQALTREDSTSGLFYDCSAHMLWVGERTRQLDGAHVEFLRGVANPLGIKVSDKMNPSELVKLIDILNPSNKPGRITIITRMGAENMRVKLPHLIRAVRNAGLIVTWITDPMHGNTIKAPCGLKTRPFDSILAEVRASSMCMTKKEATLGASTLK

SEQ ID NO: 13566 - protein, 217 aa, Zea mays subsp. mays
  peptide (1)..(217): Ceres Seq. ID no. 12368245
MQRVTQWNLDFMDHNEQGDRYRELAHRVDDALGFMTASGLTVDHPIMTTTDFWTSHECLLLPYEQALTREDSTSGLFYDCSAHMLWVGERTRQLDGAHVEFLRGVANPLGIKVSDKMNPSELVKLIDILNPSNKPGRITIITRMGAENMRVKLPHLIRAVRNAGLIVTWITDPMHGNTIKAPCGLKTRPFDSILAEVRASSMCMTKKEATLGASTLK

SEQ ID NO: 13567 - protein, 206 aa, Zea mays subsp. mays
  peptide (1)..(206): Ceres Seq. ID no. 12368246
MDHNEQGDRYRELAHRVDDALGFMTASGLTVDHPIMTTTDFWTSHECLLLPYEQALTREDSTSGLFYDCSAHMLWVGERTRQLDGAHVEFLRGVANPLGIKVSDKMNPSELVKLIDILNPSNKPGRITIITRMGAENMRVKLPHLIRAVRNAGLIVTWITDPMHGNTIKAPCGLKTRPFDSILAEVRASSMCMTKKEATLGASTLK

SEQ ID NO: 13568 - DNA, 1406 bp, Zea mays subsp. mays
  misc_feature (1)..(1406): Ceres Seq. ID no. 12341374
  misc_feature (1)..(1406): Ortholog of  Ceres SEQ ID NO 14315042 as cited in SEQ ID NO 56959
  misc_feature (1)..(1406): Ortholog of  Ceres SEQ ID NO 12608620 as cited in SEQ ID NO 60192
  misc_feature (1)..(1406): Ortholog of  Ceres SEQ ID NO 13662898 as cited in SEQ ID NO 66199
  misc_feature (1)..(1406): Ortholog of  Ceres SEQ ID NO 14313358 as cited in SEQ ID NO 67347
  misc_feature (1)..(1406): Ortholog of  Ceres SEQ ID NO 13654314 as cited in SEQ ID NO 67914
aaaaattgcaagagtttgagccaacacacacagagagaggacaactcctcacaactctcccttccctcctgtaggggccaaaagggttagagagtaggagaagtagttccctagcccaacacaagaaaaacaagctcgatctcctcatcaccctaatccaagcaactgctttgtgtgttgggaaattcttgtgacccctgttatattattatccgtgtagctactagcttcattcccccctttgtacccatcaaatggctggcatgtctctgcaacacccctgggcgtttgctttcggtctactaggtaacgtcatctccttcatgaccttcctggccccgataccgacgttctaccgcatctacaagagcaagtcgacggaaggcttccagtcggttccctacgtggttgccctgttcagcgccatgctgtggatcttctacgcactgatcaagtccaacgagaccttcctcatcaccatcaacgccgccggctgcgtcatcgagaccatctacgtcgtcatgtacttcgtctacgcgcccaagaaagccaagctgttcacggccaagatcatggtcctcctcaatggcggcgtctttggggtcatcctcctgctcacccttctcctcttcaagggcagtaagcgcgttgtgctgcttggctggatctgcgtcggtttctccgtcagtgtcttcgtcgcgccactcagcatcatgagacgagtgatccagacgaagagcgtggagtacatgcccttctccctctccctctcgctcaccctcagcgccgtcgtctggttcctctacggcctcctcatcaaggacaaatacgtcgcgcttccaaacatcctggggttcaccttcggcgtggtccagatggtgctctacgtgttgtacatgaacaagacgccggtggcggcgactgccgagggcaaggatgccggcaagctttcctcagctgcagacgagcacgtcctcgtcaacatcgccaagctcagcccagccctcccggagaggagctccggggtgcacccagtcacccagatggcgggcgttcccgtcaggagctgcgctgctgaagcaaccgcgccggcgatgctgcccaacagggacgtggtcgacgtcttcgtcagccgacacagccccgccgtccacgtggcatagattctcgatcgatcgcgtgcatggcccatgcatgcgcccgccacacgtacgctagcttttatatattcgaaggacttgctgctggtcgtgagcatatatatgatggagaaaatgattaagtagtatatatgtaagtaattaactgccatggaagcttgctaatggatggaggcagaggccagaacgatgaagggggaagctatacatatatgtgtgtaatatagatatatggggtttgtgtcc

SEQ ID NO: 13569 - protein, 302 aa, Zea mays subsp. mays
  peptide (1)..(302): Ceres Seq. ID no. 12341375
MAGMSLQHPWAFAFGLLGNVISFMTFLAPIPTFYRIYKSKSTEGFQSVPYVVALFSAMLWIFYALIKSNETFLITINAAGCVIETIYVVMYFVYAPKKAKLFTAKIMVLLNGGVFGVILLLTLLLFKGSKRVVLLGWICVGFSVSVFVAPLSIMRRVIQTKSVEYMPFSLSLSLTLSAVVWFLYGLLIKDKYVALPNILGFTFGVVQMVLYVLYMNKTPVAATAEGKDAGKLSSAADEHVLVNIAKLSPALPERSSGVHPVTQMAGVPVRSCAAEATAPAMLPNRDVVDVFVSRHSPAVHVA

SEQ ID NO: 13570 - protein, 299 aa, Zea mays subsp. mays
  peptide (1)..(299): Ceres Seq. ID no. 12341376
MSLQHPWAFAFGLLGNVISFMTFLAPIPTFYRIYKSKSTEGFQSVPYVVALFSAMLWIFYALIKSNETFLITINAAGCVIETIYVVMYFVYAPKKAKLFTAKIMVLLNGGVFGVILLLTLLLFKGSKRVVLLGWICVGFSVSVFVAPLSIMRRVIQTKSVEYMPFSLSLSLTLSAVVWFLYGLLIKDKYVALPNILGFTFGVVQMVLYVLYMNKTPVAATAEGKDAGKLSSAADEHVLVNIAKLSPALPERSSGVHPVTQMAGVPVRSCAAEATAPAMLPNRDVVDVFVSRHSPAVHVA

SEQ ID NO: 13571 - protein, 279 aa, Zea mays subsp. mays
  peptide (1)..(279): Ceres Seq. ID no. 12341377
MTFLAPIPTFYRIYKSKSTEGFQSVPYVVALFSAMLWIFYALIKSNETFLITINAAGCVIETIYVVMYFVYAPKKAKLFTAKIMVLLNGGVFGVILLLTLLLFKGSKRVVLLGWICVGFSVSVFVAPLSIMRRVIQTKSVEYMPFSLSLSLTLSAVVWFLYGLLIKDKYVALPNILGFTFGVVQMVLYVLYMNKTPVAATAEGKDAGKLSSAADEHVLVNIAKLSPALPERSSGVHPVTQMAGVPVRSCAAEATAPAMLPNRDVVDVFVSRHSPAVHVA

SEQ ID NO: 13572 - DNA, 1250 bp, Zea mays subsp. mays
  misc_feature (1)..(1250): Ceres Seq. ID no. 12411217
  misc_feature (1)..(1250): Ortholog of  Ceres SEQ ID NO 15169350 as cited in SEQ ID NO 53271
aagtcaaggacaaggagcaaagcaaacgctgcaagcgaactcgccgccccacaaagcagtgccagggtctggctgattggctcccaccatggcatcgacctctccgcaccgctcctccggcggggatccaccttcctcgtccacgcccctcatctcctcgccgacctccccggcatccggctcctccggcggcccgctagggcggctcacgagcctccgcggcgcagcgcggttcatccggcgcacggggagccggcgtttgatgagggagccctccgtggcggtgcgggagacggctgccgagcacctagaggagcgtcagaccgactgggcctactctaagcccgtcatcgtggtcgacatgctctggaacgtcgccttcgtcgcaatcgccgcggccgtcgtcgccgcgtcgctgggcgagattcccgccgtgcctctccgcgtctggatcgcgggctacgtgctccagtgcctcctccacatcctctgcgtcacagtcgaatacaggcgtcgacgcagggacgcggaccaggagggagtgggtgttgacttcaagttcaggaggagggagcatctgaagatgacgtaaacaacctttccaaattcaaatttcggacaatgagtgatgcagacaagctagctgccggcattgcagcacctgtgggtggagtgatgacagagtgcggtaccaatcctcctgtcgaacatattctttcggctgaggatgcagagtgctgtatctgcctatgcccgtatgaagatggcgtggaactacgtgagctcccttgcaaccaccattttcactgcagctgtatagacaagtggcttcacataaatgctacatgcccattgtgcaagttcaacatcgtcaagagcaatctccacagagaagaggtctaggtcaataaggaaaaaaaaataatcatggcaacacatttcggcatgtcccatcccagctgtgctcgtcagtattgccacatttgccaactggagttgtgactacctgtcttgtagtcaagtcataaaagtcactggtgatgcgcaggtggttgcaatgtcggttctcgtgaatattccttgtaacagtttgctgcaggggctgtacattctcgttctgctcgatctgattgcattgcgatttatttgtacatgaacacgtggccatgttggatcatgaaagcggtcagtcgtttgtaaaatgattcatgaattggaggctagtatgcaggctgctatctcttgtctcg

SEQ ID NO: 13573 - protein, 167 aa, Zea mays subsp. mays
  peptide (1)..(167): Ceres Seq. ID no. 12411218
MASTSPHRSSGGDPPSSSTPLISSPTSPASGSSGGPLGRLTSLRGAARFIRRTGSRRLMREPSVAVRETAAEHLEERQTDWAYSKPVIVVDMLWNVAFVAIAAAVVAASLGEIPAVPLRVWIAGYVLQCLLHILCVTVEYRRRRRDADQEGVGVDFKFRRREHLKMT

SEQ ID NO: 13574 - protein, 113 aa, Zea mays subsp. mays
  peptide (1)..(113): Ceres Seq. ID no. 12411219
KSRTRSKANAASELAAPQSSARVWLIGSHHGIDLSAPLLRRGSTFLVHAPHLLADLPGIRLLRRPARAAHEPPRRSAVHPAHGEPAFDEGALRGGAGDGCRAPRGASDRLGLL

SEQ ID NO: 13575 - protein, 109 aa, Zea mays subsp. mays
  peptide (1)..(109): Ceres Seq. ID no. 12411220
MREPSVAVRETAAEHLEERQTDWAYSKPVIVVDMLWNVAFVAIAAAVVAASLGEIPAVPLRVWIAGYVLQCLLHILCVTVEYRRRRRDADQEGVGVDFKFRRREHLKMT

SEQ ID NO: 13576 - DNA, 1597 bp, Zea mays subsp. mays
  misc_feature (1)..(1597): Ceres Seq. ID no. 12411213
  misc_feature (1)..(1597): Ortholog of  Ceres SEQ ID NO 15177854 as cited in SEQ ID NO 51851
  misc_feature (1)..(1597): Ortholog of  Ceres SEQ ID NO 15177087 as cited in SEQ ID NO 51932
  misc_feature (1)..(1597): Ortholog of  Ceres SEQ ID NO 13662937 as cited in SEQ ID NO 64415
  misc_feature (1)..(1597): Ortholog of  Ceres SEQ ID NO 13595984 as cited in SEQ ID NO 68340
  misc_feature (1)..(1597): Ortholog of  Ceres SEQ ID NO 12635014 as cited in SEQ ID NO 0
gtcaccgtccgtcgtcgcagacgagcccagtggcgactggcgattcgctttcgaaccgcagtcgtccctgctgtgttcccggttccctcccttcctcctcctatagttggcttctcgccaccctctgccttcgaccaactttctcccttctcccctccccgttcccctctccaactccaatccatggcctccacggatcgctccgcgccggcggaggaccagcaacagccgcagcgcccgtccctcttctcgccgtaccagatgccccacttccgcctcgcgcaccgggtggtgctggcgccgatgaccaggtgccgggcgcccgatgcgctcccgggccccgcgctcgcggagtactacgcgcagcggtccacggaaggcggcttgctcatctccgagggcaccatcatctcgcccgccagccctgggttccctcgtgtccctgggatatacaatcaagagcagactgatgcatggaaaaaggtggttgatgctgttcatgccaagggagccatctttttctgccaactatggcatgtaggtcgagcttctcaccaagtatatcagccgggtggttctgctccaatatcctctactgataaaccaatatcatcaagatggaggatactgatgcccgatggatcctatggcaagtatccaactccgaggcgcctagccacatccgagataccagaaattgtcgagcaataccgacaggctgccataaacgccatcaaagcaggtttcgatggcatcgagatccacggtgcccatggctacctaatcgaccagttcctcaaggacggtatcaacgacagggctgacgagtacggtggctcactctccaaccgctgccggttcctcctggaggtgacgcgcgccgtggtctccgcgataggggcagaccgggtggcggtccgggtgtccccggccatcgaccacctcgacgcgtacgactccaacccgctgcagctcggcctggccgtagtggaccgcctcaacgctctccaggaggagaccgggcggctggcctacctgcacgtgacgcagccacggtacacggcgtacgggcagacggagtccggccagcacgggagcgccgaggaggagagccggctgatgcgcgccctgcggggcgcctaccgcggcacgttcatgtgcagcggtgggtacacgcgcgagctcggcgtggaggccgtcgagtcgtgggacgccgacctggtgtcctacgggcggctgttcatcgctaacccggacctggtggagcggttccggcgcgacgccccgctgaacagatacgtgcgcaagacgttctacaccccggatcccgtcgttggttacacggactacccgttcctcggccagcctaaggcgcgcatgtgattattagttaggttggtaactataagaggcggactattgttcgtgtattgtggcttgagaaaataagcaaacacatggtggtagtgctgtgcaataagccttaggtgcaaacatgagcctcctgggcctttagataatgatctaattatagatgtaattatagttttgtcaagaagttaatgtttatttgcacagcaatcagcagtcatctctc

SEQ ID NO: 13577 - protein, 460 aa, Zea mays subsp. mays
  peptide (1)..(460): Ceres Seq. ID no. 12411214
VTVRRRRRAQWRLAIRFRTAVVPAVFPVPSLPPPIVGFSPPSAFDQLSPFSPPRSPLQLQSMASTDRSAPAEDQQQPQRPSLFSPYQMPHFRLAHRVVLAPMTRCRAPDALPGPALAEYYAQRSTEGGLLISEGTIISPASPGFPRVPGIYNQEQTDAWKKVVDAVHAKGAIFFCQLWHVGRASHQVYQPGGSAPISSTDKPISSRWRILMPDGSYGKYPTPRRLATSEIPEIVEQYRQAAINAIKAGFDGIEIHGAHGYLIDQFLKDGINDRADEYGGSLSNRCRFLLEVTRAVVSAIGADRVAVRVSPAIDHLDAYDSNPLQLGLAVVDRLNALQEETGRLAYLHVTQPRYTAYGQTESGQHGSAEEESRLMRALRGAYRGTFMCSGGYTRELGVEAVESWDADLVSYGRLFIANPDLVERFRRDAPLNRYVRKTFYTPDPVVGYTDYPFLGQPKARM

SEQ ID NO: 13578 - protein, 399 aa, Zea mays subsp. mays
  peptide (1)..(399): Ceres Seq. ID no. 12411215
MASTDRSAPAEDQQQPQRPSLFSPYQMPHFRLAHRVVLAPMTRCRAPDALPGPALAEYYAQRSTEGGLLISEGTIISPASPGFPRVPGIYNQEQTDAWKKVVDAVHAKGAIFFCQLWHVGRASHQVYQPGGSAPISSTDKPISSRWRILMPDGSYGKYPTPRRLATSEIPEIVEQYRQAAINAIKAGFDGIEIHGAHGYLIDQFLKDGINDRADEYGGSLSNRCRFLLEVTRAVVSAIGADRVAVRVSPAIDHLDAYDSNPLQLGLAVVDRLNALQEETGRLAYLHVTQPRYTAYGQTESGQHGSAEEESRLMRALRGAYRGTFMCSGGYTRELGVEAVESWDADLVSYGRLFIANPDLVERFRRDAPLNRYVRKTFYTPDPVVGYTDYPFLGQPKARM

SEQ ID NO: 13579 - protein, 373 aa, Zea mays subsp. mays
  peptide (1)..(373): Ceres Seq. ID no. 12411216
MPHFRLAHRVVLAPMTRCRAPDALPGPALAEYYAQRSTEGGLLISEGTIISPASPGFPRVPGIYNQEQTDAWKKVVDAVHAKGAIFFCQLWHVGRASHQVYQPGGSAPISSTDKPISSRWRILMPDGSYGKYPTPRRLATSEIPEIVEQYRQAAINAIKAGFDGIEIHGAHGYLIDQFLKDGINDRADEYGGSLSNRCRFLLEVTRAVVSAIGADRVAVRVSPAIDHLDAYDSNPLQLGLAVVDRLNALQEETGRLAYLHVTQPRYTAYGQTESGQHGSAEEESRLMRALRGAYRGTFMCSGGYTRELGVEAVESWDADLVSYGRLFIANPDLVERFRRDAPLNRYVRKTFYTPDPVVGYTDYPFLGQPKARM

SEQ ID NO: 13580 - DNA, 1561 bp, Zea mays subsp. mays
  misc_feature (1)..(1561): Ceres Seq. ID no. 12411207
  misc_feature (1)..(1561): Ortholog of  Ceres SEQ ID NO 14314480 as cited in SEQ ID NO 52362
  misc_feature (1)..(1561): Ortholog of  Ceres SEQ ID NO 13593854 as cited in SEQ ID NO 53403
  misc_feature (1)..(1561): Ortholog of  Ceres SEQ ID NO 12581680 as cited in SEQ ID NO 55019
  misc_feature (1)..(1561): Ortholog of  Ceres SEQ ID NO 15172112 as cited in SEQ ID NO 59632
aaaattcacgctgagccgccgcctgttccacggttccacctctccaaaccaaaaactcctaggttttctaaacgtgaattccaatcactgcacacgcggtcgtttcggtgtgatttgccaggaagagggggcgaattcgtggtgctaaaagagaccccatctggtgcggttctggggttcgaggagcggcgaggcaggtgggaaatgagggatgtggtcgtggttgacgaagattgcgtccgcgtgcttgggcccggtccggaggtgcgcgcgtacgaggaaggatgaggacgacagcgataatggccgcggcgtcgccgacgacctgctgtggtcgcgggacctcgggcgccacgcggcggggtcagttctcgtttgccgtcgtgcaggccaacgaggcgttggaggaccacagccaagtggagacaggctctgccgcaactttcgtaggcgtctacgacggtcatggcggcgctgaggctgcccgcttcatatctgaccacctcttcgcacacctcattcgacttgctcaggaaaatggaacaatatctgaggatgttgttcggagtgcgttttctgctacggaggaaggcttcttgacactcgtgcggagaacacgttttataaagcctttgattgctgcggttggatcctgctgtctagttggtgtcatatggagaggaacactatatgtggctaatctaggcgattccagggctgttattggcgttctaggtagatcaaacaagatcgtggctgagccactcacaagagatcataatgcaagtagggaggaggtcaggcaggagcttatatcccgtcatccagatgattctcaaattgtggttctcaagcatggtgtttggcgcatcaagggcataattcaggtttcaagaacaattggagatgcttacttgaagaggcgggaatttgctcttgatccatctatcactcgtttccgcctttcggagcctctccgccagcctgttctcacagcagagccatctatctatacaagggtgcttaacccacaagataaatttattatttttgcatctgatggtctttgggagcacttgacaaatcaacaggccgttgaaattgtccacagcaatccacgatcaggaattgcaaagaggctggtaacggcagcgttgaaacaagctgcacggaagagggaaatgaggtatgatgacctcaggaaagttgagaagggaattcgccgcttcttccacgatgacattacagtagttgttgtttacatagatcacggattactgcaagagagggatacttccgtgccagagctctcagtccgtggctttgttgactccgttggcccctcaaatttctcagggataaccgccatatcatgactcactactaatcgagcagcacaattttggtgtacggcattcaagtagcatttgactatctgagtgttatgctttaccaggcttttgcttttagtattgcctttatattgagtactactacaatacttcatgtcgctttgttttcaaaaatactttatgtcaattttgcaagtctgatttgctcc

SEQ ID NO: 13581 - protein, 363 aa, Zea mays subsp. mays
  peptide (1)..(363): Ceres Seq. ID no. 12411208
MRTTAIMAAASPTTCCGRGTSGATRRGQFSFAVVQANEALEDHSQVETGSAATFVGVYDGHGGAEAARFISDHLFAHLIRLAQENGTISEDVVRSAFSATEEGFLTLVRRTRFIKPLIAAVGSCCLVGVIWRGTLYVANLGDSRAVIGVLGRSNKIVAEPLTRDHNASREEVRQELISRHPDDSQIVVLKHGVWRIKGIIQVSRTIGDAYLKRREFALDPSITRFRLSEPLRQPVLTAEPSIYTRVLNPQDKFIIFASDGLWEHLTNQQAVEIVHSNPRSGIAKRLVTAALKQAARKREMRYDDLRKVEKGIRRFFHDDITVVVVYIDHGLLQERDTSVPELSVRGFVDSVGPSNFSGITAIS

SEQ ID NO: 13582 - protein, 357 aa, Zea mays subsp. mays
  peptide (1)..(357): Ceres Seq. ID no. 12411209
MAAASPTTCCGRGTSGATRRGQFSFAVVQANEALEDHSQVETGSAATFVGVYDGHGGAEAARFISDHLFAHLIRLAQENGTISEDVVRSAFSATEEGFLTLVRRTRFIKPLIAAVGSCCLVGVIWRGTLYVANLGDSRAVIGVLGRSNKIVAEPLTRDHNASREEVRQELISRHPDDSQIVVLKHGVWRIKGIIQVSRTIGDAYLKRREFALDPSITRFRLSEPLRQPVLTAEPSIYTRVLNPQDKFIIFASDGLWEHLTNQQAVEIVHSNPRSGIAKRLVTAALKQAARKREMRYDDLRKVEKGIRRFFHDDITVVVVYIDHGLLQERDTSVPELSVRGFVDSVGPSNFSGITAIS

SEQ ID NO: 13583 - DNA, 980 bp, Zea mays subsp. mays
  misc_feature (1)..(980): Ceres Seq. ID no. 13637386
  misc_feature (1)..(980): Ortholog of  Ceres SEQ ID NO 15176155 as cited in SEQ ID NO 0
ctctccgtcgcatttcccgtccggtctttccgttacccggcggcttaaaccctagttcccattccatcttcgtttccgctccgccgccgtcgatggagttctggggtctcgaggtcaaacctggatccactgtcaagtgtgagcctggacatggctttatcctgcacgtttcccaggctgcccttggggaatcaaagaaaagtgacagtgccttaatgtatgtcaaagttgatgacaagaagcttgccattggaacgctctctatcgacaaatacccacagatacaattcgatttggttttcaataaagagtttgagctgtcacacacatcgaaaactaccagtgtatttttctctggttacaaggttgagcagccaattgagggagatgaaatggatcttgattctgaggatgaagaggaggagctaaacattccagtaatcaaggaaaatggcaaaggtgatgggaaggaggagcagaaaaatcaagagaaggcagtagctgctacagcttcaaaatcaagtcttggccttgaaaagaaaagcaaggatgactctgatgattctgatgaggatgagtctgatgattctgatgaggatgattctgatgattctgatgagggcgagggattatctcctgacgaaggcgatgatgattcaagtgatgaggatgataccagtgatgatgacgaggaagaaaccccaactcctaaaaagccagaggcaggcaagaagagaggtgctgaaaatgctctgaaaacgcctctttntgataagaaagcaaaggttgccacaccgccagcccagaaaacaggtggcaagaagggtgccacccatgtggcaactccacacccagcaaaaggcaagacccctgcaaacaatgacaaatcaacggagaagtctccaaaatntggtgggtcagtcccttgcaaatcatgcaacaagacattcaatagtgagatggctntgcaggctcagctc

SEQ ID NO: 13584 - protein, 326 aa, Zea mays subsp. mays
  peptide (1)..(326): Ceres Seq. ID no. 13637387
  misc_feature (256)..(256): Xaa is any aa, unknown or other
  misc_feature (303)..(303): Xaa is any aa, unknown or other
  misc_feature (322)..(322): Xaa is any aa, unknown or other
LRRISRPVFPLPGGLNPSSHSIFVSAPPPSMEFWGLEVKPGSTVKCEPGHGFILHVSQAALGESKKSDSALMYVKVDDKKLAIGTLSIDKYPQIQFDLVFNKEFELSHTSKTTSVFFSGYKVEQPIEGDEMDLDSEDEEEELNIPVIKENGKGDGKEEQKNQEKAVAATASKSSLGLEKKSKDDSDDSDEDESDDSDEDDSDDSDEGEGLSPDEGDDDSSDEDDTSDDDEEETPTPKKPEAGKKRGAENALKTPLXDKKAKVATPPAQKTGGKKGATHVATPHPAKGKTPANNDKSTEKSPKXGGSVPCKSCNKTFNSEMAXQAQL

SEQ ID NO: 13585 - protein, 296 aa, Zea mays subsp. mays
  peptide (1)..(296): Ceres Seq. ID no. 13637388
  misc_feature (226)..(226): Xaa is any aa, unknown or other
  misc_feature (273)..(273): Xaa is any aa, unknown or other
  misc_feature (292)..(292): Xaa is any aa, unknown or other
MEFWGLEVKPGSTVKCEPGHGFILHVSQAALGESKKSDSALMYVKVDDKKLAIGTLSIDKYPQIQFDLVFNKEFELSHTSKTTSVFFSGYKVEQPIEGDEMDLDSEDEEEELNIPVIKENGKGDGKEEQKNQEKAVAATASKSSLGLEKKSKDDSDDSDEDESDDSDEDDSDDSDEGEGLSPDEGDDDSSDEDDTSDDDEEETPTPKKPEAGKKRGAENALKTPLXDKKAKVATPPAQKTGGKKGATHVATPHPAKGKTPANNDKSTEKSPKXGGSVPCKSCNKTFNSEMAXQAQL

SEQ ID NO: 13586 - protein, 255 aa, Zea mays subsp. mays
  peptide (1)..(255): Ceres Seq. ID no. 13637389
  misc_feature (185)..(185): Xaa is any aa, unknown or other
  misc_feature (232)..(232): Xaa is any aa, unknown or other
  misc_feature (251)..(251): Xaa is any aa, unknown or other
MYVKVDDKKLAIGTLSIDKYPQIQFDLVFNKEFELSHTSKTTSVFFSGYKVEQPIEGDEMDLDSEDEEEELNIPVIKENGKGDGKEEQKNQEKAVAATASKSSLGLEKKSKDDSDDSDEDESDDSDEDDSDDSDEGEGLSPDEGDDDSSDEDDTSDDDEEETPTPKKPEAGKKRGAENALKTPLXDKKAKVATPPAQKTGGKKGATHVATPHPAKGKTPANNDKSTEKSPKXGGSVPCKSCNKTFNSEMAXQAQL

SEQ ID NO: 13587 - DNA, 1681 bp, Zea mays subsp. mays
  misc_feature (1)..(1681): Ceres Seq. ID no. 12411203
  misc_feature (1)..(1681): Ortholog of  Ceres SEQ ID NO 14311731 as cited in SEQ ID NO 51632
  misc_feature (1)..(1681): Ortholog of  Ceres SEQ ID NO 14315189 as cited in SEQ ID NO 57702
aaattccagtccgatttggacattgtcttcgtctccttcatcccctgcccacctgttctgctctgccgccgccgccgctgccgctcccgctgccgcaggaaccctagaccacgctgagcaacccccggcctacacggcgtagctttgcaggaaatggaatacggcgccgtcctcgccgccgcgccgctcgtcgcacggccgaactggctcctcctctcgccgccgccactggcgccgtctattcagattcagaatcgtctttattcgatctcgtcattcccactaaaggctggacctgtaagggcatgcagagctttagcaagcaactacacgcaaacatctgaaacagttgatttggactgggagaacctgggttttgggattgtgcaaactgattatatgtatattgctaagtgcgggacagacgggaatttttctgagggtgaaatggtgccttttggacctatagcgctgagtccatcttctggagtcctaaattatggacagggattgtttgagggcctaaaggcgtataagaaaactgatggatccatcctattatttcgcccagaggaaaatgctgagaggatgcggacaggtgctgagaggatgtgcatgcctgcaccctctgtcgagcagtttattgatgcagtaaaacaaaccgttcttgcaaataagagatggattcctcctactggtaaaggttctctttatattaggcccttacttatgggaagtggggctgttcttggtcttgcacctgctcctgagtatacattcattatatttgtctctcctgttggaaactactttaaggaaggtttagcaccaataaatttgatagttgaagacaagttccatcgtgctactcctggtggtactgggggtgtgaagaccataggaaattatgcttcggtgttgatggcacagaaaattgcaaaggaaaagggttattctgatgtcctctacttggacgctgttcacaagaagtaccttgaagaagtttcttcatgcaatgtttttgttgtcaaggacaatgttatttctaccccagcaataaaaggaacaatattacctggtatcacaaggaaaagtataattgacgttgctttgagtaaaggcttccaggttgaggagcggcttgtttcagtggatgaactgcttgatgctgatgaggtattctgcacaggaactgctgttgtggtgtctcctgttgggagcattacatatcaagggaaaagagtggaatacggccaccaaggtgttggcgttgtgtcccagcagctgtacacttcactgacgagtcttcagatgggtcaaaccgaggattggatgggctggactgtgcaacctgaattagttggccgtggttcgtggatcattcccaacagatgatgggttcgcaagatccaaatctggaggatcacaaccatgtgtacctcttcggttacagttttgtagtgtcttatgcgatggcgtcctgcctgtatatttcttagacggtatttaaaccataaaacagtattcgtctgtacgactgtacccttcagttctgtagcatctgccggagacgagtactagttttgttattttctttcttttacaaaccaagaacagttctatagttttattgtagacactggaccatcatatgatctcaatgggtagctttttccttttt

SEQ ID NO: 13588 - protein, 413 aa, Zea mays subsp. mays
  peptide (1)..(413): Ceres Seq. ID no. 12411204
MEYGAVLAAAPLVARPNWLLLSPPPLAPSIQIQNRLYSISSFPLKAGPVRACRALASNYTQTSETVDLDWENLGFGIVQTDYMYIAKCGTDGNFSEGEMVPFGPIALSPSSGVLNYGQGLFEGLKAYKKTDGSILLFRPEENAERMRTGAERMCMPAPSVEQFIDAVKQTVLANKRWIPPTGKGSLYIRPLLMGSGAVLGLAPAPEYTFIIFVSPVGNYFKEGLAPINLIVEDKFHRATPGGTGGVKTIGNYASVLMAQKIAKEKGYSDVLYLDAVHKKYLEEVSSCNVFVVKDNVISTPAIKGTILPGITRKSIIDVALSKGFQVEERLVSVDELLDADEVFCTGTAVVVSPVGSITYQGKRVEYGHQGVGVVSQQLYTSLTSLQMGQTEDWMGWTVQPELVGRGSWIIPNR

SEQ ID NO: 13589 - protein, 331 aa, Zea mays subsp. mays
  peptide (1)..(331): Ceres Seq. ID no. 12411205
MYIAKCGTDGNFSEGEMVPFGPIALSPSSGVLNYGQGLFEGLKAYKKTDGSILLFRPEENAERMRTGAERMCMPAPSVEQFIDAVKQTVLANKRWIPPTGKGSLYIRPLLMGSGAVLGLAPAPEYTFIIFVSPVGNYFKEGLAPINLIVEDKFHRATPGGTGGVKTIGNYASVLMAQKIAKEKGYSDVLYLDAVHKKYLEEVSSCNVFVVKDNVISTPAIKGTILPGITRKSIIDVALSKGFQVEERLVSVDELLDADEVFCTGTAVVVSPVGSITYQGKRVEYGHQGVGVVSQQLYTSLTSLQMGQTEDWMGWTVQPELVGRGSWIIPNR

SEQ ID NO: 13590 - protein, 315 aa, Zea mays subsp. mays
  peptide (1)..(315): Ceres Seq. ID no. 12411206
MVPFGPIALSPSSGVLNYGQGLFEGLKAYKKTDGSILLFRPEENAERMRTGAERMCMPAPSVEQFIDAVKQTVLANKRWIPPTGKGSLYIRPLLMGSGAVLGLAPAPEYTFIIFVSPVGNYFKEGLAPINLIVEDKFHRATPGGTGGVKTIGNYASVLMAQKIAKEKGYSDVLYLDAVHKKYLEEVSSCNVFVVKDNVISTPAIKGTILPGITRKSIIDVALSKGFQVEERLVSVDELLDADEVFCTGTAVVVSPVGSITYQGKRVEYGHQGVGVVSQQLYTSLTSLQMGQTEDWMGWTVQPELVGRGSWIIPNR

SEQ ID NO: 13591 - DNA, 1397 bp, Zea mays subsp. mays
  misc_feature (1)..(1397): Ceres Seq. ID no. 12342474
  misc_feature (1)..(1397): Ortholog of  Ceres SEQ ID NO 15169372 as cited in SEQ ID NO 58778
cttttccaaaaaaaaaagaagcccctcctatccatccctatccctacccctacgagtatccaagtccaaccagcaagaggggaggcgctgcacgcaggtcacgcggcgatggacatatgcgatgtttgagcaggcggtggcagatttctgctggcatgcgagggaagtagtgtcgtcagggatggggctctggggttggccgtgggggcgacgtgggccgtcgggcttcggctccgcgtccaccgccgaggaggtcaccgccggcgtcgacgcaagcaacatcactgccatcgtcacaggagcgacgaatggcattggaaaggagacagccagagttctagcactgagcgggagccaaggtaatcataccagctaggacactggagagtggcctcaagttgaaggagagcctcgcagatgaggtcccaagctccaaggtacacgttatggagatggacctgagctgtctcagctccgtccgcgacttcgcacggtccttcaattcatcccacaagcatctgaacctcctcataaacaatgcagggatcatggcctgcccttaccagctgtccaaggatggaattgagctgcaattcgcaacgaatcatgttggccatttcttgctgacaagtctcctgctagacaagatgaaatcaactgctgcagagacaggtgtgcagggaaggatcataaacgtatcatcggtcgcgcataaaagaagtgatggtacatgctttgagctgaacaagctaaacgataaggctaggtaccaaccgttcattgcatacgcgcattcgaagttagccaatgttctccacacaaatgagttatccaggcgttttcaggaagaaggatgcaatctgacagcgaattccctgcatcctggagtgatcgtcaccaatatcattcgctatgttgctggaaacagtgcgctgatttcggctctctcccctgtagcaaatcttgttctgaagagcgtgccccggggggctgcaactacttgttacttggcattgcaccctaatgtcaaaggtgtatctggtaaatacttcgctgattgcaatgaagcaacaccgactgctgtcgcgagagactcagagctggcgaagaggctatggtcgttcagcgaagaacttgtcaagatctatgctgatatgtcacagacgacacaggcaagcgaagaagaggaaaccacggttacgaaagacgttttccaagacaagtagcgtaatatatgttgctgcgttttctacgttttgtacctgtcctctgggcccgaatggccagtgactgtaatagcacctaagtgcccgagactggtaagacaaggggtattcagacaatcaagaaaccacggtgcggctgaggcctgaggcagtcctctccgtcgttcactc

SEQ ID NO: 13592 - protein, 259 aa, Zea mays subsp. mays
  peptide (1)..(259): Ceres Seq. ID no. 12342475
MEMDLSCLSSVRDFARSFNSSHKHLNLLINNAGIMACPYQLSKDGIELQFATNHVGHFLLTSLLLDKMKSTAAETGVQGRIINVSSVAHKRSDGTCFELNKLNDKARYQPFIAYAHSKLANVLHTNELSRRFQEEGCNLTANSLHPGVIVTNIIRYVAGNSALISALSPVANLVLKSVPRGAATTCYLALHPNVKGVSGKYFADCNEATPTAVARDSELAKRLWSFSEELVKIYADMSQTTQASEEEETTVTKDVFQDK

SEQ ID NO: 13593 - protein, 257 aa, Zea mays subsp. mays
  peptide (1)..(257): Ceres Seq. ID no. 12342476
MDLSCLSSVRDFARSFNSSHKHLNLLINNAGIMACPYQLSKDGIELQFATNHVGHFLLTSLLLDKMKSTAAETGVQGRIINVSSVAHKRSDGTCFELNKLNDKARYQPFIAYAHSKLANVLHTNELSRRFQEEGCNLTANSLHPGVIVTNIIRYVAGNSALISALSPVANLVLKSVPRGAATTCYLALHPNVKGVSGKYFADCNEATPTAVARDSELAKRLWSFSEELVKIYADMSQTTQASEEEETTVTKDVFQDK

SEQ ID NO: 13594 - protein, 225 aa, Zea mays subsp. mays
  peptide (1)..(225): Ceres Seq. ID no. 12342477
MACPYQLSKDGIELQFATNHVGHFLLTSLLLDKMKSTAAETGVQGRIINVSSVAHKRSDGTCFELNKLNDKARYQPFIAYAHSKLANVLHTNELSRRFQEEGCNLTANSLHPGVIVTNIIRYVAGNSALISALSPVANLVLKSVPRGAATTCYLALHPNVKGVSGKYFADCNEATPTAVARDSELAKRLWSFSEELVKIYADMSQTTQASEEEETTVTKDVFQDK

SEQ ID NO: 13595 - DNA, 1663 bp, Zea mays subsp. mays
  misc_feature (1)..(1663): Ceres Seq. ID no. 13598841
  misc_feature (1)..(1663): Ortholog of  Ceres SEQ ID NO 15175898 as cited in SEQ ID NO 57344
ctccagagcttgggcagactctcctcagtaactatagttttttttgttccttgggaggatagaaaaaatatatccttggttttcttgaacagataacatttcaggtgtgcttctgaagggagatttcgttgaacaggatgaatgcattggcagcaaccagcaggaacttcaagcaggcagctaagctgctgggcctcgactccaagctggagaagagcttgctcattccattcagggagatcaaggttgaatgcacaatcccaaaagatgatggaactttggcatcctatgttggatttagggttcaacatgataatgctaggggacctatgaagggtggaatcagataccaccatgaggttgatcctgatgaagttaatgccttggcacaattgatgacttggaaaacagcagtagctaacataccatatggaggagccaaaggtggaattggatgtagccctggagacctgagcatctctgagcttgagaggcttacccgagtttttactcagaaaatccatgacttgattggcatccatactgacgttccagctccagatatgggcaccaactcacagacaatggcatggatacttgacgaatactcaaagttccatggttactcacctgctgttgtgacaggaaagcctgtggacctcggaggatcattgggaagagacgccgctactggaaggggagttctgtttgctactgaagctttgcttgcagagcatggcaaaggcattgcaggccagcgtttcgtcatacagggattcggtaacgttggttcctgggcagctcagctgataagtgaagccggtggcaaggtgattgctatcagtgacgtcacaggcgccgtcaaaaacgtcgatggcctcgacatcgtgcagctagtgaagcactcggcggagaacaaggggatcaagggcttcaaggggggagacgccatcgctccagactcgttgctcactgaagagtgcgacgtcctcatcccagcagcgcttgggggagtcataaacaaggataatgctaacgacataaaggcaaagtacatcatcgaggctgccaatcaccccacagatccagaggcagacgagatcctgtcaaagaaaggcgtcctcatcctccccgacatactggccaactctggtggcgtcacagtgagctacttcgagtgggtacaaaacatccaggggttcatgtgggacgaagagaaggtaaacgcggagctgcggacgtacatgacgcgcgccttcggggacgtgaagcagatgtgccggagccacagctgcgacctccgcatgggcgccttcacgcttggcgtcaaccgcgtcgcgcgcgccaccgtcctcaggggatgggaagcatgacctccctccgtgtcgtccgtgtgcccctccctgttgtatcctcttggtcttgggcccttgtttttctttggttaattattgtcgagatcaacggagatccgagaaaaacgggctcagttaataattccaagaagtgcgtcttcttggagataaaatagcggaaggagagttataataagtctgtaactgtaacccatagctgagatgctgtctgcaagcagcaatgccaatgccaatgccatctggttttcgtgctaaaaaaaaaaaaaaaaaagcttatcgataccgtc

SEQ ID NO: 13596 - protein, 411 aa, Zea mays subsp. mays
  peptide (1)..(411): Ceres Seq. ID no. 15222433
MNALAATSRNFKQAAKLLGLDSKLEKSLLIPFREIKVECTIPKDDGTLASYVGFRVQHDNARGPMKGGIRYHHEVDPDEVNALAQLMTWKTAVANIPYGGAKGGIGCSPGDLSISELERLTRVFTQKIHDLIGIHTDVPAPDMGTNSQTMAWILDEYSKFHGYSPAVVTGKPVDLGGSLGRDAATGRGVLFATEALLAEHGKGIAGQRFVIQGFGNVGSWAAQLISEAGGKVIAISDVTGAVKNVDGLDIVQLVKHSAENKGIKGFKGGDAIAPDSLLTEECDVLIPAALGGVINKDNANDIKAKYIIEAANHPTDPEADEILSKKGVLILPDILANSGGVTVSYFEWVQNIQGFMWDEEKVNAELRTYMTRAFGDVKQMCRSHSCDLRMGAFTLGVNRVARATVLRGWEA

SEQ ID NO: 13597 - protein, 347 aa, Zea mays subsp. mays
  peptide (1)..(347): Ceres Seq. ID no. 15222434
MKGGIRYHHEVDPDEVNALAQLMTWKTAVANIPYGGAKGGIGCSPGDLSISELERLTRVFTQKIHDLIGIHTDVPAPDMGTNSQTMAWILDEYSKFHGYSPAVVTGKPVDLGGSLGRDAATGRGVLFATEALLAEHGKGIAGQRFVIQGFGNVGSWAAQLISEAGGKVIAISDVTGAVKNVDGLDIVQLVKHSAENKGIKGFKGGDAIAPDSLLTEECDVLIPAALGGVINKDNANDIKAKYIIEAANHPTDPEADEILSKKGVLILPDILANSGGVTVSYFEWVQNIQGFMWDEEKVNAELRTYMTRAFGDVKQMCRSHSCDLRMGAFTLGVNRVARATVLRGWEA

SEQ ID NO: 13598 - protein, 325 aa, Zea mays subsp. mays
  peptide (1)..(325): Ceres Seq. ID no. 15222435
MTWKTAVANIPYGGAKGGIGCSPGDLSISELERLTRVFTQKIHDLIGIHTDVPAPDMGTNSQTMAWILDEYSKFHGYSPAVVTGKPVDLGGSLGRDAATGRGVLFATEALLAEHGKGIAGQRFVIQGFGNVGSWAAQLISEAGGKVIAISDVTGAVKNVDGLDIVQLVKHSAENKGIKGFKGGDAIAPDSLLTEECDVLIPAALGGVINKDNANDIKAKYIIEAANHPTDPEADEILSKKGVLILPDILANSGGVTVSYFEWVQNIQGFMWDEEKVNAELRTYMTRAFGDVKQMCRSHSCDLRMGAFTLGVNRVARATVLRGWEA

SEQ ID NO: 13599 - DNA, 620 bp, Zea mays subsp. mays; identical to SEQ ID NO: 6372
  misc_feature (1)..(620): Ceres Seq. ID no. 12367118
  misc_feature (1)..(620): Ortholog of  Ceres SEQ ID NO 15175765 as cited in SEQ ID NO 54076

SEQ ID NO: 13600 - protein, 206 aa, Zea mays subsp. mays; identical to SEQ ID NO: 6373
  peptide (1)..(206): Ceres Seq. ID no. 12367119

SEQ ID NO: 13601 - protein, 172 aa, Zea mays subsp. mays; identical to SEQ ID NO: 6374
  peptide (1)..(172): Ceres Seq. ID no. 12367120

SEQ ID NO: 13602 - protein, 108 aa, Zea mays subsp. mays; identical to SEQ ID NO: 6375
  peptide (1)..(108): Ceres Seq. ID no. 12367121

SEQ ID NO: 13603 - DNA, 1413 bp, Zea mays subsp. mays
  misc_feature (1)..(1413): Ceres Seq. ID no. 12353553
  misc_feature (1)..(1413): Ortholog of  Ceres SEQ ID NO 12583469 as cited in SEQ ID NO 51031
  misc_feature (1)..(1413): Ortholog of  Ceres SEQ ID NO 13597389 as cited in SEQ ID NO 63426
  misc_feature (1)..(1413): Ortholog of  Ceres SEQ ID NO 15180463 as cited in SEQ ID NO 0
caccttttctttttcaagaggaagtttttaccatgctacagtttgttggacagatctacaattgggttttggcatgcaggtgagagcctgcacacgcctttcctgagcccatacctcaaggcgctgggcgcggatttcagcaacggcgtgaacttcgccatcggcggctcgacggcgacgccggggggctctccattctcgctggacgtgcagctccatcagtggctctacttcagggccaggtccatggagatgatcaacctaggacagaggcctcccatcgatcgcgaaggattccgaaaggccatctacaccatcgacatcgggcagaacgacgtgtctgcttacatgcacctgccctacgaccaagtgcttgccaagatccctggatttgttgctcagatcaagtacaccatcgagacgctgtactcgcacggggcccgcaagttctggatccacggcacgggcgcgctgggctgcctgccgcagaagctggccatcccgcgggacgccgacgacggcgaccagctggacgcccacggctgcctcaagacctacaacaacgccgccaagcgcttcaacgcgctgctcggcgacgcctgcgcccagctccggcgccggatggtggacgcggcgctcgtcttcgtcgacatgtacgccgtcaagtacgacctggtggccaaccacacgacgcacgggatcgagaaacctctcatggcgtgctgcggctacggcgggccgccgtacaactacaaccacttcaaggcgtgcatgtcggcggagatgcagctgtgcgacgtgggcacgcgcttcatcagctgggacggcgtgcacttcaccgaggccgccaacgccatcgtcgccgccaaggtgctcaccggcgactactccacgcccagggtcaccatcgccaaactcgtcaactccacgctgcccaacgacgactagctggctggccgatcgatcgatcgtcgtcgtcattctgataaacatactgcaggcaggcttctcatcgatccatatccaattgtccgtagaaatctacgactagctcattgtagatccgtaatgtgggctaagagatgcatgacgatcgactagctgcccaactcgtcaagagctggttcaccactctcgtcaggatcgagctagaatggacgagcaattccatggcaccgagtgacacaatttatatcctcattgactagtactagtagtcgtactagcaaaaagaaaacagggttgggccaactgagtgattctgtggggttaggcctttgaggcttttacatgcaattcgtacatgtgtgtgtgtgacatttacagtttttttttaaaaaaaattaggaaatccgatcaatgggtggagggaatgcgacaacatcaaaaagtttacgtaaaatccattacctt

SEQ ID NO: 13604 - protein, 315 aa, Zea mays subsp. mays
  peptide (1)..(315): Ceres Seq. ID no. 12353554
HLFFFKRKFLPCYSLLDRSTIGFWHAGESLHTPFLSPYLKALGADFSNGVNFAIGGSTATPGGSPFSLDVQLHQWLYFRARSMEMINLGQRPPIDREGFRKAIYTIDIGQNDVSAYMHLPYDQVLAKIPGFVAQIKYTIETLYSHGARKFWIHGTGALGCLPQKLAIPRDADDGDQLDAHGCLKTYNNAAKRFNALLGDACAQLRRRMVDAALVFVDMYAVKYDLVANHTTHGIEKPLMACCGYGGPPYNYNHFKACMSAEMQLCDVGTRFISWDGVHFTEAANAIVAAKVLTGDYSTPRVTIAKLVNSTLPNDD

SEQ ID NO: 13605 - protein, 233 aa, Zea mays subsp. mays
  peptide (1)..(233): Ceres Seq. ID no. 12353555
MEMINLGQRPPIDREGFRKAIYTIDIGQNDVSAYMHLPYDQVLAKIPGFVAQIKYTIETLYSHGARKFWIHGTGALGCLPQKLAIPRDADDGDQLDAHGCLKTYNNAAKRFNALLGDACAQLRRRMVDAALVFVDMYAVKYDLVANHTTHGIEKPLMACCGYGGPPYNYNHFKACMSAEMQLCDVGTRFISWDGVHFTEAANAIVAAKVLTGDYSTPRVTIAKLVNSTLPNDD

SEQ ID NO: 13606 - protein, 231 aa, Zea mays subsp. mays
  peptide (1)..(231): Ceres Seq. ID no. 12353556
MINLGQRPPIDREGFRKAIYTIDIGQNDVSAYMHLPYDQVLAKIPGFVAQIKYTIETLYSHGARKFWIHGTGALGCLPQKLAIPRDADDGDQLDAHGCLKTYNNAAKRFNALLGDACAQLRRRMVDAALVFVDMYAVKYDLVANHTTHGIEKPLMACCGYGGPPYNYNHFKACMSAEMQLCDVGTRFISWDGVHFTEAANAIVAAKVLTGDYSTPRVTIAKLVNSTLPNDD

SEQ ID NO: 13607 - DNA, 1472 bp, Zea mays subsp. mays
  misc_feature (1)..(1472): Ceres Seq. ID no. 12374378
  misc_feature (1)..(1472): Ortholog of  Ceres SEQ ID NO 12364737 as cited in SEQ ID NO 51089
  misc_feature (1)..(1472): Ortholog of  Ceres SEQ ID NO 12581561 as cited in SEQ ID NO 53617
  misc_feature (1)..(1472): Ortholog of  Ceres SEQ ID NO 14316263 as cited in SEQ ID NO 55294
  misc_feature (1)..(1472): Ortholog of  Ceres SEQ ID NO 14315035 as cited in SEQ ID NO 56880
  misc_feature (1)..(1472): Ortholog of  Ceres SEQ ID NO 15176751 as cited in SEQ ID NO 59719
  misc_feature (1)..(1472): Ortholog of  Ceres SEQ ID NO 13597380 as cited in SEQ ID NO 64054
  misc_feature (1)..(1472): Ortholog of  Ceres SEQ ID NO 12625474 as cited in SEQ ID NO 64169
  misc_feature (1)..(1472): Ortholog of  Ceres SEQ ID NO 13597502 as cited in SEQ ID NO 64681
gcacgagaccattacctagaacatcctaatcgaaaagtacttggcaatcctctctagctagctcagcatccgaggacgggacttgcattgcactatggatgctgctcttatgcctctgctcgtcgtctccctcgtcttctgcctgctggcggcttccccggcggcgtccgcggcgcgggccttcttcgtcttcggcgactccctcgtcgacaatggcaacaacaactacctgctgaccacggcgcgcgccgacgcgcccccctacggcatcgacttccccacgcaccaagccacgggccgcttctccaacgggctcaacatccccgacatcatcagcgagcacctcggggccgaacctgcgctgccgtacctgagccccgagctccgaggggagaagctgctcgtcggcgccaacttcgcgtcggccggcgtcgggatcctcaacgacacaggaatacaatttgtgaacattatcaggatcggcgaccagctgcagtacttccgggagtaccagcggaagctgcgagccctcgtcggcgagccgcaggcgacgcagctcgtgaaccaggccctcgtgctcatcacgctcggcggcaacgacttcgtgaacaactactacctggtgcccatgtccgtgcggtcgcgccagtacgcgctcccggactatgtccgcttcatcgtctccgagtacaggaagatcctctcgaggctgtacgagctgggcgcgcggcgcgtgatcgtgacggggacggggccgctggggtgcgtcccggccgagctggcgctgcacagccagaacggcgagtgcgcggcggagctgacgcgcgccgtgaacctcttcaacccgcagatggtggacatggtgcgcggcctcaaccgcgccatcggcaccgacntcttngtcgccgccaaccacctaccgcatgaacttcgagctacctcgcaaacccgcangacttcggggttcacgaacgtgcangtggcgtgctgcggccagggcccgtacaacggggatcgggctgtgcacggcggcgtcgaacgtgtgcgacaaccgcgacgtgttcgcgttctgggacgcgttccaccccacggagagggcaaaccgcatcatcgtcgcccagttcatgcacggcgacacggactacatgcaccccatgaacctcagcaccatcctcgccatggaccaggagggcctctagactatagcttgatcagccggacacgattatacgtacatgcgtgatgtgtctcacgtgcctagcacgttagtcatgttttggatgatggcagcccaatttgccaataatattcgtgcctcgatccaagtttcactaatgtgtcactcacgccttaaaaagaattagtgactggctatggttaatcgatccgtgttatatgtgctccgcgagcattcgtttgttggtggtgttggttcgttgtcaagcgaaatggccatttgcagccgtggcgtc

SEQ ID NO: 13608 - protein, 382 aa, Zea mays subsp. mays
  peptide (1)..(382): Ceres Seq. ID no. 12374379
  misc_feature (268)..(268): Xaa is any aa, unknown or other
  misc_feature (269)..(269): Xaa is any aa, unknown or other
  misc_feature (287)..(287): Xaa is any aa, unknown or other
  misc_feature (295)..(295): Xaa is any aa, unknown or other
MDAALMPLLVVSLVFCLLAASPAASAARAFFVFGDSLVDNGNNNYLLTTARADAPPYGIDFPTHQATGRFSNGLNIPDIISEHLGAEPALPYLSPELRGEKLLVGANFASAGVGILNDTGIQFVNIIRIGDQLQYFREYQRKLRALVGEPQATQLVNQALVLITLGGNDFVNNYYLVPMSVRSRQYALPDYVRFIVSEYRKILSRLYELGARRVIVTGTGPLGCVPAELALHSQNGECAAELTRAVNLFNPQMVDMVRGLNRAIGTDXXVAANHLPHELRATSQTRXTSGFTNVXVACCGQGPYNGDRAVHGGVERVRQPRRVRVLGRVPPHGEGKPHHRRPVHARRHGLHAPHEPQHHPRHGPGGPLDYSLISRTRLYVHA

SEQ ID NO: 13609 - protein, 377 aa, Zea mays subsp. mays
  peptide (1)..(377): Ceres Seq. ID no. 12374380
  misc_feature (263)..(263): Xaa is any aa, unknown or other
  misc_feature (264)..(264): Xaa is any aa, unknown or other
  misc_feature (282)..(282): Xaa is any aa, unknown or other
  misc_feature (290)..(290): Xaa is any aa, unknown or other
MPLLVVSLVFCLLAASPAASAARAFFVFGDSLVDNGNNNYLLTTARADAPPYGIDFPTHQATGRFSNGLNIPDIISEHLGAEPALPYLSPELRGEKLLVGANFASAGVGILNDTGIQFVNIIRIGDQLQYFREYQRKLRALVGEPQATQLVNQALVLITLGGNDFVNNYYLVPMSVRSRQYALPDYVRFIVSEYRKILSRLYELGARRVIVTGTGPLGCVPAELALHSQNGECAAELTRAVNLFNPQMVDMVRGLNRAIGTDXXVAANHLPHELRATSQTRXTSGFTNVXVACCGQGPYNGDRAVHGGVERVRQPRRVRVLGRVPPHGEGKPHHRRPVHARRHGLHAPHEPQHHPRHGPGGPLDYSLISRTRLYVHA

SEQ ID NO: 13610 - protein, 204 aa, Zea mays subsp. mays
  peptide (1)..(204): Ceres Seq. ID no. 12374381
  misc_feature (90)..(90): Xaa is any aa, unknown or other
  misc_feature (91)..(91): Xaa is any aa, unknown or other
  misc_feature (109)..(109): Xaa is any aa, unknown or other
  misc_feature (117)..(117): Xaa is any aa, unknown or other
MSVRSRQYALPDYVRFIVSEYRKILSRLYELGARRVIVTGTGPLGCVPAELALHSQNGECAAELTRAVNLFNPQMVDMVRGLNRAIGTDXXVAANHLPHELRATSQTRXTSGFTNVXVACCGQGPYNGDRAVHGGVERVRQPRRVRVLGRVPPHGEGKPHHRRPVHARRHGLHAPHEPQHHPRHGPGGPLDYSLISRTRLYVHA

SEQ ID NO: 13611 - DNA, 1446 bp, Zea mays subsp. mays; identical to SEQ ID NO: 10675
  misc_feature (1)..(1446): Ceres Seq. ID no. 13569613
  misc_feature (1)..(1446): Ortholog of  Ceres SEQ ID NO 13592961 as cited in SEQ ID NO 20522
  misc_feature (1)..(1446): Ortholog of  Ceres SEQ ID NO 12583469 as cited in SEQ ID NO 51031
  misc_feature (1)..(1446): Ortholog of  Ceres SEQ ID NO 13597389 as cited in SEQ ID NO 63426
  misc_feature (1)..(1446): Ortholog of  Ceres SEQ ID NO 13595998 as cited in SEQ ID NO 68161

SEQ ID NO: 13612 - protein, 439 aa, Zea mays subsp. mays; identical to SEQ ID NO: 10676
  peptide (1)..(439): Ceres Seq. ID no. 13569614

SEQ ID NO: 13613 - protein, 399 aa, Zea mays subsp. mays; identical to SEQ ID NO: 10677
  peptide (1)..(399): Ceres Seq. ID no. 13569615

SEQ ID NO: 13614 - protein, 262 aa, Zea mays subsp. mays; identical to SEQ ID NO: 10678
  peptide (1)..(262): Ceres Seq. ID no. 13569616

SEQ ID NO: 13615 - DNA, 1622 bp, Zea mays subsp. mays
  misc_feature (1)..(1622): Ceres Seq. ID no. 12342501
  misc_feature (1)..(1622): Ortholog of  Ceres SEQ ID NO 14316204 as cited in SEQ ID NO 59644
acatctgactgaggagggccgagggtttttagaggaaggaacccgtccgcgaccgatggcgatggcgttgtcgccggggacggtgcctttgggagtgctgctgcggcgggaggtcaccaaggagcggatggagcggccggacgtgctgtgcggcgaggccaacctcagccgcaagggcgaggacttcacgctgctccgcgccgacgcaggccagcgcatccccggcgacccgtccacctccttctccgtcttcgcgatttttgatgggcacaacggatcaggagctgccatatacgcaagggagaatctgttgaaaaacgtcttgcgtgccattcctacatgtttctgcagggaggagtggcttgccgtgctcccacgtgcgcttgttgcagcgttcgtcaagactgataaagattttcaggcagtggatgaaacttctggcacaactgtgacatttgtgataatagacgagtgggttgtgactgtagcatctgtcggtgattcacgttgcatactagaatctgccgatggctcaatctactttttatcagctgatcatcgctttgactccaacccagatgaggtcaagcgcgtgacagcatgtgggagcaaagttgggaaaatggatattgtcggtggaccagaggttggtcctctaagatgttggccaggtggtttgtgtctatctagatccataggggatcttgatgttggtgaatgcatcattgctgttcctcatgttaagcaagtgaagctttctaatgctggaggcagaattatcattgcaagcgatggtgtgtgggatgatttgacttgtgaaatggctcttgattgttcccgtgggttctcatcagatgtagctgccaatcgaattgttaatgaagcaacccggcctcgtggaatcagggatgatactacttgcatcgtaatcgacattctaccaccagaaaatatagtcccgagtcctcgtaagagaccccgcaggattacattcaataatgtgtttcgcaaaagacatctagacgtcccccccgaaacaaatagatcagaatatgctgaaccggatgtggtggaagaaatatttgaagatggctctccgatgctttctaaaaggctaactaccggatatacacttgagaaaacttttgcaccctccagttgtgcagtttgtctggtacggttgaaatctggacagggaatttcagtgcatgataacccattgcaatatgagaaactacaaggttggcagggtcctttcctgtgcccgagctgtcatgaaaagaaagaagcaatggaagggaaacgccggccaaaaggatcttcatcaaacgtctttggtcacatgtgctaggcctgcctaccactaaagattcttttattgattgttagctggaaataatagtcagcccataacaattcattggctagaattgaccgtttcagttgagtaagacggaatattcttgacaaacagcctggagatttattcatcagtttgagtagagcataggaaaacccatcttattttttcgaaggactacggctgtgtccgcatctaggcatttcactgtacagactcttgcttgtatagagatcttctaaatgatcattagtcttcctgt

SEQ ID NO: 13616 - protein, 449 aa, Zea mays subsp. mays
  peptide (1)..(449): Ceres Seq. ID no. 12342502
HLTEEGRGFLEEGTRPRPMAMALSPGTVPLGVLLRREVTKERMERPDVLCGEANLSRKGEDFTLLRADAGQRIPGDPSTSFSVFAIFDGHNGSGAAIYARENLLKNVLRAIPTCFCREEWLAVLPRALVAAFVKTDKDFQAVDETSGTTVTFVIIDEWVVTVASVGDSRCILESADGSIYFLSADHRFDSNPDEVKRVTACGSKVGKMDIVGGPEVGPLRCWPGGLCLSRSIGDLDVGECIIAVPHVKQVKLSNAGGRIIIASDGVWDDLTCEMALDCSRGFSSDVAANRIVNEATRPRGIRDDTTCIVIDILPPENIVPSPRKRPRRITFNNVFRKRHLDVPPETNRSEYAEPDVVEEIFEDGSPMLSKRLTTGYTLEKTFAPSSCAVCLVRLKSGQGISVHDNPLQYEKLQGWQGPFLCPSCHEKKEAMEGKRRPKGSSSNVFGHMC

SEQ ID NO: 13617 - protein, 431 aa, Zea mays subsp. mays
  peptide (1)..(431): Ceres Seq. ID no. 12342503
MAMALSPGTVPLGVLLRREVTKERMERPDVLCGEANLSRKGEDFTLLRADAGQRIPGDPSTSFSVFAIFDGHNGSGAAIYARENLLKNVLRAIPTCFCREEWLAVLPRALVAAFVKTDKDFQAVDETSGTTVTFVIIDEWVVTVASVGDSRCILESADGSIYFLSADHRFDSNPDEVKRVTACGSKVGKMDIVGGPEVGPLRCWPGGLCLSRSIGDLDVGECIIAVPHVKQVKLSNAGGRIIIASDGVWDDLTCEMALDCSRGFSSDVAANRIVNEATRPRGIRDDTTCIVIDILPPENIVPSPRKRPRRITFNNVFRKRHLDVPPETNRSEYAEPDVVEEIFEDGSPMLSKRLTTGYTLEKTFAPSSCAVCLVRLKSGQGISVHDNPLQYEKLQGWQGPFLCPSCHEKKEAMEGKRRPKGSSSNVFGHMC

SEQ ID NO: 13618 - protein, 429 aa, Zea mays subsp. mays
  peptide (1)..(429): Ceres Seq. ID no. 12342504
MALSPGTVPLGVLLRREVTKERMERPDVLCGEANLSRKGEDFTLLRADAGQRIPGDPSTSFSVFAIFDGHNGSGAAIYARENLLKNVLRAIPTCFCREEWLAVLPRALVAAFVKTDKDFQAVDETSGTTVTFVIIDEWVVTVASVGDSRCILESADGSIYFLSADHRFDSNPDEVKRVTACGSKVGKMDIVGGPEVGPLRCWPGGLCLSRSIGDLDVGECIIAVPHVKQVKLSNAGGRIIIASDGVWDDLTCEMALDCSRGFSSDVAANRIVNEATRPRGIRDDTTCIVIDILPPENIVPSPRKRPRRITFNNVFRKRHLDVPPETNRSEYAEPDVVEEIFEDGSPMLSKRLTTGYTLEKTFAPSSCAVCLVRLKSGQGISVHDNPLQYEKLQGWQGPFLCPSCHEKKEAMEGKRRPKGSSSNVFGHMC

SEQ ID NO: 13619 - DNA, 1100 bp, Zea mays subsp. mays; identical to SEQ ID NO: 4191
  misc_feature (1)..(1100): Ceres Seq. ID no. 13571176
  misc_feature (1)..(1100): Ortholog of  Ceres SEQ ID NO 15180167 as cited in SEQ ID NO 0

SEQ ID NO: 13620 - protein, 182 aa, Zea mays subsp. mays; identical to SEQ ID NO: 4192
  peptide (1)..(182): Ceres Seq. ID no. 13571177
  misc_feature (91)..(91): Xaa is any aa, unknown or other
  misc_feature (104)..(104): Xaa is any aa, unknown or other
  misc_feature (182)..(182): Xaa is any aa, unknown or other

SEQ ID NO: 13621 - protein, 131 aa, Zea mays subsp. mays; identical to SEQ ID NO: 4193
  peptide (1)..(131): Ceres Seq. ID no. 13571178
  misc_feature (40)..(40): Xaa is any aa, unknown or other
  misc_feature (53)..(53): Xaa is any aa, unknown or other
  misc_feature (131)..(131): Xaa is any aa, unknown or other

SEQ ID NO: 13622 - protein, 120 aa, Zea mays subsp. mays; identical to SEQ ID NO: 4194
  peptide (1)..(120): Ceres Seq. ID no. 13571179
  misc_feature (29)..(29): Xaa is any aa, unknown or other
  misc_feature (42)..(42): Xaa is any aa, unknown or other
  misc_feature (120)..(120): Xaa is any aa, unknown or other

SEQ ID NO: 13623 - DNA, 1544 bp, Zea mays subsp. mays
  misc_feature (1)..(1544): Ceres Seq. ID no. 12373997
  misc_feature (1)..(1544): Ortholog of  Ceres SEQ ID NO 15174197 as cited in SEQ ID NO 61885
tctatgatgcagtgtagtgataagttgggcctgagtctcgagttgggttcttttgcagctggagtaatgatatcaacaacagaccttgcacaacatactcttgaacaagtaactttttacatgtaccttgcatgttttttctgtcccctttccaggaaaaggggggaattactatctactaccccctctttcaaaccacaggccactttagctttgttctaagtcaaacatctttgactttggccaaatattaaaaatacatcaacaaatgcacaaggcacgtttcatggataatttaatgaaatcaatttgatgttggagcattttctgtaaaccttgtgaaagttagagaagtttgacttatgagattgctgaattgatctataatttggaacggagaaagtctttagtttgatctttattttatgcttgagcaaactcatagctagactcttgtagttagtaattcattatattgttctcttatttcaggcttgttctttctgcagatcgaacccatccgcaactttttcgctgctcttttccttgccagcattgggatgctaattaatgtccatttcttgtggaaccatgtggatatactccttgcagcagtaattttggtgatcaccgtaaagacctttattgttgctattgttgtaaaagggtttgggtatagcaacaaaacatctcttcttgtcggcatgtcacttgcacaaataggagagtttgcttttgttctcttaagccgtgcttcaagtattcatctaatcgagggcaagctatacctgcttcttcttggaaccactgcacttagtttggtgacaacccctctgctattcaaaatgatccctgcaatggtccacctcggggttcttttgagatggttttctgtcgataccaatcaggtggaggtacacgatcataccagttgagttcattgatggattgctttactctagaatgtttgccaatcaattcatcggttcttccttttcagctgggcctgaaaaatgatgtcctccgcatcgatagcggcaagcgcataaatctgatagtccaaggctcacatgactcatgacacatttgacacactgcaagctactttttgtatggcttaagtttacaagctctgtaaagtgttttcacctgtactgaagagtttctagcagatatacgagggtggaggcaagagaactcaactcagatcttgctcctagtgcaagatcaatcctcccccgtcatgacggctgcaagggcaaagtcgggttttgccgttcttgagagcagtgtgtcttggatgattggtgcagtgagtggctgtcgaccccaaatgagggtctcgtgtaacatatgaatgtatggtgattaattaattggattagcatgataggatgtaggcctgatcctcagtaaaggttatgcccttgtgttctttcaccaaagttgtgtatcctcactacacgaaagtgtgtacgacatccatcagatcacgaattttgttgtgtagccatatatgtcagtttcttaacatgtccaagttc

SEQ ID NO: 13624 - protein, 124 aa, Zea mays subsp. mays
  peptide (1)..(124): Ceres Seq. ID no. 12373998
MLINVHFLWNHVDILLAAVILVITVKTFIVAIVVKGFGYSNKTSLLVGMSLAQIGEFAFVLLSRASSIHLIEGKLYLLLLGTTALSLVTTPLLFKMIPAMVHLGVLLRWFSVDTNQVEVHDHTS

SEQ ID NO: 13625 - protein, 76 aa, Zea mays subsp. mays
  peptide (1)..(76): Ceres Seq. ID no. 12373999
MSLAQIGEFAFVLLSRASSIHLIEGKLYLLLLGTTALSLVTTPLLFKMIPAMVHLGVLLRWFSVDTNQVEVHDHTS

SEQ ID NO: 13626 - protein, 73 aa, Zea mays subsp. mays
  peptide (1)..(73): Ceres Seq. ID no. 12374000
SMMQCSDKLGLSLELGSFAAGVMISTTDLAQHTLEQVTFYMYLACFFCPLSRKRGELLSTTPSFKPQATLALF

SEQ ID NO: 13627 - DNA, 1052 bp, Zea mays subsp. mays; identical to SEQ ID NO: 2738
  misc_feature (1)..(1052): Ceres Seq. ID no. 12340741
  misc_feature (1)..(1052): Ortholog of  Ceres SEQ ID NO 15171235 as cited in SEQ ID NO 52469
  misc_feature (1)..(1052): Ortholog of  Ceres SEQ ID NO 15172705 as cited in SEQ ID NO 56069
  misc_feature (1)..(1052): Ortholog of  Ceres SEQ ID NO 12627215 as cited in SEQ ID NO 60976
  misc_feature (1)..(1052): Ortholog of  Ceres SEQ ID NO 13654980 as cited in SEQ ID NO 63094
  misc_feature (1)..(1052): Ortholog of  Ceres SEQ ID NO 15178542 as cited in SEQ ID NO 65410
  misc_feature (1)..(1052): Ortholog of  Ceres SEQ ID NO 15174852 as cited in SEQ ID NO 67166
  misc_feature (1)..(1052): Ortholog of  Ceres SEQ ID NO 12589584 as cited in SEQ ID NO 0
  misc_feature (1)..(1052): Ortholog of  Ceres SEQ ID NO 12635657 as cited in SEQ ID NO 0
  misc_feature (1)..(1052): Ortholog of  Ceres SEQ ID NO 12635879 as cited in SEQ ID NO 0
  misc_feature (1)..(1052): Ortholog of  Ceres SEQ ID NO 13599649 as cited in SEQ ID NO 0
  misc_feature (1)..(1052): Ortholog of  Ceres SEQ ID NO 14309205 as cited in SEQ ID NO 0
  misc_feature (1)..(1052): Ortholog of  Ceres SEQ ID NO 14309404 as cited in SEQ ID NO 0
  misc_feature (1)..(1052): Ortholog of  Ceres SEQ ID NO 15177492 as cited in SEQ ID NO 0

SEQ ID NO: 13628 - protein, 172 aa, Zea mays subsp. mays; identical to SEQ ID NO: 2739
  peptide (1)..(172): Ceres Seq. ID no. 12340742

SEQ ID NO: 13629 - protein, 163 aa, Zea mays subsp. mays; identical to SEQ ID NO: 2740
  peptide (1)..(163): Ceres Seq. ID no. 12340743

SEQ ID NO: 13630 - protein, 151 aa, Zea mays subsp. mays; identical to SEQ ID NO: 2741
  peptide (1)..(151): Ceres Seq. ID no. 12340744

SEQ ID NO: 13631 - DNA, 1395 bp, Zea mays subsp. mays
  misc_feature (1)..(1395): Ceres Seq. ID no. 12342650
  misc_feature (1)..(1395): Ortholog of  Ceres SEQ ID NO 13595509 as cited in SEQ ID NO 59833
gctagggttacgcgtccacggcgacgacctctgcgcagagcgtgctgcgattggccggccttcctgggatcctccccgcgcccgacacccggaaacgcgcgcgcgcgcgagggagagacagagtgaggaaacgagggaaggagacgacgcgctcgcctattggccgccggctccgctccttcgcgcccagtgcgacggccacggcctgagcggcgctgccagcaaggcggctagtatgagcagcatggagtcgcggccgggccgaacgaacctggtggagcccatagggcacggcgccgcgctgccgtccggcggccaggcagtgcagccgtggtggacgagctccggggctgtgctcggtgcagtctcgccagccgtcgtggcggtggcgcccgggagcgggacggggattagcctgtcgagcagcccggcaggtggtagtggtggtggcggcgcggctaaaggagccgcgagtgacgagagcagcgaggattcacggagatctggggaaccaaaagatggaagcgctagtcaagaaaagaaccatgccacatcgcagatacccgctctggcgccagagtatttggcaccatactcgcagctggaactgaaccaatcaattgcttctgcagcatatcagtacccagatccttactatgcaggcatggttgctccctatggaagtcatgctgtggctcattttcagctacctggactaactcaatctcgaatgccattacctcttgaagtatccgaggagcctgtttatgtaaatgccaagcagtaccatggtatcttaagacgacggcagtcccgtgctaaggctgaacttgagaaaaaggtggtcaaagccagaaagccataccttcacgagtctcgtcatcagcacgcgatgaggagggcaagaggaaacgggggacgcttcctgaacacaaagaaaagtgacagtggtgctcccaatggaggcgaaaacgccgagcatctccatgtccctcccgacttactacagctacgacagaacgaggcttgaagtagcggtatggctctggcatccttgaacagcagttcctgtccacgggcgtaggcattcgagaccggattcatatagctctccacagcatacgcgcagccatctctgcggtaacgcacgttctcctgaacgagctttgtagcgagataggtatgcaagtgcaatctgggcgcaggaatccatcatcaagtgcccaatgcccatggggtaggtacgctgtttcaggcaattcattcttggctttcacgttccacccttgtgtaactggtgtgttgtaaatgtgtggaaaactaagcttgtgctctgtatcgggccgttcagcggaactgcaaaacgcctgtataattaagatcgaactttggatt

SEQ ID NO: 13632 - protein, 342 aa, Zea mays subsp. mays
  peptide (1)..(342): Ceres Seq. ID no. 12342651
LGLRVHGDDLCAERAAIGRPSWDPPRARHPETRARARERQSEETREGDDALAYWPPAPLLRAQCDGHGLSGAASKAASMSSMESRPGRTNLVEPIGHGAALPSGGQAVQPWWTSSGAVLGAVSPAVVAVAPGSGTGISLSSSPAGGSGGGGAAKGAASDESSEDSRRSGEPKDGSASQEKNHATSQIPALAPEYLAPYSQLELNQSIASAAYQYPDPYYAGMVAPYGSHAVAHFQLPGLTQSRMPLPLEVSEEPVYVNAKQYHGILRRRQSRAKAELEKKVVKARKPYLHESRHQHAMRRARGNGGRFLNTKKSDSGAPNGGENAEHLHVPPDLLQLRQNEA

SEQ ID NO: 13633 - protein, 264 aa, Zea mays subsp. mays; identical to SEQ ID NO: 5106
  peptide (1)..(264): Ceres Seq. ID no. 12342652

SEQ ID NO: 13634 - protein, 261 aa, Zea mays subsp. mays; identical to SEQ ID NO: 5107
  peptide (1)..(261): Ceres Seq. ID no. 12342653

SEQ ID NO: 13635 - DNA, 1054 bp, Zea mays subsp. mays
  misc_feature (1)..(1054): Ceres Seq. ID no. 12349863
  misc_feature (1)..(1054): Ortholog of  Ceres SEQ ID NO 12627129 as cited in SEQ ID NO 68657
  misc_feature (1)..(1054): Ortholog of  Ceres SEQ ID NO 15179538 as cited in SEQ ID NO 0
agttcagattccgcaaaacaggcagtcaggctcaggcaccaacaccaaccatggcctccgctgcgacacctgcgcctttgctccccgtgaccagcacggctgccggcggcggctccgcgccgtcctccgccacgggcctctccgacgcggcgctcgccacgccggccttccgcctcttcgtgagccggctggccgagacggcgcggcgctcgctcgcggaccggcgcccatggacggagctgctggaccgatcggctttctcccgccccgactccctctccgaggccacctcgcgcctgcgccgcaacctcggctacttccgcgtcaactacgccgccgtcgtcgccttctccctcgcggcctcgctcctggcgcaccctttctccctcctcgtcctcctcagcatcctcggcgcctggtgcttcctctacgtcttccgcgcccccgaccagctcgtcgtgctcttcggccgcaccttcaccgaccgcgagacgctgcttggccttaccgtcgcttctgtgctcgccttcttcctcacctccgtggcttcgctcatcatctccgggctgcttgtcgggggcgccattgtcgcagcgcacggcgcctgccgcattccagaggacctcttccttgatgatccgagcgctgcgtccagtggaaacaccaccagcaggctgatctccttccttgcgtcgcccggatctggggtttgatgcatcaaggaccggtaggaaattcttgtgctcggcgaattcagttgaagtcaaatagagatctgatccagaagctgtataaaccagctccttgctcatgtggtacctcacctgcgagtagcattgtataagtggatccgatttttctgttctactttgtgtggaattacgcaaggatctgcaattgctgtacttctcttgcacttcaccagatctggtgacaatgaccattaagcattgtcaaatgccaacatgtatcggtgtgatctttacattcatcattcatgtgtacaactctacatcatgacaaatttttatggatctctggttatttttgcctc

SEQ ID NO: 13636 - protein, 236 aa, Zea mays subsp. mays
  peptide (1)..(236): Ceres Seq. ID no. 12349864
FRFRKTGSQAQAPTPTMASAATPAPLLPVTSTAAGGGSAPSSATGLSDAALATPAFRLFVSRLAETARRSLADRRPWTELLDRSAFSRPDSLSEATSRLRRNLGYFRVNYAAVVAFSLAASLLAHPFSLLVLLSILGAWCFLYVFRAPDQLVVLFGRTFTDRETLLGLTVASVLAFFLTSVASLIISGLLVGGAIVAAHGACRIPEDLFLDDPSAASSGNTTSRLISFLASPGSGV

SEQ ID NO: 13637 - protein, 220 aa, Zea mays subsp. mays
  peptide (1)..(220): Ceres Seq. ID no. 12349865
MASAATPAPLLPVTSTAAGGGSAPSSATGLSDAALATPAFRLFVSRLAETARRSLADRRPWTELLDRSAFSRPDSLSEATSRLRRNLGYFRVNYAAVVAFSLAASLLAHPFSLLVLLSILGAWCFLYVFRAPDQLVVLFGRTFTDRETLLGLTVASVLAFFLTSVASLIISGLLVGGAIVAAHGACRIPEDLFLDDPSAASSGNTTSRLISFLASPGSGV

SEQ ID NO: 13638 - protein, 210 aa, Zea mays subsp. mays
  peptide (1)..(210): Ceres Seq. ID no. 12349866
VQIPQNRQSGSGTNTNHGLRCDTCAFAPRDQHGCRRRLRAVLRHGPLRRGARHAGLPPLREPAGRDGAALARGPAPMDGAAGPIGFLPPRLPLRGHLAPAPQPRLLPRQLRRRRRLLPRGLAPGAPFLPPRPPQHPRRLVLPLRLPRPRPARRALRPHLHRPRDAAWPYRRFCARLLPHLRGFAHHLRAACRGRHCRSARRLPHSRGPLP

SEQ ID NO: 13639 - DNA, 1831 bp, Zea mays subsp. mays
  misc_feature (1)..(1831): Ceres Seq. ID no. 12411187
  misc_feature (1)..(1831): Ortholog of  Ceres SEQ ID NO 15173519 as cited in SEQ ID NO 61854
atccggttcggttccgtcgtccactctcgttccccagttcgctggaccatctcaaaatcctatcctcctctccttccctccgtatctcatccggccgattcgaatctccggtcccatcctctacggcttcaccccgcgcccaatccagtctgtacgtgaatcttgacaggggagagaagaatcggataaggagacctgcaccttcctccgagcaaagcaggagaggaaacaagaatagaggaggagatggccatgcccaccttacgccttgctcctgacctgccgcccgtatcccgcctctgcttcgggacaatgacgatgggagagcagagcggggcggcgtgctcgctccgcctcctcgacgccgcctacgacgccggcgtcaacttcttcgactccgcagagatgtaggctcacctgctccctcatctccctgcctcggttcgagagtaatgaaaggaaaggtgtctggaactctggatgcacatctgcaaacatgtttactcgtcaggtacccagtcccacagcgcagtgagacgcgcgggcgtagcgaggagctcctcggccgctggttgcgggcccgccgggccccacgggacagcgtcgtcgtcgcaaccaaagtcgcggggccttcagggcagatgacgtggattcgcggcgggccgacatctctcgattcacagaacatcgcagaggcaatcgatggctgtttgcgcaggctgggtgtggactacatcgacctctaccagatacactggccggatcggtatgttccaatgtttggggagacagagtatgatccgaactgccagtacacgtctgttccaatggaagagcaactggaggctctcggaagagcaatagatgctggcaaggtacattggccttagcaatgagacaccatatggtttgatgaaatttcttcagttgagtaaggattctcagttgcttccaaagctactgacactgcaggtaagtagcgcagtttgatctaatctgtagtactgtaatcgctctccatatttcttcacctgtgtttttgcagaactcgtataatttgttgtgccgaaattttgattctggattggcagaatgctgccatcatgagaggtatgcttgacacggtcagaagccctaactgttgtcttcagtgtctctaatcttctcatgtatggtcctggcatgagttggtaatgcatattggctttttcccctctatgactatgatacaacgatacatagctctcctgcatgttcgaaaaaatattgacatctgtttagtttaaagaagaatggcattgtcatatcgtatttgctcttggttaagatattttccaaattgtattctgttttgactcaatttatacaattgtttttcttctgaacttccattgttgaactatggcatttgcagaattagccttgctggcttatagcccaatggcaatgggtatactttcaggaaagtatcacttatctgataactgtggtccgccagacgcaagaatgaatcttttcaaagggagatactctgaaggtgaatcccggtacaaactgcagagccccaaagtgaaagcagctgtgaaggaatacacacaaatttctgcaaagtatggcatttctccagtgaccttagcgattgcatttgtcttgagacatccacttgtggcatcggctgttttcggtgcgactaaattgtggcagcttgatgaagttcttcaggcaactacagtccatctttgtgaggaaattgttgctgagatcaatgatgtacatgcaagataccctaacccttgcccataaaattttgcaaaaaaatctttatttagcc

SEQ ID NO: 13640 - protein, 145 aa, Zea mays subsp. mays
  peptide (1)..(145): Ceres Seq. ID no. 12411188
MKGKVSGTLDAHLQTCLLVRYPVPQRSETRGRSEELLGRWLRARRAPRDSVVVATKVAGPSGQMTWIRGGPTSLDSQNIAEAIDGCLRRLGVDYIDLYQIHWPDRYVPMFGETEYDPNCQYTSVPMEEQLEALGRAIDAGKVHWP

SEQ ID NO: 13641 - protein, 133 aa, Zea mays subsp. mays
  peptide (1)..(133): Ceres Seq. ID no. 12411189
MAFAELALLAYSPMAMGILSGKYHLSDNCGPPDARMNLFKGRYSEGESRYKLQSPKVKAAVKEYTQISAKYGISPVTLAIAFVLRHPLVASAVFGATKLWQLDEVLQATTVHLCEEIVAEINDVHARYPNPCP

SEQ ID NO: 13642 - protein, 120 aa, Zea mays subsp. mays
  peptide (1)..(120): Ceres Seq. ID no. 12411190
MAMGILSGKYHLSDNCGPPDARMNLFKGRYSEGESRYKLQSPKVKAAVKEYTQISAKYGISPVTLAIAFVLRHPLVASAVFGATKLWQLDEVLQATTVHLCEEIVAEINDVHARYPNPCP

SEQ ID NO: 13643 - DNA, 1342 bp, Zea mays subsp. mays; identical to SEQ ID NO: 8474
  misc_feature (1)..(1342): Ceres Seq. ID no. 12546334
  misc_feature (1)..(1342): Ortholog of  Ceres SEQ ID NO 15175048 as cited in SEQ ID NO 59975
  misc_feature (1)..(1342): Ortholog of  Ceres SEQ ID NO 14303542 as cited in SEQ ID NO 63539
  misc_feature (1)..(1342): Ortholog of  Ceres SEQ ID NO 13597333 as cited in SEQ ID NO 63974
  misc_feature (1)..(1342): Ortholog of  Ceres SEQ ID NO 12407937 as cited in SEQ ID NO 0
  misc_feature (1)..(1342): Ortholog of  Ceres SEQ ID NO 13599307 as cited in SEQ ID NO 0

SEQ ID NO: 13644 - protein, 348 aa, Zea mays subsp. mays; identical to SEQ ID NO: 8475
  peptide (1)..(348): Ceres Seq. ID no. 12546335

SEQ ID NO: 13645 - protein, 302 aa, Zea mays subsp. mays; identical to SEQ ID NO: 8476
  peptide (1)..(302): Ceres Seq. ID no. 12546336

SEQ ID NO: 13646 - protein, 223 aa, Zea mays subsp. mays; identical to SEQ ID NO: 8477
  peptide (1)..(223): Ceres Seq. ID no. 12546337

SEQ ID NO: 13647 - DNA, 1933 bp, Zea mays subsp. mays
  misc_feature (1)..(1933): Ceres Seq. ID no. 12454974
  misc_feature (1)..(1933): Ortholog of  Ceres SEQ ID NO 15170659 as cited in SEQ ID NO 67270
  misc_feature (1)..(1933): Ortholog of  Ceres SEQ ID NO 15177722 as cited in SEQ ID NO 0
ccccattgccgcattgctctccctcggctcggtccctctccggctctccctcacggcctcgcccactgcgccttcgaggagctccgaatcccgatcgcctcggtccccgcgagctcacatggtgggggcgcgcaccagaggctagggttcccagttcccatcattctcctgctgattaaaaccgtggggttttggagagcctgaggctgtggcggcggcaggaatgaacggggaggtggaatgcagcgtgtgccatgcgaaggtgccggtgccgccgccggtgtcgaaagcgtacgacagccaccggagcactgtgtcgtcgcggcaacgtgcgctaaacgtgctcctcgtctccggcgactgcgtccttgccggcctccagcctatattagtgtacatctcaaaagtggatgggaaattcaaatttagcccaatcagcgtgaatttcttgacagagattacaaaaattatgtttaccattgtaatgctattcatccaggctagacgtctaaaggtgggagacaagccactttttacagtttcaatatttatgcaggctgctcgcaataatgttcttctttcagtacctgcttttctctatgctatcaacaactatttgaagttcataatgcagttatattttaatcctgctagcgtgaaaatgctgagtaatctcaaggttctggtaatcgcagtgcttcttaagatgataatgaggaggcgattttccgtaatccagtgggaggcccttgcccttttgttaatcggaatatctgttaatcagctgaaatcattgccagaaggttctagtgtgctaggtcttcctgttgcagctggagcctacctatatacattgttttttgtaacagttcccgcattggcttcagtttacaacgaaaaggctcttaaaagccagtttgataccagtatttaccttcagaacttgtttctgtatggttatggtgcgatatttaactttattgggcttgttgtcactgctatcatccaagggcccagtagttttaacattctagaaggccactcaaaggccacgatgtttcttatctgcaacaatgctgcacagggcatattatcatcatttttcttcaagtatgcagatacaattttgaagaagtactcatcaacaattgcgactatcttcaccggagtagcctctgctgtgctgtttggccacacactgacgataaattttgttcttggaatttcaatagtaatcatatctatgcatcagtatctttctaaccaaattaaggacgaagtgcctagcagcaaagttgaaatggctgaagctcatgatcacagcagaaaagaacctagttatgtcaacgtgcctgattcaggggcaagtgagtctaaacaccgccatggatctgacgagaggcagccacttcttcccgtatgattttgtagaagaggcgcactgtttcctcaacagagcagcatgtaaagagagtatttttagcgggtatttgacctaattgtctctgaagcaacattggtgccatgctgttggcggggtaaagtatatgcatattcggcggcagtgacgagcttcgtgaagtacactaatagagtaatggtctttggatgaatgagtcgatacctttagcctaatgggtggtaaaactagtgtgataagatcagcgaggaataaagtcaccaccattttttcctgtcttgtgagttggtgagttgatattgatacagccatcagccgtggttctactctctctctctctttctcgcggcaccatgtaaatagaaatatcagttcatttctgatggcgcgtgccacggtgccaaccagagattttattcttgtatgtgcgtgttgcatgagagatactacggcgtgtttactgatcactgagctttgcatgtcttctgaattacagcaaaacgcctaattggc

SEQ ID NO: 13648 - protein, 399 aa, Zea mays subsp. mays
  peptide (1)..(399): Ceres Seq. ID no. 12454975
MNGEVECSVCHAKVPVPPPVSKAYDSHRSTVSSRQRALNVLLVSGDCVLAGLQPILVYISKVDGKFKFSPISVNFLTEITKIMFTIVMLFIQARRLKVGDKPLFTVSIFMQAARNNVLLSVPAFLYAINNYLKFIMQLYFNPASVKMLSNLKVLVIAVLLKMIMRRRFSVIQWEALALLLIGISVNQLKSLPEGSSVLGLPVAAGAYLYTLFFVTVPALASVYNEKALKSQFDTSIYLQNLFLYGYGAIFNFIGLVVTAIIQGPSSFNILEGHSKATMFLICNNAAQGILSSFFFKYADTILKKYSSTIATIFTGVASAVLFGHTLTINFVLGISIVIISMHQYLSNQIKDEVPSSKVEMAEAHDHSRKEPSYVNVPDSGASESKHRHGSDERQPLLPV

SEQ ID NO: 13649 - protein, 317 aa, Zea mays subsp. mays
  peptide (1)..(317): Ceres Seq. ID no. 12454976
MFTIVMLFIQARRLKVGDKPLFTVSIFMQAARNNVLLSVPAFLYAINNYLKFIMQLYFNPASVKMLSNLKVLVIAVLLKMIMRRRFSVIQWEALALLLIGISVNQLKSLPEGSSVLGLPVAAGAYLYTLFFVTVPALASVYNEKALKSQFDTSIYLQNLFLYGYGAIFNFIGLVVTAIIQGPSSFNILEGHSKATMFLICNNAAQGILSSFFFKYADTILKKYSSTIATIFTGVASAVLFGHTLTINFVLGISIVIISMHQYLSNQIKDEVPSSKVEMAEAHDHSRKEPSYVNVPDSGASESKHRHGSDERQPLLPV

SEQ ID NO: 13650 - protein, 312 aa, Zea mays subsp. mays
  peptide (1)..(312): Ceres Seq. ID no. 12454977
MLFIQARRLKVGDKPLFTVSIFMQAARNNVLLSVPAFLYAINNYLKFIMQLYFNPASVKMLSNLKVLVIAVLLKMIMRRRFSVIQWEALALLLIGISVNQLKSLPEGSSVLGLPVAAGAYLYTLFFVTVPALASVYNEKALKSQFDTSIYLQNLFLYGYGAIFNFIGLVVTAIIQGPSSFNILEGHSKATMFLICNNAAQGILSSFFFKYADTILKKYSSTIATIFTGVASAVLFGHTLTINFVLGISIVIISMHQYLSNQIKDEVPSSKVEMAEAHDHSRKEPSYVNVPDSGASESKHRHGSDERQPLLPV

SEQ ID NO: 13651 - DNA, 463 bp, Zea mays subsp. mays
  misc_feature (1)..(463): Ceres Seq. ID no. 2871588
  misc_feature (1)..(463): Ortholog of  Ceres SEQ ID NO 13654409 as cited in SEQ ID NO 68534
gtgactcgagccgttggagatccacactttcctccctccatcgtttctcgatctctcgaccgggcgagggcgacgccgcccgcgcgcgcgccatggatgtggagtacgacgtgatcgtgctgggcaccgggctcaaggagtgcatcctcagcggcctcctctctgtggaccgcctcaaggtgttgcacatggacaggaatgactactacggcggagactccacatcgctcaatctcaatcagctctggaaacggttcaagggtgaagaaacaccgcctgcgcacataggagctagcagagactacaacgttgatatggttccaaagtttatgatggcaaatggtaccttggttcgtgtgctcattcatactggtgtcaccaagtacatgtccttcaaagctgtggatggaagctatgttttcaaacaagggaaagatccacaaggttccttctactgacatgg

SEQ ID NO: 13652 - protein, 151 aa, Zea mays subsp. mays
  peptide (1)..(151): Ceres Seq. ID no. 2871589
DSSRWRSTLSSLHRFSISRPGEGDAARARAMDVEYDVIVLGTGLKECILSGLLSVDRLKVLHMDRNDYYGGDSTSLNLNQLWKRFKGEETPPAHIGASRDYNVDMVPKFMMANGTLVRVLIHTGVTKYMSFKAVDGSYVFKQGKDPQGSFY

SEQ ID NO: 13653 - protein, 121 aa, Zea mays subsp. mays
  peptide (1)..(121): Ceres Seq. ID no. 2871590
MDVEYDVIVLGTGLKECILSGLLSVDRLKVLHMDRNDYYGGDSTSLNLNQLWKRFKGEETPPAHIGASRDYNVDMVPKFMMANGTLVRVLIHTGVTKYMSFKAVDGSYVFKQGKDPQGSFY

SEQ ID NO: 13654 - protein, 89 aa, Zea mays subsp. mays
  peptide (1)..(89): Ceres Seq. ID no. 2871591
MDRNDYYGGDSTSLNLNQLWKRFKGEETPPAHIGASRDYNVDMVPKFMMANGTLVRVLIHTGVTKYMSFKAVDGSYVFKQGKDPQGSFY

SEQ ID NO: 13655 - DNA, 739 bp, Zea mays subsp. mays
  misc_feature (1)..(739): Ceres Seq. ID no. 12376756
  misc_feature (1)..(739): Ortholog of  Ceres SEQ ID NO 15169545 as cited in SEQ ID NO 67456
aaaccgagcgtacgccatggatcgcgagtggggctccaagcccggcagcggcggtgccgcctccgcccagaatgaggctattgaccggcgggagcgtctccgccgcctggccctcgagaccatcgacctcgccaaggatccctatttcatgcgcaaccacctcggcagctatgagtgcaagctgtgcctgacgctgcacaacaacgaggggaactacctagcccacacgcaagggaagaggcaccataccaacctcgccaagcgcgccgcccgagaggccaaggatgcgcccgcgcagccccagcccaacaagcgcaagcttgtcctgacgttcttatggatcctgaagggtcttctcgaggtggtctgcacatttggaagcatggtgtttgcaagcatccttcttgttcgtggtatatggtctggggtgacatacatcagagaaaaccgttacagctatattcaccggatcgacaacgatgagaaccgatggagcagagtccagactgctggttaatattttgctttccttatctatgaacagacacactctgcgttgataggctgtatagtacaaaaagaaaagatatggtcagcaagtgcnaactatgatgattgccattgctagacctcgcggctaaggctgtctctagcagtaagcctctctctagcagcgtgcgttatattaatcttctagaccccgtggttaaggctgcctctancagcgttatcttttttg

SEQ ID NO: 13656 - protein, 171 aa, Zea mays subsp. mays
  peptide (1)..(171): Ceres Seq. ID no. 12376757
NRAYAMDREWGSKPGSGGAASAQNEAIDRRERLRRLALETIDLAKDPYFMRNHLGSYECKLCLTLHNNEGNYLAHTQGKRHHTNLAKRAAREAKDAPAQPQPNKRKLVLTFLWILKGLLEVVCTFGSMVFASILLVRGIWSGVTYIRENRYSYIHRIDNDENRWSRVQTAG

SEQ ID NO: 13657 - protein, 166 aa, Zea mays subsp. mays
  peptide (1)..(166): Ceres Seq. ID no. 12376758
MDREWGSKPGSGGAASAQNEAIDRRERLRRLALETIDLAKDPYFMRNHLGSYECKLCLTLHNNEGNYLAHTQGKRHHTNLAKRAAREAKDAPAQPQPNKRKLVLTFLWILKGLLEVVCTFGSMVFASILLVRGIWSGVTYIRENRYSYIHRIDNDENRWSRVQTAG

SEQ ID NO: 13658 - protein, 122 aa, Zea mays subsp. mays
  peptide (1)..(122): Ceres Seq. ID no. 12376759
MRNHLGSYECKLCLTLHNNEGNYLAHTQGKRHHTNLAKRAAREAKDAPAQPQPNKRKLVLTFLWILKGLLEVVCTFGSMVFASILLVRGIWSGVTYIRENRYSYIHRIDNDENRWSRVQTAG

SEQ ID NO: 13659 - DNA, 2245 bp, Zea mays subsp. mays
  misc_feature (1)..(2245): Ceres Seq. ID no. 12455032
  misc_feature (1)..(2245): Ortholog of  Ceres SEQ ID NO 15174591 as cited in SEQ ID NO 53383
  misc_feature (1)..(2245): Ortholog of  Ceres SEQ ID NO 14310784 as cited in SEQ ID NO 58503
  misc_feature (1)..(2245): Ortholog of  Ceres SEQ ID NO 14312180 as cited in SEQ ID NO 59480
actgccagtgccatcccattcccatccgagctgcagcgctcgacgacggggagaatagcgtggcgtgggcggcgccatgaagtacagcaaggaagataagcccgagagggcgggcggcgccggcgcagggtccagggcggtgccggtggcgctcgtcgtcgtcgtgctctgcgccttctccttctacctgggcggcatctacagcacgggacggagcctgctggactccatccagccggcgccgacggctctcctcgccctcggcgccgccacgacgacccgccgtccctccgacgacggccaggctcggccggcactggcgtccacggccgccgtggcgttccccgagtgccccgccgattaccaggactacaccccctgcaccgaccccaagcgctggcggaggtacggcaactaccgcctgagcttcatggagcggcactgcccgccgccgcccgaccggcagcagtgcctggtgccgccgcccaaggggtacaagccgcccatccggtggcccaagagcaaggaccagtgctggtaccggaacgtcccctacgactggatcaacagccagaagtccaaccagcactggctcgtcaaggagggcgaccgcttccggttccccggcggcggcaccatgttccccaacggcgtgggcgcgtacgtggacctgatgcagggcctggtcccgggcatgcgcgacggcaccgtccgcaccgcgctcgacaccggctgcggcgtcgccagctggggcggcgacctgctggggcggggcatcctcaccgtgtcgctggcgcccagggacaaccacgaggcccaggtgcagttcgcgctggagcgcggcatcccggccatcctcggcatcatctccacgcagcgcctgccgttcccgtccgccgccttcgacatggcgcactgctcgcgctgcctcatcccctggaccgagttcggcagcctctacctcctggagatccaccgcgtcctccgcccgggcggcttctgggtgctctccggcccgcccgtcaactacgagaaccgctggcacggctggaacaccaccgcgcaggcgcagaaggccgacctggacaggctcaagaagatgctggccagcatgtgcttcaagctctacagcatgaagggggacatagccgtgtggcagaagtccgccgacgcctgctacgacaagctcaccccggtcaccacgcccgccaagtgcgacgacagcgtcgaccccgacgccgcctggtacgtgcccatgcgctcctgcgtcacggctcccagccccaagtacaggaagctggggctcaacgccacgcccaagtggccacagaggctcagcgtcgccccggagcgcatcagcgtcgtcccgggcagcagcgccgccgccttcaagcaggacgacgcccggtggaagctcagggccaagcactacaagacgctgctgccggcgctggggagcgacaagatcaggaacgtcatggacatgaacaccgtgtacggaggattcgcaggcagcctcatcaaggaccccgtctgggtcatgaacgtcgtctcctcctacggcccaaactccctcggcgtcgtctacgacagagggctcatcggcgtcaaccacgactggtgtgaggcgttctcgacatatccacgcacctatgacctgttgcatcttgatggcctgttcacagcagagtctcacaggtgcgagatgaagtacgtgctccttgagatggaccgtatccttcgtcccacgggctacgccataatccgggagagcacctacttcctcgattctgtggcacccattgccaaagggatgcgatggagctgcgagaagcacagcagcgagaacaaggccgacaaggacaagatcctcgtctgccagaaaaagctttgggcaggaaagcagtgacgagagaggatcatccttcttccttccgagtataaaaaagtaggcatccagatcagttgctgctgtggtctcgatcggccaacaaggcaagaggcgcttcagtacacatggaagatgagcgagtactttctgatacaagagtgttcgcagttattatcaaaataaataagccgagtaaaactccatataggatccaacagttaccatttttcattaatcacagtttaattctttttctgtaccgacagtttgtaggcaaggaatgggtcgattcatataccatggtgagcaaatgtaagtttactccacactagatgtgtatagcttggttggtgc

SEQ ID NO: 13660 - protein, 610 aa, Zea mays subsp. mays
  peptide (1)..(610): Ceres Seq. ID no. 12455033
MKYSKEDKPERAGGAGAGSRAVPVALVVVVLCAFSFYLGGIYSTGRSLLDSIQPAPTALLALGAATTTRRPSDDGQARPALASTAAVAFPECPADYQDYTPCTDPKRWRRYGNYRLSFMERHCPPPPDRQQCLVPPPKGYKPPIRWPKSKDQCWYRNVPYDWINSQKSNQHWLVKEGDRFRFPGGGTMFPNGVGAYVDLMQGLVPGMRDGTVRTALDTGCGVASWGGDLLGRGILTVSLAPRDNHEAQVQFALERGIPAILGIISTQRLPFPSAAFDMAHCSRCLIPWTEFGSLYLLEIHRVLRPGGFWVLSGPPVNYENRWHGWNTTAQAQKADLDRLKKMLASMCFKLYSMKGDIAVWQKSADACYDKLTPVTTPAKCDDSVDPDAAWYVPMRSCVTAPSPKYRKLGLNATPKWPQRLSVAPERISVVPGSSAAAFKQDDARWKLRAKHYKTLLPALGSDKIRNVMDMNTVYGGFAGSLIKDPVWVMNVVSSYGPNSLGVVYDRGLIGVNHDWCEAFSTYPRTYDLLHLDGLFTAESHRCEMKYVLLEMDRILRPTGYAIIRESTYFLDSVAPIAKGMRWSCEKHSSENKADKDKILVCQKKLWAGKQ

SEQ ID NO: 13661 - protein, 492 aa, Zea mays subsp. mays
  peptide (1)..(492): Ceres Seq. ID no. 12455034
MERHCPPPPDRQQCLVPPPKGYKPPIRWPKSKDQCWYRNVPYDWINSQKSNQHWLVKEGDRFRFPGGGTMFPNGVGAYVDLMQGLVPGMRDGTVRTALDTGCGVASWGGDLLGRGILTVSLAPRDNHEAQVQFALERGIPAILGIISTQRLPFPSAAFDMAHCSRCLIPWTEFGSLYLLEIHRVLRPGGFWVLSGPPVNYENRWHGWNTTAQAQKADLDRLKKMLASMCFKLYSMKGDIAVWQKSADACYDKLTPVTTPAKCDDSVDPDAAWYVPMRSCVTAPSPKYRKLGLNATPKWPQRLSVAPERISVVPGSSAAAFKQDDARWKLRAKHYKTLLPALGSDKIRNVMDMNTVYGGFAGSLIKDPVWVMNVVSSYGPNSLGVVYDRGLIGVNHDWCEAFSTYPRTYDLLHLDGLFTAESHRCEMKYVLLEMDRILRPTGYAIIRESTYFLDSVAPIAKGMRWSCEKHSSENKADKDKILVCQKKLWAGKQ

SEQ ID NO: 13662 - protein, 423 aa, Zea mays subsp. mays
  peptide (1)..(423): Ceres Seq. ID no. 12455035
MFPNGVGAYVDLMQGLVPGMRDGTVRTALDTGCGVASWGGDLLGRGILTVSLAPRDNHEAQVQFALERGIPAILGIISTQRLPFPSAAFDMAHCSRCLIPWTEFGSLYLLEIHRVLRPGGFWVLSGPPVNYENRWHGWNTTAQAQKADLDRLKKMLASMCFKLYSMKGDIAVWQKSADACYDKLTPVTTPAKCDDSVDPDAAWYVPMRSCVTAPSPKYRKLGLNATPKWPQRLSVAPERISVVPGSSAAAFKQDDARWKLRAKHYKTLLPALGSDKIRNVMDMNTVYGGFAGSLIKDPVWVMNVVSSYGPNSLGVVYDRGLIGVNHDWCEAFSTYPRTYDLLHLDGLFTAESHRCEMKYVLLEMDRILRPTGYAIIRESTYFLDSVAPIAKGMRWSCEKHSSENKADKDKILVCQKKLWAGKQ

SEQ ID NO: 13663 - DNA, 948 bp, Zea mays subsp. mays
  misc_feature (1)..(948): Ceres Seq. ID no. 13570435
  misc_feature (1)..(948): Ortholog of  Ceres SEQ ID NO 15180226 as cited in SEQ ID NO 0
gccgcacgaacgtgcatcctcctccttagagtcatctcctcccgagcggtgggttcggacgcgagccgcagcgacgtcgccgcggagggcctgggcgcggcttccgtgggcggttcgtgcgcgtccagcggcgtggtctcggttgagcggtcgacgacgaccaggcatcgcagccgtgaagagaagaaggccttggtggtggaggtggcggatcatgaatgcgacgacgacttgggcgccggcgagtctgacatctccgaggagctgggtgcgaaccatgaaggaaacagtactgaaggtggcatatcatcggtcgacagcgtttctagcttgctcagtgggataagctaccaagacgttagctctggctgtgcctaccgagcatcctctcatcatcaccatcagaggaggaggacatccgaagaaaagggtgcccagcaattgcgtccttccaaacccggtccaaaggcggagaaggtcggtctcagacatgangcggtggacggtcggagggccgctgaggagtggatggtcgactacgctctccggaaggaagtcaagaggctggctcgtgctcagaagaggaaagttgagatgcttgtccaggccttcgaatctgttctgcccncggtagcaatagcaagcgagaagaagcccgggcaacacgatggccttcgaaagcatgcatgtagctgacagatagatagatagaatcatagatagccgacactcatcttgagtcaggtagtagtaggacgtgacaatttgagtcaggtagatgaaacgtttcaattcagtcaaacactagtcacaacggatacaaggtttgatgctccaccaaccactgatccgttgtgaacttgtagtagaagcaggccaccgctggcaatgtggcatgccatgccatcaacctaacatggaccattntgaatgtcggctcaaaacgtg

SEQ ID NO: 13664 - protein, 231 aa, Zea mays subsp. mays
  peptide (1)..(231): Ceres Seq. ID no. 13570436
  misc_feature (165)..(165): Xaa is any aa, unknown or other
  misc_feature (210)..(210): Xaa is any aa, unknown or other
AARTCILLLRVISSRAVGSDASRSDVAAEGLGAASVGGSCASSGVVSVERSTTTRHRSREEKKALVVEVADHECDDDLGAGESDISEELGANHEGNSTEGGISSVDSVSSLLSGISYQDVSSGCAYRASSHHHHQRRRTSEEKGAQQLRPSKPGPKAEKVGLRHXAVDGRRAAEEWMVDYALRKEVKRLARAQKRKVEMLVQAFESVLPXVAIASEKKPGQHDGLRKHACS

SEQ ID NO: 13665 - DNA, 842 bp, Zea mays subsp. mays; identical to SEQ ID NO: 12153
  misc_feature (1)..(842): Ceres Seq. ID no. 12413106
  misc_feature (1)..(842): Ortholog of  Ceres SEQ ID NO 15179609 as cited in SEQ ID NO 0

SEQ ID NO: 13666 - protein, 228 aa, Zea mays subsp. mays; identical to SEQ ID NO: 12154
  peptide (1)..(228): Ceres Seq. ID no. 12413107

SEQ ID NO: 13667 - protein, 195 aa, Zea mays subsp. mays; identical to SEQ ID NO: 12155
  peptide (1)..(195): Ceres Seq. ID no. 12413108

SEQ ID NO: 13668 - protein, 138 aa, Zea mays subsp. mays; identical to SEQ ID NO: 12156
  peptide (1)..(138): Ceres Seq. ID no. 12413109

SEQ ID NO: 13669 - DNA, 2725 bp, Zea mays subsp. mays
  misc_feature (1)..(2725): Ceres Seq. ID no. 12436176
  misc_feature (1)..(2725): Ortholog of  Ceres SEQ ID NO 13595870 as cited in SEQ ID NO 62101
  misc_feature (1)..(2725): Ortholog of  Ceres SEQ ID NO 13590241 as cited in SEQ ID NO 63878
  misc_feature (1)..(2725): Ortholog of  Ceres SEQ ID NO 13657939 as cited in SEQ ID NO 66349
aaacaaaaaaaatctcagaacacacacacacacacacacctctatcgccccgacctcgacgcgacccctctcgcttggatccggacggcccggtccctccgccctcccatgcgcacggcgccgccgccgccgacatgacgctcgcctccctcgcccgcgccctcggccggtccgcgcgctcctcccgcccgcgccagggtttccagctcgggggcctccggcagccgcccgcgccaccgctaccgccgcctgtccacggcggtgagggtggggcggcaggatttgttcgcagctacctgactgcggtctcgtcggcagctcttcggaagccatccgcgggcaagaccgtggattggagatatgtcctcgccagcccacatttccgacgcctcttctcggacgggtccaagaagaactacgagaactattaccccaagggtaagaaggaggtgcctaaaggagatggtacaaacaagtctgaatctaagcaggaatccaatacagatgaaggatggaattttcaggataatgctatgaaacacatgcagaatttccttgcgcctttattgattcttggcctgatgctatcatccatgtcatctagctctgcagaccagaaggagataagcttccaagagttcaagaacaagttactagaacctggtttagttgatcgcattgttgtttcaaataaatcagtagcgaaggtctacatcaggaattcacctcatccaaagagccaaggccaagatagtgatatccatattactaccactgatgctccaggcaagcctgctcccagcagatgcaagtattacttcaatattggtagtgttgatttgtttgaagagaagttagaggaagcccaggaagctttgggaatagatccacatgattttgtcccagtaacttatgttgctgaagtaaattggttccaagaagttatgaggtttgccccaacagcattgattattggtctattatatttcacgggaaaaaggatgcagagtggtttcaatattggaggtggtgctggcaaaggaagaggaggtattttcaacattggaaaagctacagtgatgaagatggacaagaactccaaaaataaggtgtttttttaaggatgtagccggttgtgacgaagcaaaacaagaaataatggagtttgtgcatttccttaaaaaccctaagaagtatgaagatttgggagctaaaatacccaaaggtgctctacttgtaggccctcctgggacagggaagactttgctcgccaaagctacagcaggagagtctggtgtgccatttttgtctatttctggttcagatttcatggaaatgtttgttggtgttggaccgtccagggtacggaacttgttccaagaagctaggcagtgtgctcctagtattgtattcattgacgaaatcgatgctattggtcgtgcaagaggacgtggaggtttttcaggttcaaatgatgaacgtgagagtactttgaaccagctgcttgtagagatggatggatttggaacaacttctggtgttgttgttcttgctgggacaaatagacctgacatcctggataaggcattattaaggccaggaagatttgatcgccagatagcaattgacaaaccagatataaagggccgtgatcaaatattccgcatatatcttaaaaagcttaagttggacaacaaaccatcattttattcgcaaaggctagctgccttgacacctgggttcgcaggagctgacattgccaatgtttgtaatgaagctgctttaattgctgcgagaagtgaggaaactcagattaccatgcagcattttgagtccgcaattgataggattatcggtggtttggagaagaaaaatagggtcattagcaaactggagcgccgtactgttgcttaccatgaatctggacatgcagttgctggatggttcttggaacatgctgagcctcttctaaaagttacaattgttcctcgtggaacagctgctttaggctttgcacaatacgtcccaaatgaaaatcttttgatgacaaaagagcagctttttgatatgacatgcatgacattaggtggccgtgctgcagaggaggttttgattggcaaaatctcaactggtgctcagaatgacctggagaaagttaccaaaatgacatatgcacaggtcgccgtgtatggttttagtgaaaaggttgggcttctgtccttcccccagaaagatggtggtttcgaattgagcaagccttacagtaatcagacagcatccatcatcgacgatgaggtccgggaatgggttggcaaggcctacaagaaaacagttgaattgataacagagcacaaggagcaagttgcacagatcgcagaattgctgctcgagaaggaagtcctacaccaggacgatctaaccagggtactaggagaacgtccattcaaggcactggaccaaccaactacgacctctttaagaaaggtttcgaggatggtggtgacaacagccaagcaccagcagagaacgccgagctgcctgatgattcatctcccccagttggtgacgttgtacccacgtagtgtttctctcctcaacgtcagagctgtacattgagcgctcattctcgatagattcttgtttgttggttgcatcataaaaaagatctgtataaattcgcgcccaagctgattatgccactgtggaaatgcatttggatttccgt

SEQ ID NO: 13670 - protein, 485 aa, Zea mays subsp. mays
  peptide (1)..(485): Ceres Seq. ID no. 12436177
MEFVHFLKNPKKYEDLGAKIPKGALLVGPPGTGKTLLAKATAGESGVPFLSISGSDFMEMFVGVGPSRVRNLFQEARQCAPSIVFIDEIDAIGRARGRGGFSGSNDERESTLNQLLVEMDGFGTTSGVVVLAGTNRPDILDKALLRPGRFDRQIAIDKPDIKGRDQIFRIYLKKLKLDNKPSFYSQRLAALTPGFAGADIANVCNEAALIAARSEETQITMQHFESAIDRIIGGLEKKNRVISKLERRTVAYHESGHAVAGWFLEHAEPLLKVTIVPRGTAALGFAQYVPNENLLMTKEQLFDMTCMTLGGRAAEEVLIGKISTGAQNDLEKVTKMTYAQVAVYGFSEKVGLLSFPQKDGGFELSKPYSNQTASIIDDEVREWVGKAYKKTVELITEHKEQVAQIAELLLEKEVLHQDDLTRVLGERPFKALDQPTTTSLRKVSRMVVTTAKHQQRTPSCLMIHLPQLVTLYPRSVSLLNVRAVH

SEQ ID NO: 13671 - protein, 428 aa, Zea mays subsp. mays
  peptide (1)..(428): Ceres Seq. ID no. 12436178
MEMFVGVGPSRVRNLFQEARQCAPSIVFIDEIDAIGRARGRGGFSGSNDERESTLNQLLVEMDGFGTTSGVVVLAGTNRPDILDKALLRPGRFDRQIAIDKPDIKGRDQIFRIYLKKLKLDNKPSFYSQRLAALTPGFAGADIANVCNEAALIAARSEETQITMQHFESAIDRIIGGLEKKNRVISKLERRTVAYHESGHAVAGWFLEHAEPLLKVTIVPRGTAALGFAQYVPNENLLMTKEQLFDMTCMTLGGRAAEEVLIGKISTGAQNDLEKVTKMTYAQVAVYGFSEKVGLLSFPQKDGGFELSKPYSNQTASIIDDEVREWVGKAYKKTVELITEHKEQVAQIAELLLEKEVLHQDDLTRVLGERPFKALDQPTTTSLRKVSRMVVTTAKHQQRTPSCLMIHLPQLVTLYPRSVSLLNVRAVH

SEQ ID NO: 13672 - protein, 426 aa, Zea mays subsp. mays
  peptide (1)..(426): Ceres Seq. ID no. 12436179
MFVGVGPSRVRNLFQEARQCAPSIVFIDEIDAIGRARGRGGFSGSNDERESTLNQLLVEMDGFGTTSGVVVLAGTNRPDILDKALLRPGRFDRQIAIDKPDIKGRDQIFRIYLKKLKLDNKPSFYSQRLAALTPGFAGADIANVCNEAALIAARSEETQITMQHFESAIDRIIGGLEKKNRVISKLERRTVAYHESGHAVAGWFLEHAEPLLKVTIVPRGTAALGFAQYVPNENLLMTKEQLFDMTCMTLGGRAAEEVLIGKISTGAQNDLEKVTKMTYAQVAVYGFSEKVGLLSFPQKDGGFELSKPYSNQTASIIDDEVREWVGKAYKKTVELITEHKEQVAQIAELLLEKEVLHQDDLTRVLGERPFKALDQPTTTSLRKVSRMVVTTAKHQQRTPSCLMIHLPQLVTLYPRSVSLLNVRAVH

SEQ ID NO: 13673 - DNA, 1181 bp, Zea mays subsp. mays; identical to SEQ ID NO: 4402
  misc_feature (1)..(1181): Ceres Seq. ID no. 12419652
  misc_feature (1)..(1181): Ortholog of  Ceres SEQ ID NO 13656050 as cited in SEQ ID NO 64724
  misc_feature (1)..(1181): Ortholog of  Ceres SEQ ID NO 14316017 as cited in SEQ ID NO 67028

SEQ ID NO: 13674 - protein, 301 aa, Zea mays subsp. mays; identical to SEQ ID NO: 4403
  peptide (1)..(301): Ceres Seq. ID no. 12419653
  misc_feature (159)..(159): Xaa is any aa, unknown or other
  misc_feature (162)..(162): Xaa is any aa, unknown or other
  misc_feature (176)..(176): Xaa is any aa, unknown or other

SEQ ID NO: 13675 - protein, 274 aa, Zea mays subsp. mays; identical to SEQ ID NO: 4404
  peptide (1)..(274): Ceres Seq. ID no. 12419654
  misc_feature (132)..(132): Xaa is any aa, unknown or other
  misc_feature (135)..(135): Xaa is any aa, unknown or other
  misc_feature (149)..(149): Xaa is any aa, unknown or other

SEQ ID NO: 13676 - protein, 259 aa, Zea mays subsp. mays; identical to SEQ ID NO: 4405
  peptide (1)..(259): Ceres Seq. ID no. 12419655
  misc_feature (160)..(160): Xaa is any aa, unknown or other
  misc_feature (162)..(162): Xaa is any aa, unknown or other
  misc_feature (177)..(177): Xaa is any aa, unknown or other

SEQ ID NO: 13677 - DNA, 432 bp, Zea mays subsp. mays
  misc_feature (1)..(432): Ceres Seq. ID no. 2899074
  misc_feature (1)..(432): Ortholog of  Ceres SEQ ID NO 12617583 as cited in SEQ ID NO 64897
acagatagaggaggtttgcccctgcacaccgctgcgctactgggaggagcacaagtgtatcgctgtggctgcggcgcccggcagtccgccacaagcacacgcgcacacaggggccaagcgcctacacctacaganganagacaaggtctgccgtccgcgcgtgcgcggaagangggacggaggaagaaggctgccagcaatcagagatggaggtggggttcttgggtctgggcatcatgggcaaggcaatggcgaccaacctcctccgccacggcttccgcgtcaccgtctggaacaggaccctcgccaagtgccaagagctcgccgcgctcggcgccaccgtcggggagacgcctgcctccgtcgtctccaagtgcagatacaccatcgccatgctctccgancccagcgccgccctatcagtcgtcttcg

SEQ ID NO: 13678 - protein, 144 aa, Zea mays subsp. mays
  peptide (1)..(144): Ceres Seq. ID no. 2899075
  misc_feature (45)..(45): Xaa is any aa, unknown or other
  misc_feature (46)..(46): Xaa is any aa, unknown or other
  misc_feature (58)..(58): Xaa is any aa, unknown or other
  misc_feature (135)..(135): Xaa is any aa, unknown or other
TDRGGLPLHTAALLGGAQVYRCGCGARQSATSTRAHRGQAPTPTXXRQGLPSARARKXGRRKKAASNQRWRWGSWVWASWARQWRPTSSATASASPSGTGPSPSAKSSPRSAPPSGRRLPPSSPSADTPSPCSPXPAPPYQSSS

SEQ ID NO: 13679 - protein, 143 aa, Zea mays subsp. mays
  peptide (1)..(143): Ceres Seq. ID no. 2899076
  misc_feature (45)..(45): Xaa is any aa, unknown or other
  misc_feature (46)..(46): Xaa is any aa, unknown or other
  misc_feature (58)..(58): Xaa is any aa, unknown or other
  misc_feature (135)..(135): Xaa is any aa, unknown or other
QIEEVCPCTPLRYWEEHKCIAVAAAPGSPPQAHAHTGAKRLHLQXXDKVCRPRVRGRXDGGRRLPAIRDGGGVLGSGHHGQGNGDQPPPPRLPRHRLEQDPRQVPRARRARRHRRGDACLRRLQVQIHHRHALRXQRRPISRL

SEQ ID NO: 13680 - protein, 75 aa, Zea mays subsp. mays
  peptide (1)..(75): Ceres Seq. ID no. 2899077
  misc_feature (66)..(66): Xaa is any aa, unknown or other
MEVGFLGLGIMGKAMATNLLRHGFRVTVWNRTLAKCQELAALGATVGETPASVVSKCRYTIAMLSXPSAALSVVF

SEQ ID NO: 13681 - DNA, 433 bp, Zea mays subsp. mays
  misc_feature (1)..(433): Ceres Seq. ID no. 3475522
  misc_feature (1)..(433): Ortholog of  Ceres SEQ ID NO 13583358 as cited in SEQ ID NO 62221
  misc_feature (1)..(433): Ortholog of  Ceres SEQ ID NO 15179036 as cited in SEQ ID NO 0
gtgtgcgtgagagagaaacagaagaggaaaaggaatccatggcggcgacgctggcgaggagggcggggcgctccgcggcgacgacgctatggggcgcggcgaggggcttcgcatcggtggggtccgacatcgtctctgcggctcccggcgtgtcgctgcagaaggcgcggtcctgggacgagggcgtcgccaccaagttctctaccacgcctctcaaggacatcttctacgggaagaaggtggtcatcttcggcttgcccggtgcatatacaggggtttgttcacgttcctagttacaagaagaatattgacaagttgaaagcaaaaggaatcgactctgttatctgtgtatctgtgaatgatccgtatgtcctggatggatgggcaaaaaagctagacgctaaagatacaattgagttctatggtgactttg

SEQ ID NO: 13682 - protein, 144 aa, Zea mays subsp. mays
  peptide (1)..(144): Ceres Seq. ID no. 3475523
VCVREKQKRKRNPWRRRWRGGRGAPRRRRYGARRGASHRWGPTSSLRLPACRCRRRGPGTRASPPSSLPRLSRTSSTGRRWSSSACPVHIQGFVHVPSYKKNIDKLKAKGIDSVICVSVNDPYVLDGWAKKLDAKDTIEFYGDF

SEQ ID NO: 13683 - protein, 96 aa, Zea mays subsp. mays
  peptide (1)..(96): Ceres Seq. ID no. 3475524
VRERETEEEKESMAATLARRAGRSAATTLWGAARGFASVGSDIVSAAPGVSLQKARSWDEGVATKFSTTPLKDIFYGKKVVIFGLPGAYTGVCSRS

SEQ ID NO: 13684 - protein, 84 aa, Zea mays subsp. mays
  peptide (1)..(84): Ceres Seq. ID no. 3475525
MAATLARRAGRSAATTLWGAARGFASVGSDIVSAAPGVSLQKARSWDEGVATKFSTTPLKDIFYGKKVVIFGLPGAYTGVCSRS

SEQ ID NO: 13685 - DNA, 2535 bp, Zea mays subsp. mays
  misc_feature (1)..(2535): Ceres Seq. ID no. 12436063
  misc_feature (1)..(2535): Ortholog of  Ceres SEQ ID NO 14310206 as cited in SEQ ID NO 20650
ataagacgtcgcgctgctgctgccaccgcagtcgccgactcgtccgcagtgcaatgccgggggcctgccaggacctcagcaccatcacgcccacaccacggcggcagagtatggcgcagctccagcgcgggtccgtgctggttggtgggcgcgagctcctcgtccgcgccccgcccaacgtcaacctacggcccgccggtgccggcgtcgccgacggcggggccgcctcgggcgccgcgttcctcggagccagggctccggccgcgtccagccgccacgtgttctccgtcggaaacctggctagtgggtggaggtggttgtcgttgttcaggttcaagatctggtggatgatcccggccacgggcgtcggcgcggcggctgtgccggcggagacgcagatgctgcttctggagtacaggagcgaggcgggtcctgcggccgcgacggagcgtggctcactgtacgcgctggtgctgccagttcttgacggcggcttccgagccagcctccaggggagccccgaggacgagctacagttctgcttcgagagcggtgatcctgatgtccagacgatggaagcagttgatgcagtgttcgtcaactcaggggacaaccccttcaagcttctgaaagaatccatcaagatgttgtccaagatcaaaggaactttcagtcatatagaggacaaggagatcccttcaaatttggactggtttgggtggtgcacttgggatgcattttacaaagctgttaacccaagtgggattgaggagggccttcaaagtctgcgtgaaggtggtgtgccgccaaggtttctgattatagatgatggttggcaagaaacagttgacgaaatcaaggaagtgaatgaagccctccgtgagcagactgtatttgcgcagaggctggctgatctgaaggagaatcataagttcagaggggaaacctgcaagaatcttgaggaccttgttaaaacgataaaaggaaaacatggagtcaagtgtgtctacatgtggcatgctttacttggatattggggaggtaccttagcaacatccgaagtgatgaagaagtataatccaaagcttgtttatccagtccaatcgcggggtaatgttgcgaatctgagggatattgccatggacagcttggagaaatttggagtgggcatcgttgatcctgacaagatatatgagttctacaatgatcagcacagctacctttctagtgtgggtgtggatggcgtgaaggttgatgttcagaacgtgttggaaacccttggacgcggatttggtggtcgtgttgcagtaactcgaaagtaccagcaggctcttgaggaatcaattgcccagaacttcaaaacaaacaacctaatctgctgcatgagtcacaattcagacagcatctttagtgccttgaagggtgcagttgctagagcctcagaagatttcatgcctcgggaaccaacactgcaaactctgcacattgcgtctgtggcattcaatagcctattgttgggagaaatcttcatacctgactgggatatgttccatagcaagcatgaatcagcggaattccacggagcagctagagccctgagtggaggtggtgtttatgtcagtgacaaacctggggtgcatgatttcagtgttctaaaaaagcttgttctaccagatggttcgattctaagagcaaggtatgctggtcgtcctacacgcgattgtctgttcactgacccagtcatggatggcaaaagtctgatgaagatatggaacttgaacaatttcactggtgtcattggagtgttcaattgtcagggagctggacagtgggtttggccagttaaacaaactgcttatgttcctaccaacataaacatcactggtcagctctcaccgtctgacgtagaatctctcgaggagatagctggtgatgactggaatggggagactgcagtatatgctttcggttcatgttctctttcaaggcttcagaaacaccaaagtttggaggtgtcactgtctactatgacatgtgagatctacagcatttcaccaataaagattttcagcgaagtcgtccagtttacgcctcttggactgatcgacatgttcaactccggtggtgcacttgacaatatttcaagcgttgcagattcttcagctacgacagttcatataagatgccgaggaccagggcggtttggggcgtattcagacaccaggccagagctttgcagagttgatgaacacgaagtggagttcactcttgcagaggatggcctcctgaccttttaccttcccccttcttcctcccaggacaacctgagacacgttgagattgtctacaaagcatcatgaacgacatttacccttatgattcttacgctccagcatgcaatttctggcgtgctcttcagtaaccaccacacatgcacattgacatgatgtaacaaggaacccattttgttggatttgactgtgtatgctgtgctgcaaatacctgttttatacgattgttctgcacctggactgc

SEQ ID NO: 13686 - protein, 785 aa, Zea mays subsp. mays
  peptide (1)..(785): Ceres Seq. ID no. 12436064
KTSRCCCHRSRRLVRSAMPGACQDLSTITPTPRRQSMAQLQRGSVLVGGRELLVRAPPNVNLRPAGAGVADGGAASGAAFLGARAPAASSRHVFSVGNLASGWRWLSLFRFKIWWMIPATGVGAAAVPAETQMLLLEYRSEAGPAAATERGSLYALVLPVLDGGFRASLQGSPEDELQFCFESGDPDVQTMEAVDAVFVNSGDNPFKLLKESIKMLSKIKGTFSHIEDKEIPSNLDWFGWCTWDAFYKAVNPSGIEEGLQSLREGGVPPRFLIIDDGWQETVDEIKEVNEALREQTVFAQRLADLKENHKFRGETCKNLEDLVKTIKGKHGVKCVYMWHALLGYWGGTLATSEVMKKYNPKLVYPVQSRGNVANLRDIAMDSLEKFGVGIVDPDKIYEFYNDQHSYLSSVGVDGVKVDVQNVLETLGRGFGGRVAVTRKYQQALEESIAQNFKTNNLICCMSHNSDSIFSALKGAVARASEDFMPREPTLQTLHIASVAFNSLLLGEIFIPDWDMFHSKHESAEFHGAARALSGGGVYVSDKPGVHDFSVLKKLVLPDGSILRARYAGRPTRDCLFTDPVMDGKSLMKIWNLNNFTGVIGVFNCQGAGQWVWPVKQTAYVPTNINITGQLSPSDVESLEEIAGDDWNGETAVYAFGSCSLSRLQKHQSLEVSLSTMTCEIYSISPIKIFSEVVQFTPLGLIDMFNSGGALDNISSVADSSATTVHIRCRGPGRFGAYSDTRPELCRVDEHEVEFTLAEDGLLTFYLPPSSSQDNLRHVEIVYKAS

SEQ ID NO: 13687 - protein, 768 aa, Zea mays subsp. mays
  peptide (1)..(768): Ceres Seq. ID no. 12436065
MPGACQDLSTITPTPRRQSMAQLQRGSVLVGGRELLVRAPPNVNLRPAGAGVADGGAASGAAFLGARAPAASSRHVFSVGNLASGWRWLSLFRFKIWWMIPATGVGAAAVPAETQMLLLEYRSEAGPAAATERGSLYALVLPVLDGGFRASLQGSPEDELQFCFESGDPDVQTMEAVDAVFVNSGDNPFKLLKESIKMLSKIKGTFSHIEDKEIPSNLDWFGWCTWDAFYKAVNPSGIEEGLQSLREGGVPPRFLIIDDGWQETVDEIKEVNEALREQTVFAQRLADLKENHKFRGETCKNLEDLVKTIKGKHGVKCVYMWHALLGYWGGTLATSEVMKKYNPKLVYPVQSRGNVANLRDIAMDSLEKFGVGIVDPDKIYEFYNDQHSYLSSVGVDGVKVDVQNVLETLGRGFGGRVAVTRKYQQALEESIAQNFKTNNLICCMSHNSDSIFSALKGAVARASEDFMPREPTLQTLHIASVAFNSLLLGEIFIPDWDMFHSKHESAEFHGAARALSGGGVYVSDKPGVHDFSVLKKLVLPDGSILRARYAGRPTRDCLFTDPVMDGKSLMKIWNLNNFTGVIGVFNCQGAGQWVWPVKQTAYVPTNINITGQLSPSDVESLEEIAGDDWNGETAVYAFGSCSLSRLQKHQSLEVSLSTMTCEIYSISPIKIFSEVVQFTPLGLIDMFNSGGALDNISSVADSSATTVHIRCRGPGRFGAYSDTRPELCRVDEHEVEFTLAEDGLLTFYLPPSSSQDNLRHVEIVYKAS

SEQ ID NO: 13688 - protein, 749 aa, Zea mays subsp. mays
  peptide (1)..(749): Ceres Seq. ID no. 12436066
MAQLQRGSVLVGGRELLVRAPPNVNLRPAGAGVADGGAASGAAFLGARAPAASSRHVFSVGNLASGWRWLSLFRFKIWWMIPATGVGAAAVPAETQMLLLEYRSEAGPAAATERGSLYALVLPVLDGGFRASLQGSPEDELQFCFESGDPDVQTMEAVDAVFVNSGDNPFKLLKESIKMLSKIKGTFSHIEDKEIPSNLDWFGWCTWDAFYKAVNPSGIEEGLQSLREGGVPPRFLIIDDGWQETVDEIKEVNEALREQTVFAQRLADLKENHKFRGETCKNLEDLVKTIKGKHGVKCVYMWHALLGYWGGTLATSEVMKKYNPKLVYPVQSRGNVANLRDIAMDSLEKFGVGIVDPDKIYEFYNDQHSYLSSVGVDGVKVDVQNVLETLGRGFGGRVAVTRKYQQALEESIAQNFKTNNLICCMSHNSDSIFSALKGAVARASEDFMPREPTLQTLHIASVAFNSLLLGEIFIPDWDMFHSKHESAEFHGAARALSGGGVYVSDKPGVHDFSVLKKLVLPDGSILRARYAGRPTRDCLFTDPVMDGKSLMKIWNLNNFTGVIGVFNCQGAGQWVWPVKQTAYVPTNINITGQLSPSDVESLEEIAGDDWNGETAVYAFGSCSLSRLQKHQSLEVSLSTMTCEIYSISPIKIFSEVVQFTPLGLIDMFNSGGALDNISSVADSSATTVHIRCRGPGRFGAYSDTRPELCRVDEHEVEFTLAEDGLLTFYLPPSSSQDNLRHVEIVYKAS

SEQ ID NO: 13689 - DNA, 1298 bp, Zea mays subsp. mays
  misc_feature (1)..(1298): Ceres Seq. ID no. 12436055
  misc_feature (1)..(1298): Ortholog of  Ceres SEQ ID NO 14302404 as cited in SEQ ID NO 66143
aaaactgggaaagccacacgtaacctctccccgccgatcccttccttccatccttccgccacgcgcggcagcggttcgtcacactcacacgcacacaccatggcgtccacgccacggacgccggcgccggagcggtctccgccgcccgtgcccactcctcctccgcctctggaggacgagccgccgccgtatctggccgacgggtcgccgcgggaggaggccagcttctccagcgacgggagggaaggagcgccccccaagaacccgcagctctcgcccacgcaccacgctgcgccacgcctcgtgccgccgcccagcagcccagccaggcaagacgggcaagaacaagaagggagcgctaataaggccgccgcggccacggcggagccggcccgcgagccgctccgccagatggcgacgggcctcgcccggccactgtcgtcgcagacgtcgcccgccaccaccaactctcctactccgtcggcgtctccgacgccgtcgagtcccgcgcccgtggccaacaacagcaagaggagcggccagagcacgcccaagcgcgcggagacgaagctgccgctgtcgtcgccggccgtcgcggtgcacttcgacccagtcgaggaggccgtcacgtcgccgctgcgcctcggcaaggcgcgcctcgaccagcagcagcagcagcagcacgcggcgggggcggcggagagcggggcatccgtggtccccggtgtggcggcggccgtggccgcggtcgccgagcggagggagctgttgctggcgctgcgcctggccacggcggtgctcagcctcgcggccttctcggtgatcgccagtgcccggacgtccggatgggccggcgactactacgcccgccacctgcagtacaggtacgccgtcgcagtgaacgtgatcgtgttcgcctactcggtcgcgcagtcattgggcaaaatccgccacctggtctcacccaggtttacgttccggaccatgtcgagctactactgcagcctgttcctggaccaggttctggcgtacctcctcatgtcggcgtcgtcggcggccgcgtcgcgcaacgacctgtgggtgtccaggttcggcacggacgccttcgtcaggaagatcaccggcgccctgtggctgtccttcgtcgcgttcctggtgctcgctctgaacgcggtcatctccacggctaatctcttcagcatggtctgacacgactcgtcctgctctggcgttgttggaatcaagtactaattgtagattctggaaataaatgtaaccgcgcgttaattagctgttgc

SEQ ID NO: 13690 - protein, 402 aa, Zea mays subsp. mays
  peptide (1)..(402): Ceres Seq. ID no. 12436056
KTGKATRNLSPPIPSFHPSATRGSGSSHSHAHTMASTPRTPAPERSPPPVPTPPPPLEDEPPPYLADGSPREEASFSSDGREGAPPKNPQLSPTHHAAPRLVPPPSSPARQDGQEQEGSANKAAAATAEPAREPLRQMATGLARPLSSQTSPATTNSPTPSASPTPSSPAPVANNSKRSGQSTPKRAETKLPLSSPAVAVHFDPVEEAVTSPLRLGKARLDQQQQQQHAAGAAESGASVVPGVAAAVAAVAERRELLLALRLATAVLSLAAFSVIASARTSGWAGDYYARHLQYRYAVAVNVIVFAYSVAQSLGKIRHLVSPRFTFRTMSSYYCSLFLDQVLAYLLMSASSAAASRNDLWVSRFGTDAFVRKITGALWLSFVAFLVLALNAVISTANLFSMV

SEQ ID NO: 13691 - protein, 369 aa, Zea mays subsp. mays
  peptide (1)..(369): Ceres Seq. ID no. 12436057
MASTPRTPAPERSPPPVPTPPPPLEDEPPPYLADGSPREEASFSSDGREGAPPKNPQLSPTHHAAPRLVPPPSSPARQDGQEQEGSANKAAAATAEPAREPLRQMATGLARPLSSQTSPATTNSPTPSASPTPSSPAPVANNSKRSGQSTPKRAETKLPLSSPAVAVHFDPVEEAVTSPLRLGKARLDQQQQQQHAAGAAESGASVVPGVAAAVAAVAERRELLLALRLATAVLSLAAFSVIASARTSGWAGDYYARHLQYRYAVAVNVIVFAYSVAQSLGKIRHLVSPRFTFRTMSSYYCSLFLDQVLAYLLMSASSAAASRNDLWVSRFGTDAFVRKITGALWLSFVAFLVLALNAVISTANLFSMV

SEQ ID NO: 13692 - protein, 273 aa, Zea mays subsp. mays
  peptide (1)..(273): Ceres Seq. ID no. 12436058
KLGKPHVTSPRRSLPSILPPRAAAVRHTHTHTPWRPRHGRRRRSGLRRPCPLLLRLWRTSRRRIWPTGRRGRRPASPATGGKERPPRTRSSRPRTTLRHASCRRPAAQPGKTGKNKKGALIRPPRPRRSRPASRSARWRRASPGHCRRRRRPPPPTLLLRRRLRRRRVPRPWPTTARGAARARPSARRRSCRCRRRPSRCTSTQSRRPSRRRCASARRASTSSSSSSTRRGRRRAGHPWSPVWRRPWPRSPSGGSCCWRCAWPRRCSASRPSR

SEQ ID NO: 13693 - DNA, 651 bp, Zea mays subsp. mays
  misc_feature (1)..(651): Ceres Seq. ID no. 12436230
  misc_feature (1)..(651): Ortholog of  Ceres SEQ ID NO 12610243 as cited in SEQ ID NO 56206
  misc_feature (1)..(651): Ortholog of  Ceres SEQ ID NO 13661089 as cited in SEQ ID NO 61053
  misc_feature (1)..(651): Ortholog of  Ceres SEQ ID NO 15173496 as cited in SEQ ID NO 68918
  misc_feature (1)..(651): Ortholog of  Ceres SEQ ID NO 13599645 as cited in SEQ ID NO 0
aacaaacatttcaacgtctcctaaagcagcatcggctaataccaccgactcttgctcacacagctcgttctctgcagctgccgcacatagctagtgaacgaccatggcgtcccaggccatcgagagccaccgtgccggtgctgaggtcgtcaccggaggagacgccatctgcaggaagaagtcaatcgagctgctggaggagctcggcctccccaaaggcttcctgccccttgaggacatccaggagttcgggtacaaccgcgagacagggtttatgtggctggtgcaggggaagaagaaggtggagcacaccttcaaaaagatcaagcagactgtgtcgtacgccactgaggtgacggcattcgccgagaagggcaagctgaggaagatcaccggcgtgaagacaaaggagctgatgctctggctcagcgtcgtcgaggtctacgtgcctgaggcctcaccggagaaggttaccttcaagactggcactggcctatccgacacctttgatgcctctgcctttgcgctgggagagtaattaccaaccacaaaaatggttggcttcaaaagacatgcataatctatcttttgtattttaaacttccatatatcttgtgatgagtttatgacccatactcaagggccgtgccc

SEQ ID NO: 13694 - protein, 144 aa, Zea mays subsp. mays
  peptide (1)..(144): Ceres Seq. ID no. 12436231
MASQAIESHRAGAEVVTGGDAICRKKSIELLEELGLPKGFLPLEDIQEFGYNRETGFMWLVQGKKKVEHTFKKIKQTVSYATEVTAFAEKGKLRKITGVKTKELMLWLSVVEVYVPEASPEKVTFKTGTGLSDTFDASAFALGE

SEQ ID NO: 13695 - protein, 117 aa, Zea mays subsp. mays
  peptide (1)..(117): Ceres Seq. ID no. 12436232
QTFQRLLKQHRLIPPTLAHTARSLQLPHIASERPWRPRPSRATVPVLRSSPEETPSAGRSQSSCWRSSASPKASCPLRTSRSSGTTARQGLCGWCRGRRRWSTPSKRSSRLCRTPLR

SEQ ID NO: 13696 - protein, 87 aa, Zea mays subsp. mays
  peptide (1)..(87): Ceres Seq. ID no. 12436233
MWLVQGKKKVEHTFKKIKQTVSYATEVTAFAEKGKLRKITGVKTKELMLWLSVVEVYVPEASPEKVTFKTGTGLSDTFDASAFALGE

SEQ ID NO: 13697 - DNA, 1288 bp, Zea mays subsp. mays
  misc_feature (1)..(1288): Ceres Seq. ID no. 12419233
  misc_feature (1)..(1288): Ortholog of  Ceres SEQ ID NO 12562983 as cited in SEQ ID NO 53309
  misc_feature (1)..(1288): Ortholog of  Ceres SEQ ID NO 14309224 as cited in SEQ ID NO 0
aagagaagaatgtggcgtgaacagagagacctgaccctgaggcaggtgaggaggtccagggagcaatgggtttcggcgtagtgcacctcctcgacgcggtgttccgccgcatgttccggtcggccggcctccgcccgggctcggccacggtgaacgccgaagacgacacggtcatccactactgggcccacccgtccctcctccgcccgccgccctccgactccgactccgagcagcggcagccggtggtggtgctgatccacgggttcgggccggacccgacgtggcagtgggcggcgcangcgggcccgctgtcgcgccacttccgcctggtggtgccgacgctgctcttcttcggggcgtccggcacgcgcgcgcccgcgcggtccgacgcctcccaggccnccgcgctcgccgcgctgctcgcgggcccgggccagcagcacctcccgggcctcggcgccggccgcaccgtgcacgtggtgggcnccagctacggcggcctcgtggcgtaccacctcgcccgggagctggagcggcaaggcggcggcgttcgcgtcggcaaggtggtgntgtgcgactcggacgcgtncaagggcgccgaggncgaccgcgcgctggcggccaggagcggcgtggcggaggtggcggagctgctggcgcccgccgacacccgggcgctgcgccgcctcatggcggtctgcgcccaccgccccgtcaagtacgtccccgagtgcctcctccgcgacatgctccggagatacttcgcggncaagagggaggagaagatggcgctcatcagagggatcgccaccggagaaggcttcgagcttgctccgctgcctcaggaggtgctcatcatctggggagagttcgaccagatcttcccggtggacaaagcgcacaaggtgaaagagaagctcggggagaaggcgacggtgaaggtgatccccaacgcggggcacctgccgcagcaggaggacagcaagctnttcaaccgagtcctcctcgacttcctgctgcgcccttngtccaccgccgcctgacctccaacggcagcgcccaagccaaacagcttagcttgctcggctgccttcttctttggttatccattatcatcctgccgcgcgcgtttccggcgttcttgtttgtttgtagagtggaggaggcgctgccgccttctgtttttgtttgagggtggcaatgtgcagatcctacctgtttggttgtgctgtgaaaaaaagttgctgtgggctgtggaaaaagattttatcattattttatcatt

SEQ ID NO: 13698 - protein, 326 aa, Zea mays subsp. mays
  peptide (1)..(326): Ceres Seq. ID no. 12419234
  misc_feature (79)..(79): Xaa is any aa, unknown or other
  misc_feature (114)..(114): Xaa is any aa, unknown or other
  misc_feature (142)..(142): Xaa is any aa, unknown or other
  misc_feature (170)..(170): Xaa is any aa, unknown or other
  misc_feature (176)..(176): Xaa is any aa, unknown or other
  misc_feature (181)..(181): Xaa is any aa, unknown or other
  misc_feature (236)..(236): Xaa is any aa, unknown or other
  misc_feature (309)..(309): Xaa is any aa, unknown or other
  misc_feature (322)..(322): Xaa is any aa, unknown or other
MGFGVVHLLDAVFRRMFRSAGLRPGSATVNAEDDTVIHYWAHPSLLRPPPSDSDSEQRQPVVVLIHGFGPDPTWQWAAXAGPLSRHFRLVVPTLLFFGASGTRAPARSDASQAXALAALLAGPGQQHLPGLGAGRTVHVVGXSYGGLVAYHLARELERQGGGVRVGKVVXCDSDAXKGAEXDRALAARSGVAEVAELLAPADTRALRRLMAVCAHRPVKYVPECLLRDMLRRYFAXKREEKMALIRGIATGEGFELAPLPQEVLIIWGEFDQIFPVDKAHKVKEKLGEKATVKVIPNAGHLPQQEDSKXFNRVLLDFLLRPXSTAA

SEQ ID NO: 13699 - protein, 311 aa, Zea mays subsp. mays
  peptide (1)..(311): Ceres Seq. ID no. 12419235
  misc_feature (64)..(64): Xaa is any aa, unknown or other
  misc_feature (99)..(99): Xaa is any aa, unknown or other
  misc_feature (127)..(127): Xaa is any aa, unknown or other
  misc_feature (155)..(155): Xaa is any aa, unknown or other
  misc_feature (161)..(161): Xaa is any aa, unknown or other
  misc_feature (166)..(166): Xaa is any aa, unknown or other
  misc_feature (221)..(221): Xaa is any aa, unknown or other
  misc_feature (294)..(294): Xaa is any aa, unknown or other
  misc_feature (307)..(307): Xaa is any aa, unknown or other
MFRSAGLRPGSATVNAEDDTVIHYWAHPSLLRPPPSDSDSEQRQPVVVLIHGFGPDPTWQWAAXAGPLSRHFRLVVPTLLFFGASGTRAPARSDASQAXALAALLAGPGQQHLPGLGAGRTVHVVGXSYGGLVAYHLARELERQGGGVRVGKVVXCDSDAXKGAEXDRALAARSGVAEVAELLAPADTRALRRLMAVCAHRPVKYVPECLLRDMLRRYFAXKREEKMALIRGIATGEGFELAPLPQEVLIIWGEFDQIFPVDKAHKVKEKLGEKATVKVIPNAGHLPQQEDSKXFNRVLLDFLLRPXSTAA

SEQ ID NO: 13700 - DNA, 1990 bp, Zea mays subsp. mays
  misc_feature (1)..(1990): Ceres Seq. ID no. 12391586
  misc_feature (1)..(1990): Ortholog of  Ceres SEQ ID NO 13597411 as cited in SEQ ID NO 64125
attcctgagcaaaaatcccctgcaacccgacccatagccatgggcaagctcgaggagaggacgcgtgcgttctggacgaaccgatggcttgtgttcgttggggccatgtggatgcagtccatggccggcaccacttacatcttcggcgccatctcgccggtggtcaaggccaggctgggctacgaccagccgcaggtggccgcgctgggtgtcgccaagaacctcggcggctgcctcggcctcctcgccggcgcgctctcggcgacgtggccgccgtgggcgctgctggccatcggcgccgcgcagaacttcctcggctacggctggctctggctcgtcgtctccgggaacgtgccggcgctgcccctctggctgatgtgtgttgttatctttattggaacaaatggccagacgtatttcatcacggcttcacttgttacaagcatccagaatttcccaaagagcaggggcccaacagtgggcatcctcaaaggatttatgggcctaactagcgccattctgacacaagtttatacagtgatgcacactccagaccatgctgcgcttatcttcatggttgctgttggtccgtcgctggttgccattggcttgatgtttgttattaggcctgttggtggtcacaggcagatacggccatctgacaagaacagcttcatgttcatctacactgtatgcttgctcctcgcctcataccttgtcggtgctatgcttatccaagatttcctgcaaccaagctatgatgtggttgtttttctgactgtgattctgttcgtcctccttatttcaccaatcgcaatccctgtgattgtgtcgttcatgccggaaaaagctcagcatctcatggaagatgctctcttatctgaaccattgacaggagaggcaagcagttcacgacaaaaggaggatcaaccagaggtcattttaagtgaggtagaagaggagaagtctaaggaaactgattcattgccgccatctgaaaggagaaagaggattgcggaattgcaggccaagctagtggaagcagcggcaagaggtggggttagaatcaaaagaaggccacaccgaggggataacttcaccctgatgcaggcattggtgaaggctgatttttggcttatttggctatcacttttgcttgggtcgggatcagggctgacagtgattgataacctgggtcagatgagccaggctattggttataaaaatgcacatatcttttgtcactcgtgagcatatggaactttcttggtcgtgttggaggtggctacttctctgagatcattgtcagggaacgtacatacccaaggcacatagcattggcagttgctcagatcgtgatggctgctgggcatttcctctttgctatggcttggcctggaactatgtacattgcgagcttgctggttggacttggatatggagctcactgggctattgtgccagctgctgtctccgagctttttggtgtaaaacactttggtgcgatgtacaattttctcatactagcgaaccccgcaggatccctcatcttctcagagctaattgtcagcaacctctatgaacatgaagctgagaaacaagctagccaacagcagatgtcagcattgctgtctccacgattgcttcgtgataccggctttcttgcagatgatgcactcaagtgtgaagggcctgcttgcttctttttcagctctctgattatgtcggtgttctgtgctgttgccgctgggttgagcctcctcgtcgttcaaaggaccagacaagtttatcctcgcctctacagttctgtccgcacttgagattctccaattctccatggatgggaagctcaaatcctcgtattctatgtccgtttattcttgcatacatatgcacaaagataagtatgtgaataaattctcaaatcttttcctaagctggtattgtaaaaacagatattcttgaatggactgtcccttgtgacttgcct

SEQ ID NO: 13701 - protein, 416 aa, Zea mays subsp. mays
  peptide (1)..(416): Ceres Seq. ID no. 12391587
IPEQKSPATRPIAMGKLEERTRAFWTNRWLVFVGAMWMQSMAGTTYIFGAISPVVKARLGYDQPQVAALGVAKNLGGCLGLLAGALSATWPPWALLAIGAAQNFLGYGWLWLVVSGNVPALPLWLMCVVIFIGTNGQTYFITASLVTSIQNFPKSRGPTVGILKGFMGLTSAILTQVYTVMHTPDHAALIFMVAVGPSLVAIGLMFVIRPVGGHRQIRPSDKNSFMFIYTVCLLLASYLVGAMLIQDFLQPSYDVVVFLTVILFVLLISPIAIPVIVSFMPEKAQHLMEDALLSEPLTGEASSSRQKEDQPEVILSEVEEEKSKETDSLPPSERRKRIAELQAKLVEAAARGGVRIKRRPHRGDNFTLMQALVKADFWLIWLSLLLGSGSGLTVIDNLGQMSQAIGYKNAHIFCHS

SEQ ID NO: 13702 - protein, 403 aa, Zea mays subsp. mays
  peptide (1)..(403): Ceres Seq. ID no. 12391588
MGKLEERTRAFWTNRWLVFVGAMWMQSMAGTTYIFGAISPVVKARLGYDQPQVAALGVAKNLGGCLGLLAGALSATWPPWALLAIGAAQNFLGYGWLWLVVSGNVPALPLWLMCVVIFIGTNGQTYFITASLVTSIQNFPKSRGPTVGILKGFMGLTSAILTQVYTVMHTPDHAALIFMVAVGPSLVAIGLMFVIRPVGGHRQIRPSDKNSFMFIYTVCLLLASYLVGAMLIQDFLQPSYDVVVFLTVILFVLLISPIAIPVIVSFMPEKAQHLMEDALLSEPLTGEASSSRQKEDQPEVILSEVEEEKSKETDSLPPSERRKRIAELQAKLVEAAARGGVRIKRRPHRGDNFTLMQALVKADFWLIWLSLLLGSGSGLTVIDNLGQMSQAIGYKNAHIFCHS

SEQ ID NO: 13703 - protein, 381 aa, Zea mays subsp. mays
  peptide (1)..(381): Ceres Seq. ID no. 12391589
MWMQSMAGTTYIFGAISPVVKARLGYDQPQVAALGVAKNLGGCLGLLAGALSATWPPWALLAIGAAQNFLGYGWLWLVVSGNVPALPLWLMCVVIFIGTNGQTYFITASLVTSIQNFPKSRGPTVGILKGFMGLTSAILTQVYTVMHTPDHAALIFMVAVGPSLVAIGLMFVIRPVGGHRQIRPSDKNSFMFIYTVCLLLASYLVGAMLIQDFLQPSYDVVVFLTVILFVLLISPIAIPVIVSFMPEKAQHLMEDALLSEPLTGEASSSRQKEDQPEVILSEVEEEKSKETDSLPPSERRKRIAELQAKLVEAAARGGVRIKRRPHRGDNFTLMQALVKADFWLIWLSLLLGSGSGLTVIDNLGQMSQAIGYKNAHIFCHS

SEQ ID NO: 13704 - DNA, 1894 bp, Zea mays subsp. mays
  misc_feature (1)..(1894): Ceres Seq. ID no. 12455023
  misc_feature (1)..(1894): Ortholog of  Ceres SEQ ID NO 15176887 as cited in SEQ ID NO 58804
  misc_feature (1)..(1894): Ortholog of  Ceres SEQ ID NO 15174867 as cited in SEQ ID NO 67357
atgcaccagtcgactctccatattcgccacatcttcttacgtagctctctctctctctctcgctaatacaaggaggagacggagtagaagaaagggtgcagcaaattaatcgggggcactagttcaccttcatcctcaatccattcattcatcagtactcccagccttttccggcacacgcatctatggccccgccatcacacttctacaacaacaatggcgccccgcaggacgccgccagctacctccatgcgggaccaggaaatgcacctccacaggactcctgcttgctcgacgcagacgagttccgccggcagggccaccaagtcatcgacttcatcgccgactactacggccgcatggacgactaccccgtgcaccccagcgtcaaccccggcttcctgcgccgccagctccccgacaaggcgccgtcgcgtccggagtcgtccgacgcgttcggtgccgcgctgcgggacgtccgtgacctcatcctgccaggcatgacgcactggcagagcgcccgccacttcgcgcacttcccggcgtccancaacaccgtcggcgccctcggcgaggccctcacggccggcatcaactccgtcccgttcacgtgggccgcctcgccggccgccacggagctcgagatggtcgtcgtggactggctcggcaaggcgctccacctgcccgagagcctaatgttctgcggcggcggcggaggcacgcttctcggcaccacgtgcgaggccatcctctgcgccctcgtcgccgcgagggaccgcaagctcgtggacatcggcagcgggaggatcggagacctcgtcgtctactgttccgaccagacgcactttgccttccgcaaggcagcgcatattgccgggatccaccgcgacaactgccgcgagatcgccacgtaccgtgacgacatgttcgcgctctcgccagccgagctgcaggccgccatgcaggcggacgtggacgccgggctggtcccgctcttcctgtgcgcgacggtcggaaccactcagacgacggccgtcgaccctatcagagggctctgcgccgtcgcagcgacacacggtgtctgggtgcacgtggatgcggcctacgcgggctcggcgctcgtctgcccagagttccggcacctgatcgacggcgccgaagccgtggactccttcagcatgaatgctcacaagtggctgctggccaacaacgactgctgcgctctgtgggtgaagaagccagctctgctcgtcgcggctctcggcacggagcaggagtacatcctcaaagacgcggcctctgaggggcacgacgtcgtggactacaaggactggtccgtgacgctgacccgccggttccgcgcgctcaagctatggctcgtgctccgctgctatggcgtcgagggcctgcgcgaccacatccgcggccatgtgcgcatggccgcgtcgttcgaggacatggtcaaggccgacccacgcttccaagtcgtggcaaagaggcaattcgcactcgtttgctttaggctccgggcgcccgaggagttgggcggccccaaggcagccaacgcgctcaaccgaaggctgctagaggaggtgaatgcggcttgctccgggccctacatgagctccgctaatgtcggtggcgtctacatgctcagatgcgctatcgggagcacgcttacggaggagcgacacgtccgcgaggcatggacagttgtgcagaacgtagcttcttccctcctcactaaaatggagatgcatgaagattattgaaagcgcctttgcctaataagctcaactcattccactttgttgttgtttattagtttattctattattaagcatcgagttgtgtaacctattatatatacattatggaatgcattatacgact

SEQ ID NO: 13705 - protein, 528 aa, Zea mays subsp. mays
  peptide (1)..(528): Ceres Seq. ID no. 12455024
  misc_feature (122)..(122): Xaa is any aa, unknown or other
MAPPSHFYNNNGAPQDAASYLHAGPGNAPPQDSCLLDADEFRRQGHQVIDFIADYYGRMDDYPVHPSVNPGFLRRQLPDKAPSRPESSDAFGAALRDVRDLILPGMTHWQSARHFAHFPASXNTVGALGEALTAGINSVPFTWAASPAATELEMVVVDWLGKALHLPESLMFCGGGGGTLLGTTCEAILCALVAARDRKLVDIGSGRIGDLVVYCSDQTHFAFRKAAHIAGIHRDNCREIATYRDDMFALSPAELQAAMQADVDAGLVPLFLCATVGTTQTTAVDPIRGLCAVAATHGVWVHVDAAYAGSALVCPEFRHLIDGAEAVDSFSMNAHKWLLANNDCCALWVKKPALLVAALGTEQEYILKDAASEGHDVVDYKDWSVTLTRRFRALKLWLVLRCYGVEGLRDHIRGHVRMAASFEDMVKADPRFQVVAKRQFALVCFRLRAPEELGGPKAANALNRRLLEEVNAACSGPYMSSANVGGVYMLRCAIGSTLTEERHVREAWTVVQNVASSLLTKMEMHEDY

SEQ ID NO: 13706 - protein, 470 aa, Zea mays subsp. mays
  peptide (1)..(470): Ceres Seq. ID no. 12455025
  misc_feature (64)..(64): Xaa is any aa, unknown or other
MDDYPVHPSVNPGFLRRQLPDKAPSRPESSDAFGAALRDVRDLILPGMTHWQSARHFAHFPASXNTVGALGEALTAGINSVPFTWAASPAATELEMVVVDWLGKALHLPESLMFCGGGGGTLLGTTCEAILCALVAARDRKLVDIGSGRIGDLVVYCSDQTHFAFRKAAHIAGIHRDNCREIATYRDDMFALSPAELQAAMQADVDAGLVPLFLCATVGTTQTTAVDPIRGLCAVAATHGVWVHVDAAYAGSALVCPEFRHLIDGAEAVDSFSMNAHKWLLANNDCCALWVKKPALLVAALGTEQEYILKDAASEGHDVVDYKDWSVTLTRRFRALKLWLVLRCYGVEGLRDHIRGHVRMAASFEDMVKADPRFQVVAKRQFALVCFRLRAPEELGGPKAANALNRRLLEEVNAACSGPYMSSANVGGVYMLRCAIGSTLTEERHVREAWTVVQNVASSLLTKMEMHEDY

SEQ ID NO: 13707 - protein, 423 aa, Zea mays subsp. mays
  peptide (1)..(423): Ceres Seq. ID no. 12455026
  misc_feature (17)..(17): Xaa is any aa, unknown or other
MTHWQSARHFAHFPASXNTVGALGEALTAGINSVPFTWAASPAATELEMVVVDWLGKALHLPESLMFCGGGGGTLLGTTCEAILCALVAARDRKLVDIGSGRIGDLVVYCSDQTHFAFRKAAHIAGIHRDNCREIATYRDDMFALSPAELQAAMQADVDAGLVPLFLCATVGTTQTTAVDPIRGLCAVAATHGVWVHVDAAYAGSALVCPEFRHLIDGAEAVDSFSMNAHKWLLANNDCCALWVKKPALLVAALGTEQEYILKDAASEGHDVVDYKDWSVTLTRRFRALKLWLVLRCYGVEGLRDHIRGHVRMAASFEDMVKADPRFQVVAKRQFALVCFRLRAPEELGGPKAANALNRRLLEEVNAACSGPYMSSANVGGVYMLRCAIGSTLTEERHVREAWTVVQNVASSLLTKMEMHEDY

SEQ ID NO: 13708 - DNA, 1324 bp, Zea mays subsp. mays; identical to SEQ ID NO: 5515
  misc_feature (1)..(1324): Ceres Seq. ID no. 13492565
  misc_feature (1)..(1324): Ortholog of  Ceres SEQ ID NO 12624774 as cited in SEQ ID NO 63620
  misc_feature (1)..(1324): Ortholog of  Ceres SEQ ID NO 14307940 as cited in SEQ ID NO 0
  misc_feature (1)..(1324): Ortholog of  Ceres SEQ ID NO 14308560 as cited in SEQ ID NO 0

SEQ ID NO: 13709 - protein, 235 aa, Zea mays subsp. mays; identical to SEQ ID NO: 5516
  peptide (1)..(235): Ceres Seq. ID no. 13492566

SEQ ID NO: 13710 - protein, 143 aa, Zea mays subsp. mays; identical to SEQ ID NO: 5517
  peptide (1)..(143): Ceres Seq. ID no. 13492567

SEQ ID NO: 13711 - protein, 124 aa, Zea mays subsp. mays; identical to SEQ ID NO: 5518
  peptide (1)..(124): Ceres Seq. ID no. 13492568

SEQ ID NO: 13712 - DNA, 955 bp, Zea mays subsp. mays
  misc_feature (1)..(955): Ceres Seq. ID no. 12377211
  misc_feature (1)..(955): Ortholog of  Ceres SEQ ID NO 15178880 as cited in SEQ ID NO 0
acgcttggcagttggcaagcagcgagtggggggagacagccaactctctatcctcttcccccctcgtccatccccatcccaccgccttgctctcccctctccacttccagctgtccatggctgcagcagcgtgctcctctgcctcgccgctcctcctcccctcagggccgagacatgcgtcggcctccagggcgtggtttctcggcggcaggagcagggcgctgagatcagaggcgccgtgctgctgcaaggccgccgccgcccgtggaagcgctccgcaatgcgggacggtcggtggtggcagcagcagcacccggagggggctgctaggcgtggccctgggagcctctgccttggggctggccgcgtttgacgccgtcgccgccgggttgccgccggaggagaagcccaagctctgcgacgccgcctgcgaaggcgagctcgaaaatgttggttgagcctccgtgcctatggtaactacagaatccggactgcagtacaaggatatcaaagtgggcgaagggcctagcccacccgttggtttccaggttgcagcaaattatgttgctatggtgccaactgggcagatattcgacagttcgctggagaaaggtcagccctacatattccgtgttggatcagggcaggtgatcaaggggcttgatgagggaattttgtcgatgaaggttggaggactacgtcggctgtacatacctgggccattagcgttccctaagggtcttacttctgctcctggaaggccaagagtacccccaagcagccctgtcgttttcgacgtcaatttactgtacataccaggtntcgatgatgagtgaaggcattctgtggcaacagtcatcttttttttgtatacttcattcgagagcaacatactgtacatntagagcacaattctttcaagctataaaatctatgcgaatatctatgttaaccg

SEQ ID NO: 13713 - protein, 151 aa, Zea mays subsp. mays
  peptide (1)..(151): Ceres Seq. ID no. 12377212
AWQLASSEWGETANSLSSSPLVHPHPTALLSPLHFQLSMAAAACSSASPLLLPSGPRHASASRAWFLGGRSRALRSEAPCCCKAAAARGSAPQCGTVGGGSSSTRRGLLGVALGASALGLAAFDAVAAGLPPEEKPKLCDAACEGELENVG

SEQ ID NO: 13714 - protein, 123 aa, Zea mays subsp. mays
  peptide (1)..(123): Ceres Seq. ID no. 12377213
RLAVGKQRVGGDSQLSILFPPRPSPSHRLALPSPLPAVHGCSSVLLCLAAPPPLRAETCVGLQGVVSRRQEQGAEIRGAVLLQGRRRPWKRSAMRDGRWWQQQHPEGAARRGPGSLCLGAGRV

SEQ ID NO: 13715 - protein, 121 aa, Zea mays subsp. mays
  peptide (1)..(121): Ceres Seq. ID no. 12377214
  misc_feature (118)..(118): Xaa is any aa, unknown or other
MVTTESGLQYKDIKVGEGPSPPVGFQVAANYVAMVPTGQIFDSSLEKGQPYIFRVGSGQVIKGLDEGILSMKVGGLRRLYIPGPLAFPKGLTSAPGRPRVPPSSPVVFDVNLLYIPGXDDE

SEQ ID NO: 13716 - protein, 113 aa, Zea mays subsp. mays
  peptide (1)..(113): Ceres Seq. ID no. 12377215
MAAAACSSASPLLLPSGPRHASASRAWFLGGRSRALRSEAPCCCKAAAARGSAPQCGTVGGGSSSTRRGLLGVALGASALGLAAFDAVAAGLPPEEKPKLCDAACEGELENVG

SEQ ID NO: 13717 - DNA, 1251 bp, Zea mays subsp. mays; identical to SEQ ID NO: 11897
  misc_feature (1)..(1251): Ceres Seq. ID no. 12403165
  misc_feature (1)..(1251): Ortholog of  Ceres SEQ ID NO 14302154 as cited in SEQ ID NO 0

SEQ ID NO: 13718 - protein, 260 aa, Zea mays subsp. mays; identical to SEQ ID NO: 11898
  peptide (1)..(260): Ceres Seq. ID no. 12403166

SEQ ID NO: 13719 - protein, 173 aa, Zea mays subsp. mays; identical to SEQ ID NO: 11899
  peptide (1)..(173): Ceres Seq. ID no. 12403167

SEQ ID NO: 13720 - protein, 139 aa, Zea mays subsp. mays; identical to SEQ ID NO: 11900
  peptide (1)..(139): Ceres Seq. ID no. 12403168

SEQ ID NO: 13721 - DNA, 1974 bp, Zea mays subsp. mays
  misc_feature (1)..(1974): Ceres Seq. ID no. 12419180
  misc_feature (1)..(1974): Ortholog of  Ceres SEQ ID NO 14311509 as cited in SEQ ID NO 51398
  misc_feature (1)..(1974): Ortholog of  Ceres SEQ ID NO 14307702 as cited in SEQ ID NO 54703
  misc_feature (1)..(1974): Ortholog of  Ceres SEQ ID NO 15176361 as cited in SEQ ID NO 55438
atcgctctctcctttgcacccctagctagctagtactactgctgctcctccgacttgctcttcgcgcagcaggacggagaaacaagaaccatccctccccctaccggctaccgctgctactcatggtcgcgcgcactgcctcctggtgccgccgcgtatgatccagacatgaatagggcgcacagcagcagctccaagctcatcaacgagaagctcgtggaacaccggatctccactgcgaagcactgcccccactgcggcgagaaaatcgacagcaaaccggattgggtggggctgccggcaggcgtcaagttcgatccaactgaccaggagctgatcgagcacctcgaggcgaaagtgaaggatgaaggctcgagatctcaccctctcatcgacgagttcatacccacaatagatggggaggacggcatatgttacacccaccccgagaaacttccaggtgtgacaagggatggcctaagcaagcacttcttccaccggccgtccaaggcctacacgacgggcacgaggaagaggaggaagatacagacggagtgcgacgtccacaagggggagacgaggtggcacaagaccggcaagacgcggccggtgatggtgaacggccgtcagaaggggtgcaagaagatattggtgctgtacaccaacttcggcaagcaccgcaagccggagaagacgaactgggtcatgcaccagtaccacctcggcgacctagaagaggagaaggagggggagctggtggtgtgcaagatcttctaccagacgcaacccaggcagtgcagctggtcctccgaccggggcgccgccgccactgccttggcagcaacggcggcggcagcggcggcggcggcgcaggagcagcataggagggatagtggcagtggcagctgctcgtctagggaccacgaggtgtcagccacatcgttcccagccggatacacagtcaccacggcggtcgatatgcagcagcatatgaagcagcctgcggaccatttcagcttcgcgcctttcaggaaaaccttcgatcaggaggttggtataggtggtgatcaggtgccatctaatcagcttggacgttcagagccgcatcatgccggcctggggcagcagccacacggcccggtgctcgcgacgaagacggctgtgcctgctacagctttcctgatcagtaggccatcgaaccctgtctcgactatggtgccacctgcaatgcagcacgcatcagttgttctcgatcatgatcagttccatgtgccagcaatccttctccatcaccatgacaaatttcagcaacagcaccaacagtcacagccacaacaaaagcttgaccgcagatctgccggcttggaagaactgataatgggctgcacgtcgtccacaagcacaaaaggagatgcttccattgctcacccccaagagacagaatggccttacccgtactggccacctgacaaccaagatcatcatggatagtagcaacagggacctggtaaatagtggcgatgatgtgaatgctgaaggaacactaaccgcaaccactttcactggaatggtttttgtctgcttgaatatgcagcgttgctttcttggagaatgtacacctacaatagtggggaaagaacagagaaaaaacatatctctgtagatctccctcaataaagaaatgaggataaaactagttaacagtgtgagctctccaagacagaagagacaaaatggccaacgaaaagagaagggggaaagaccgacgggaggaaaggtactgtgtgtgctgacattgaagggatcatgtgtggaccgttagatgtattagagcaccttaatcaagtataactataatcagtttacagtttaccacagtttttttattcgtactacctgttttccaattgtaaaaactagtggcattgtttgcatgtacattaacccttttaatttctttcagtttctaaactg

SEQ ID NO: 13722 - protein, 440 aa, Zea mays subsp. mays
  peptide (1)..(440): Ceres Seq. ID no. 12419181
MNRAHSSSSKLINEKLVEHRISTAKHCPHCGEKIDSKPDWVGLPAGVKFDPTDQELIEHLEAKVKDEGSRSHPLIDEFIPTIDGEDGICYTHPEKLPGVTRDGLSKHFFHRPSKAYTTGTRKRRKIQTECDVHKGETRWHKTGKTRPVMVNGRQKGCKKILVLYTNFGKHRKPEKTNWVMHQYHLGDLEEEKEGELVVCKIFYQTQPRQCSWSSDRGAAATALAATAAAAAAAAQEQHRRDSGSGSCSSRDHEVSATSFPAGYTVTTAVDMQQHMKQPADHFSFAPFRKTFDQEVGIGGDQVPSNQLGRSEPHHAGLGQQPHGPVLATKTAVPATAFLISRPSNPVSTMVPPAMQHASVVLDHDQFHVPAILLHHHDKFQQQHQQSQPQQKLDRRSAGLEELIMGCTSSTSTKGDASIAHPQETEWPYPYWPPDNQDHHG

SEQ ID NO: 13723 - protein, 292 aa, Zea mays subsp. mays
  peptide (1)..(292): Ceres Seq. ID no. 12419182
MVNGRQKGCKKILVLYTNFGKHRKPEKTNWVMHQYHLGDLEEEKEGELVVCKIFYQTQPRQCSWSSDRGAAATALAATAAAAAAAAQEQHRRDSGSGSCSSRDHEVSATSFPAGYTVTTAVDMQQHMKQPADHFSFAPFRKTFDQEVGIGGDQVPSNQLGRSEPHHAGLGQQPHGPVLATKTAVPATAFLISRPSNPVSTMVPPAMQHASVVLDHDQFHVPAILLHHHDKFQQQHQQSQPQQKLDRRSAGLEELIMGCTSSTSTKGDASIAHPQETEWPYPYWPPDNQDHHG

SEQ ID NO: 13724 - protein, 261 aa, Zea mays subsp. mays
  peptide (1)..(261): Ceres Seq. ID no. 12419183
MHQYHLGDLEEEKEGELVVCKIFYQTQPRQCSWSSDRGAAATALAATAAAAAAAAQEQHRRDSGSGSCSSRDHEVSATSFPAGYTVTTAVDMQQHMKQPADHFSFAPFRKTFDQEVGIGGDQVPSNQLGRSEPHHAGLGQQPHGPVLATKTAVPATAFLISRPSNPVSTMVPPAMQHASVVLDHDQFHVPAILLHHHDKFQQQHQQSQPQQKLDRRSAGLEELIMGCTSSTSTKGDASIAHPQETEWPYPYWPPDNQDHHG

SEQ ID NO: 13725 - DNA, 1444 bp, Zea mays subsp. mays
  misc_feature (1)..(1444): Ceres Seq. ID no. 12455051
  misc_feature (1)..(1444): Ortholog of  Ceres SEQ ID NO 15174879 as cited in SEQ ID NO 53786
  misc_feature (1)..(1444): Ortholog of  Ceres SEQ ID NO 14313336 as cited in SEQ ID NO 55501
  misc_feature (1)..(1444): Ortholog of  Ceres SEQ ID NO 13655237 as cited in SEQ ID NO 62892
  misc_feature (1)..(1444): Ortholog of  Ceres SEQ ID NO 13597268 as cited in SEQ ID NO 63929
gtggattggggcgagtatcatgcaaatacaaacgatcgagaggttgaaactgcaaaatgacgcgtcgcatcgctgtcatcgtggtggcatcggtcttgtcggcaatggcggtcatgggcatagcgttcatctggacaaggatgaggtccagatcaagggacgatctcctccgtgcagacatgggcgacgacgggtcgtccggcgagatgatccgcgccatcgcggcgtcgcagctgagcttcaagtaccaggagctgcgcgcggcgacggacgagttcagccagacgaacaagctcgggcagggaggctacggctccgtgtacaggggcgtgctggcggacgggcgggaggtggcggtgaagcggctcttcttcaacacgcggcagtgggcggagcagttcttcaacgaggtgaagctggtgagccaggtgcagcacaagaacctggtcaagctgctgggctgcagcgtggaggggcccgagagcctgctcgtctacgagtacctctgcaacaccagcctcgaccactacctcttcgacgcgttcaagaagaacgcgctggactgggagcggaggttcgagatcgtgctgggcacggcggagggcctctcctacctgcacagcgcctcggaggtccggatcatacaccgcgacatcaaggccagcaacgtcctgctggacgacaggttcaggccgaagatcgccgacttcggcctcgccaggaacttcatggacgaccagagccacctcagcaccggcctcgccggaacttttgggtacatggctccggagtacatcgtccacgggcagctcaccgagaaggccgacatctacagctacggcgtgctggtcctcgagatcgtcaccggccggaagagccacaactcggtggcgtcatctgcagaaggcctctcactcatggcactgatatggagacactacaccgcgggcaccctgacggagctgctggacccgaacctccgcgagcagtgctcggaggaggacgccctccgggtgttccacgtcggcctgctgtgcgcccaggcgtcgccgaaccttcggccgcccatgtggaaggtggtggagatgctgagcggcagggatcacaaggcggtggcgcttccccggcccacccagcctcccttcatcaacgtcaaggggtccagcggcaagagcgacagctccggcgggtcggcgtccaactccgacaagtcgcccttctcgctgaaccagctgtcagtcagtggggtgcaggccaggtaaaagctagctagctagctgcggatatcatgtgtttgggctagcggcattttttttcaagttttgtaagtcgtggcgtggatatatcataggtttgacttcgattttctggcttcgttgatctggtaacatactctgattattgctagtatgtgcaagtctttggaagaaagattcatgtttgc

SEQ ID NO: 13726 - protein, 423 aa, Zea mays subsp. mays
  peptide (1)..(423): Ceres Seq. ID no. 12455052
WIGASIMQIQTIERLKLQNDASHRCHRGGIGLVGNGGHGHSVHLDKDEVQIKGRSPPCRHGRRRVVRRDDPRHRGVAAELQVPGAARGDGRVQPDEQARAGRLRLRVQGRAGGRAGGGGEAALLQHAAVGGAVLQRGEAGEPGAAQEPGQAAGLQRGGAREPARLRVPLQHQPRPLPLRRVQEERAGLGAEVRDRAGHGGGPLLPAQRLGGPDHTPRHQGQQRPAGRQVQAEDRRLRPRQELHGRPEPPQHRPRRNFWVHGSGVHRPRAAHREGRHLQLRRAGPRDRHRPEEPQLGGVICRRPLTHGTDMETLHRGHPDGAAGPEPPRAVLGGGRPPGVPRRPAVRPGVAEPSAAHVEGGGDAERQGSQGGGASPAHPASLHQRQGVQRQERQLRRVGVQLRQVALLAEPAVSQWGAGQVKAS

SEQ ID NO: 13727 - protein, 417 aa, Zea mays subsp. mays
  peptide (1)..(417): Ceres Seq. ID no. 12455053
MQIQTIERLKLQNDASHRCHRGGIGLVGNGGHGHSVHLDKDEVQIKGRSPPCRHGRRRVVRRDDPRHRGVAAELQVPGAARGDGRVQPDEQARAGRLRLRVQGRAGGRAGGGGEAALLQHAAVGGAVLQRGEAGEPGAAQEPGQAAGLQRGGAREPARLRVPLQHQPRPLPLRRVQEERAGLGAEVRDRAGHGGGPLLPAQRLGGPDHTPRHQGQQRPAGRQVQAEDRRLRPRQELHGRPEPPQHRPRRNFWVHGSGVHRPRAAHREGRHLQLRRAGPRDRHRPEEPQLGGVICRRPLTHGTDMETLHRGHPDGAAGPEPPRAVLGGGRPPGVPRRPAVRPGVAEPSAAHVEGGGDAERQGSQGGGASPAHPASLHQRQGVQRQERQLRRVGVQLRQVALLAEPAVSQWGAGQVKAS

SEQ ID NO: 13728 - protein, 401 aa, Zea mays subsp. mays
  peptide (1)..(401): Ceres Seq. ID no. 12455054
MTRRIAVIVVASVLSAMAVMGIAFIWTRMRSRSRDDLLRADMGDDGSSGEMIRAIAASQLSFKYQELRAATDEFSQTNKLGQGGYGSVYRGVLADGREVAVKRLFFNTRQWAEQFFNEVKLVSQVQHKNLVKLLGCSVEGPESLLVYEYLCNTSLDHYLFDAFKKNALDWERRFEIVLGTAEGLSYLHSASEVRIIHRDIKASNVLLDDRFRPKIADFGLARNFMDDQSHLSTGLAGTFGYMAPEYIVHGQLTEKADIYSYGVLVLEIVTGRKSHNSVASSAEGLSLMALIWRHYTAGTLTELLDPNLREQCSEEDALRVFHVGLLCAQASPNLRPPMWKVVEMLSGRDHKAVALPRPTQPPFINVKGSSGKSDSSGGSASNSDKSPFSLNQLSVSGVQAR

SEQ ID NO: 13729 - DNA, 1019 bp, Zea mays subsp. mays
  misc_feature (1)..(1019): Ceres Seq. ID no. 13503150
  misc_feature (1)..(1019): Ortholog of  Ceres SEQ ID NO 14301396 as cited in SEQ ID NO 51789
  misc_feature (1)..(1019): Ortholog of  Ceres SEQ ID NO 12619664 as cited in SEQ ID NO 66048
aaaaaacaaaacatatctatatatctgcaacgtcaaatcaacacaggctgttgtttgcttcttttggtaaaggctttagctgcggcagatccaccggcggcgccccgagaatcgaagatgccggtgaaggtgttcggatcgccgacgtcggcggaggtcgcccgcgtcctggcctgcctgttcgagaaggacgtcgagttccagctcatccgcgtcgactccttccgcggcaccaagcgcctgccccagtacctcaagctccagccgcacggcgaggcgctcaccttcgaggacggcaacgtcaccctcgtcgagtcgaggaagatcctgcgccacatcgccgacaagtacaagaaccaggggtacagggacctgttcggcccgggcgcgctggagcgggcctccatcgagcagtggctgcagacggaggcgcagagcttcgacgtccccagcgccgacatggtctacagcctcgcctacctgccgcccgacatgcagctcgacggcaggggcgtcggcggcctcccggcggcgacggggacgatgaacccggcgcaccggcagaaggtggaggagatgctgcagctgttcgagaagagccgcaggcagctgggcaagctgctggacatctacgagcagcgccttggcgaggaggccttcctggccggaggcaagttcacgctcgccgacctgtcccacctgcccaacgccgaccgcctcgccggcgacccgcggtccgcacgcctcatggagtcgcgcaggaacgtcagcaagtggtgggacaccgtatcccgccgcgactcttgggtcagggtcaaggagttgcagcgcccgccgtccgcggaggcgcccttctgatgtcgatcgatcgcaaattaaggcggtggcctttgctcaagcctacgtgttcggtttctgcataattttttaataaataaacgccactggcccctctacgtcattggcgattgttcattgtgtaataaatcgttcaagagcatatgatgcttcttgccgtg

SEQ ID NO: 13730 - protein, 306 aa, Zea mays subsp. mays
  peptide (1)..(306): Ceres Seq. ID no. 13503151
KTKHIYISATSNQHRLLFASFGKGFSCGRSTGGAPRIEDAGEGVRIADVGGGRPRPGLPVREGRRVPAHPRRLLPRHQAPAPVPQAPAARRGAHLRGRQRHPRRVEEDPAPHRRQVQEPGVQGPVRPGRAGAGLHRAVAADGGAELRRPQRRHGLQPRLPAARHAARRQGRRRPPGGDGDDEPGAPAEGGGDAAAVREEPQAAGQAAGHLRAAPWRGGLPGRRQVHARRPVPPAQRRPPRRRPAVRTPHGVAQERQQVVGHRIPPRLLGQGQGVAAPAVRGGALLMSIDRKLRRWPLLKPTCSVSA

SEQ ID NO: 13731 - protein, 285 aa, Zea mays subsp. mays
  peptide (1)..(285): Ceres Seq. ID no. 13503152
KKQNISIYLQRQINTGCCLLLLVKALAAADPPAAPRESKMPVKVFGSPTSAEVARVLACLFEKDVEFQLIRVDSFRGTKRLPQYLKLQPHGEALTFEDGNVTLVESRKILRHIADKYKNQGYRDLFGPGALERASIEQWLQTEAQSFDVPSADMVYSLAYLPPDMQLDGRGVGGLPAATGTMNPAHRQKVEEMLQLFEKSRRQLGKLLDIYEQRLGEEAFLAGGKFTLADLSHLPNADRLAGDPRSARLMESRRNVSKWWDTVSRRDSWVRVKELQRPPSAEAPF

SEQ ID NO: 13732 - protein, 246 aa, Zea mays subsp. mays
  peptide (1)..(246): Ceres Seq. ID no. 13503153
MPVKVFGSPTSAEVARVLACLFEKDVEFQLIRVDSFRGTKRLPQYLKLQPHGEALTFEDGNVTLVESRKILRHIADKYKNQGYRDLFGPGALERASIEQWLQTEAQSFDVPSADMVYSLAYLPPDMQLDGRGVGGLPAATGTMNPAHRQKVEEMLQLFEKSRRQLGKLLDIYEQRLGEEAFLAGGKFTLADLSHLPNADRLAGDPRSARLMESRRNVSKWWDTVSRRDSWVRVKELQRPPSAEAPF

SEQ ID NO: 13733 - DNA, 582 bp, Zea mays subsp. mays
  misc_feature (1)..(582): Ceres Seq. ID no. 13570601
  misc_feature (1)..(582): Ortholog of  Ceres SEQ ID NO 13654451 as cited in SEQ ID NO 67881
attcacgcacctagggttttcgcgccgccgccgccgccgccgctggggccgcgccgcagcccatcgtgttgaaggtcgacttgcattgcgccggctgcgccaacaaggtccgcaaggccatcaagcgcgcaccaggcgtggagtcggtgacgccggacatggcggcgggcaaggtggtcgtgaccggtccggcggacgcggtgcagctcaaggagcgcatcgaggctagggccaagaagcccgtgcagatcgtctccgccggcgccggttcgcccaagaaggacaaggagaagaaagctgacggcggcgagaaaaatgcggccaaagagaagggcggccgatgcagagaagaagaaggccgacaagaagaagggaggcggtgatggaggagagaaaaatgccgacaagaagaagggcggcggcggcggcgataagaaggccgacaaggagaagggcactggcaaacccaaggaggaagaggaggaggaggagamgcccaaggaacccaaggaggagacggktacgctcaagatccaactgcactgsgacggstgcatggaccgcatcaagcgccgcatntgc

SEQ ID NO: 13734 - protein, 89 aa, Zea mays subsp. mays
  peptide (1)..(89): Ceres Seq. ID no. 13570602
  misc_feature (60)..(60): Xaa is any aa, unknown or other
  misc_feature (69)..(69): Xaa is any aa, unknown or other
  misc_feature (77)..(77): Xaa is any aa, unknown or other
  misc_feature (79)..(79): Xaa is any aa, unknown or other
  misc_feature (88)..(88): Xaa is any aa, unknown or other
MRPKRRAADAEKKKADKKKGGGDGGEKNADKKKGGGGGDKKADKEKGTGKPKEEEEEEEXPKEPKEETXTLKIQLHXDXCMDRIKRRXC

SEQ ID NO: 13735 - protein, 79 aa, Zea mays subsp. mays
  peptide (1)..(79): Ceres Seq. ID no. 13570603
  misc_feature (52)..(52): Xaa is any aa, unknown or other
  misc_feature (61)..(61): Xaa is any aa, unknown or other
  misc_feature (69)..(69): Xaa is any aa, unknown or other
  misc_feature (71)..(71): Xaa is any aa, unknown or other
MQRRRRPTRRREAVMEERKMPTRRRAAAAAIRRPTRRRALANPRRKRRRRRXPRNPRRRRXRSRSNCTXTXAWTASSAA

SEQ ID NO: 13736 - protein, 75 aa, Zea mays subsp. mays
  peptide (1)..(75): Ceres Seq. ID no. 13570604
FTHLGFSRRRRRRRWGRAAAHRVEGRLALRRLRQQGPQGHQARTRRGVGDAGHGGGQGGRDRSGGRGAAQGAHRG

SEQ ID NO: 13737 - DNA, 2974 bp, Zea mays subsp. mays
  misc_feature (1)..(2974): Ceres Seq. ID no. 13569654
  misc_feature (1)..(2974): Ortholog of  Ceres SEQ ID NO 13596198 as cited in SEQ ID NO 68488
  misc_feature (2612)..(2612): n is a, c, t, g, unknown, or other
  misc_feature (2654)..(2654): n is a, c, t, g, unknown, or other
  misc_feature (2680)..(2680): n is a, c, t, g, unknown, or other
  misc_feature (2697)..(2697): n is a, c, t, g, unknown, or other
  misc_feature (2703)..(2703): n is a, c, t, g, unknown, or other
  misc_feature (2717)..(2717): n is a, c, t, g, unknown, or other
  misc_feature (2731)..(2731): n is a, c, t, g, unknown, or other
  misc_feature (2761)..(2761): n is a, c, t, g, unknown, or other
  misc_feature (2762)..(2762): n is a, c, t, g, unknown, or other
  misc_feature (2770)..(2770): n is a, c, t, g, unknown, or other
  misc_feature (2771)..(2771): n is a, c, t, g, unknown, or other
  misc_feature (2823)..(2823): n is a, c, t, g, unknown, or other
  misc_feature (2856)..(2856): n is a, c, t, g, unknown, or other
  misc_feature (2872)..(2872): n is a, c, t, g, unknown, or other
  misc_feature (2873)..(2873): n is a, c, t, g, unknown, or other
  misc_feature (2914)..(2914): n is a, c, t, g, unknown, or other
  misc_feature (2917)..(2917): n is a, c, t, g, unknown, or other
  misc_feature (2929)..(2929): n is a, c, t, g, unknown, or other
  misc_feature (2962)..(2962): n is a, c, t, g, unknown, or other
tcctaatcaaaaaaactaaaaaaaaagccaaaatggcggggggaggtcgtcgtctcccctccctgcgatcccctccatccgcgacgccatctcggccacttcatgatcactagggtttcgctcttctacccataagccctcgtcccgatgcgctggtggaagcgctcctcctccccctcctgccccgcctcctcatcctcagcatcgacccccgcttcccccgcccgcgcctccaccccccgtctcatcggcggttggggtagcggccctagctcacgccgcgatggcagcggggccagcaacgatccgcagccgcggctgatcagagcgcggcggatgcgctacgtcgtcgatgacctcgaggtcggggtctccgcgctcggcgtggactctccggcgaggagggacgcggcggcgggggtttgcgcttgagacagtgagctccgcgccgatctcgtggtctccgagcaacatggaggtggcgccggcgagatcctcgtcgacccccgtgctgctgccgcatccgctgccccttccaggcgagggggaatcgccgtgccgcgggccggggaggccgcttccgccaccggtgccaaggatgctcgacggggaggggaaagggcctgcagcggacgctcccggtgttttagagactgggagccaaaggatgacgccgttactcgcacggagagtggcggtccaaactctaccaaaggctcatgagcacaacgactttcggttaaatgggactacctgttgtcagcggagaaaggcttttaaagagaagttccaggataagaactgtgatgaaactttgaacttcagattgaacattcctgctaaaagtgctccaagcagtgggttttcaagccctgtacaaagtcctcgaagactgagtaatgtagatttctcatctgctgcaatctctatccaagataccaatgtatggtcagcacgatctctctggtcttctgatgcgatgggatcttcacctccttgtgattcacctgacaagtttgcaggtggtcaggagcgttctcctctctctagtccactgagaagtccagttttaaaatcaagaaacccaagtgcacctccatcaccaatgcatccaaagttgttcccggagaaccatgtttctcgccctgatggcaatggaagtgctagttttcacccattaccgctccctcctgcttctgtaagcccaaagcagacaaatgctagccaccagttagttccaaaagctgagatgccttcggtggctggtcaatggcagaaaggaaaactcttgggtagtggcacctttggatgcgtgtatgaggccaccaataggcacactggagctctttgtgccatgaaagaggtgaatataattccagatgatgctaaatcagtcgagtctctgaagcaattggaacaggaaattaagtttcttagtcaatttaagcatgaaaatattgtgcagtactatggcagtgaaactatcgaagatagattctacatatacctggagtatgttcatcctggttcaatccataagtatgttcatcaacactgtggatcgctgacagaagcagtcatccgtaacttcacacgtcatattctcaagggtcttgcttttttacatagccaaaagattatgcatagggatatcaaaggggcaaatttgttagttgatattaacggtgtagtgaaattggctgacttcggaatggcaaagcatttgagtactgcagctcctaatctttcattgaagggaacaccatactggatggctcctgaggttgttcgggctacactcgataaaagtgcaggttatgatcttctgttgatatttggagccttggctgcacaatcattgagatgtttacaggaaagccaccttggagtggtcttgaagggccggctgcaatgtttaaggtgttgcgcacggacccaccaattccagataacctgtcccctgaagggaaggattttctgagatgctgcttcaagagaaaccctactgagcgaccaacagcaaacaagttgctcgaacacccatttatccaaactttgaaccactacagcccacatagcgttgtacattcattttcgggaattaaatctccagatactgtgcacagcagtgcaagagataaagtaccctggaaaagtgattcatatatgagagggaaacatgcaaatggtgaaacaagcagtgctcggtcgtcagagtcattggcttatcggttgatgacacccctacccaacttgggaaccaatagtttgtcacctccacctttgagttcggcctccagttctggctctgcagcacatacaccgaacagtatgcatttttcagtcccataccatcagcctagtcctttgccaaagcctaacgggaaggaagcaataaatttggtttcccattgaataacagcatgccacctatcacaacatctgggcaaagtccacataaacagcgcaagtgtatccgtccctagcgtctgacccttgtactgccagtaatagctaacaattttctgggtcgtgtaaaaataatttccatgtaagggcttgttcggttattcctaatacacatggattggatgggattggaaaaaattganaagaagtttgacttgtttgggattcaaacccatccaatcccnctcaatccacatggattaagagctanccgaacaagccctaaanagatcnccgtgatatgatcncagggaaatgctgntaaatgagggagctttgtgaaatctgttgnnccgtttgnnttctgggaaactgattggattgcccatgtaacatatttttattagggtgtanctgtaggtgaaactaatggtcaagattgtgccnacaaataggacattanngttgtagctgtagcgtgttgttgatgctgtgtaatgatcanacntgatgtaatcantattgatttttttttggggaaggtaataatgcncgtcaattggcg

SEQ ID NO: 13738 - protein, 542 aa, Zea mays subsp. mays
  peptide (1)..(542): Ceres Seq. ID no. 13569655
MTSRSGSPRSAWTLRRGGTRRRGFALETVSSAPISWSPSNMEVAPARSSSTPVLLPHPLPLPGEGESPCRGPGRPLPPPVPRMLDGEGKGPAADAPGVLETGSQRMTPLLARRVAVQTLPKAHEHNDFRLNGTTCCQRRKAFKEKFQDKNCDETLNFRLNIPAKSAPSSGFSSPVQSPRRLSNVDFSSAAISIQDTNVWSARSLWSSDAMGSSPPCDSPDKFAGGQERSPLSSPLRSPVLKSRNPSAPPSPMHPKLFPENHVSRPDGNGSASFHPLPLPPASVSPKQTNASHQLVPKAEMPSVAGQWQKGKLLGSGTFGCVYEATNRHTGALCAMKEVNIIPDDAKSVESLKQLEQEIKFLSQFKHENIVQYYGSETIEDRFYIYLEYVHPGSIHKYVHQHCGSLTEAVIRNFTRHILKGLAFLHSQKIMHRDIKGANLLVDINGVVKLADFGMAKHLSTAAPNLSLKGTPYWMAPEVVRATLDKSAGYDLLLIFGALAAQSLRCLQESHLGVVLKGRLQCLRCCARTHQFQITCPLKGRIF

SEQ ID NO: 13739 - protein, 502 aa, Zea mays subsp. mays
  peptide (1)..(502): Ceres Seq. ID no. 13569656
MEVAPARSSSTPVLLPHPLPLPGEGESPCRGPGRPLPPPVPRMLDGEGKGPAADAPGVLETGSQRMTPLLARRVAVQTLPKAHEHNDFRLNGTTCCQRRKAFKEKFQDKNCDETLNFRLNIPAKSAPSSGFSSPVQSPRRLSNVDFSSAAISIQDTNVWSARSLWSSDAMGSSPPCDSPDKFAGGQERSPLSSPLRSPVLKSRNPSAPPSPMHPKLFPENHVSRPDGNGSASFHPLPLPPASVSPKQTNASHQLVPKAEMPSVAGQWQKGKLLGSGTFGCVYEATNRHTGALCAMKEVNIIPDDAKSVESLKQLEQEIKFLSQFKHENIVQYYGSETIEDRFYIYLEYVHPGSIHKYVHQHCGSLTEAVIRNFTRHILKGLAFLHSQKIMHRDIKGANLLVDINGVVKLADFGMAKHLSTAAPNLSLKGTPYWMAPEVVRATLDKSAGYDLLLIFGALAAQSLRCLQESHLGVVLKGRLQCLRCCARTHQFQITCPLKGRIF

SEQ ID NO: 13740 - protein, 460 aa, Zea mays subsp. mays
  peptide (1)..(460): Ceres Seq. ID no. 13569657
MLDGEGKGPAADAPGVLETGSQRMTPLLARRVAVQTLPKAHEHNDFRLNGTTCCQRRKAFKEKFQDKNCDETLNFRLNIPAKSAPSSGFSSPVQSPRRLSNVDFSSAAISIQDTNVWSARSLWSSDAMGSSPPCDSPDKFAGGQERSPLSSPLRSPVLKSRNPSAPPSPMHPKLFPENHVSRPDGNGSASFHPLPLPPASVSPKQTNASHQLVPKAEMPSVAGQWQKGKLLGSGTFGCVYEATNRHTGALCAMKEVNIIPDDAKSVESLKQLEQEIKFLSQFKHENIVQYYGSETIEDRFYIYLEYVHPGSIHKYVHQHCGSLTEAVIRNFTRHILKGLAFLHSQKIMHRDIKGANLLVDINGVVKLADFGMAKHLSTAAPNLSLKGTPYWMAPEVVRATLDKSAGYDLLLIFGALAAQSLRCLQESHLGVVLKGRLQCLRCCARTHQFQITCPLKGRIF

SEQ ID NO: 13741 - DNA, 453 bp, Zea mays subsp. mays
  misc_feature (1)..(453): Ceres Seq. ID no. 11030669
  misc_feature (1)..(453): Ortholog of  Ceres SEQ ID NO 14304983 as cited in SEQ ID NO 53862
  misc_feature (1)..(453): Ortholog of  Ceres SEQ ID NO 14310483 as cited in SEQ ID NO 58376
caagggatttgatggtgttgaagatgttattgcagatacgaaggcacacaaggtggtcgttaaggggaaaaaggcagctgctgacccaatgaaggtggtggaacgggtgcagaagaagacaggccgcaaggtagagcttctctcaccaatgccaccaccgaaagaagagaagaaggaagaggagaaaaaggaagaacctgagccaccaaaaaccgagaagaaagaggaggcaacggtgctcgctgtggtgctcaaggtgcatatgcattgtgaggcttgcacacaagtgatcaagaagagaatcctcaagatgaaaggcgtgcaatctgtagaggcagacctcaaggcttctcaagtcactgtgaagggtgtgttcgaggaggccaagctgtctgattatgtgtataggcgcactggtaagcacgctgctatcgtcaagtctgagccggttgc

SEQ ID NO: 13742 - protein, 150 aa, Zea mays subsp. mays
  peptide (1)..(150): Ceres Seq. ID no. 11030670
KGFDGVEDVIADTKAHKVVVKGKKAAADPMKVVERVQKKTGRKVELLSPMPPPKEEKKEEEKKEEPEPPKTEKKEEATVLAVVLKVHMHCEACTQVIKKRILKMKGVQSVEADLKASQVTVKGVFEEAKLSDYVYRRTGKHAAIVKSEPV

SEQ ID NO: 13743 - protein, 121 aa, Zea mays subsp. mays
  peptide (1)..(121): Ceres Seq. ID no. 11030671
MKVVERVQKKTGRKVELLSPMPPPKEEKKEEEKKEEPEPPKTEKKEEATVLAVVLKVHMHCEACTQVIKKRILKMKGVQSVEADLKASQVTVKGVFEEAKLSDYVYRRTGKHAAIVKSEPV

SEQ ID NO: 13744 - protein, 101 aa, Zea mays subsp. mays
  peptide (1)..(101): Ceres Seq. ID no. 11030672
MPPPKEEKKEEEKKEEPEPPKTEKKEEATVLAVVLKVHMHCEACTQVIKKRILKMKGVQSVEADLKASQVTVKGVFEEAKLSDYVYRRTGKHAAIVKSEPV

SEQ ID NO: 13745 - DNA, 2270 bp, Zea mays subsp. mays
  misc_feature (1)..(2270): Ceres Seq. ID no. 12454959
  misc_feature (1)..(2270): Ortholog of  Ceres SEQ ID NO 14312594 as cited in SEQ ID NO 58686
  misc_feature (1)..(2270): Ortholog of  Ceres SEQ ID NO 13597706 as cited in SEQ ID NO 65326
ccatcgccagggcgtcggatcggagcgagctcattctcaactcgactcaagagctctgcctcctccatctccccttctctggcctccggagccacgctgagagatggaggcgaatcccaagaacaccttcacgatcaaagtggaggacgggaagcccgggaaggacggccggctggcggtcggaccggtgttccggagcgttctggccaaggatgggttcccgcagcttgagcctgacatgaagacatcatgggacgtgttcagggtagcagcagtcaagtatgccgacaaccggatgctcggatggcgtccgttcaaagatggagtgccagggccctacttgtggaaatcatacaaggagatctacgacgaggtgctgcaagcaggctctgcgttgcagaagctgggagtgcagccaggttcccgggtggggatctacggagcgaactgtcctcagtggatagtggcaatgcaggcttgcaatggctatagtctagtctgtgtcccactgtacgatactttaggtgcgggagctgtcgactacatcatcgatcatgccgagatcgatgttgtcttcatacaggacaagaaaataaaagagatactgtccccaaactgcaagtctgccaagagactgaaagcattggtggcgttcacttcggcgacaactgaacagaacaaagaagcggatcaaattgggatcaaaatgtatgcctgggacgatttcttgaaagtggggaaggataatcctcgtcaaccttgccctccgcaagcaagtgacatctgcactgtcatgtacacgagtgggacaagcggacagcccaaaggtgtgatgctgacccatgaaagccacgccatgtatgtgaaaggggtggacctcttcatggaccagtttgatgataagatgacaacagatgatgtcttcctgtcgtttctcccgcttgctcacatccttgaccgcatgatcgaagagtatttctttcacaaaggggcctcaattggctactaccacggagatctgaatgccttgagggacgacattgtggagctgaagccgactttactggttggggtgccccgagtgtacgaaaggatttatgaaggtatcttgaaggccattgcggaactcagacctctaagaagggtcatctttaatgctttgtacaaccgcaaactggcaagcatgaaagcaggctactcgcacaaaaccgcttcacctttcgcggacatgctggtttttcgcaaggtcaaggcaaggcttggaggtcgtcttcgcttactgatttcaggaggggctccgttgagtaatgagatcgaggagttcatgagagtgaccacctgtgcatacttcatccaaggctatggtttaacagaaacactgggacctagcactgtctgctacatcgacgacatggccctggtcggaagcgctggtgtgcctgccacctacaccgaaattcggctggaagaagtgcccgagatgggctatgatccactcggcgtcccttcgcgtggtgaaatctgcatccgggggaaatccctcttcgctgggtactacaaaagtccagaactcacaaacgaagccatcgttgatgggtggtttcatacaggtgacattggagagatgaccccagacgggatcttgaaggtttgacagaaaaaagaacatatttaagctgtcacaaggggagtatgttgcggttgagtacctggagaaagtatatggcttccctccactcgttgaagatatctgggtatacggggacagtttcagatcaagtttagttgcagtagtcaatccacaccaagaaaacacaatgaagtgggcagagtccaatggctacaagggttcttttgatgaaatctgcaaacttgaaggactcaaagagtacatcctgaaagagctggcagccgttgcgcagaagaacaagctacgaggcttcgagtacatcaaaggcgtagtgttggatcctgtgccttttgacatcgagagggatttggtgactgcaacaatgaagaagaagagaaagaatatgctgaactattaccagtctgagattgacacaatatacaaaaagctggaggcgcagaagagtgctgccagagctaagtgaagagatgtgccctattcgaccatcagctgaaaacaagggaaacgacaccgttgtaaatttcacattaatattgcgaagtaacaactcagggctatgagtaaggaataaaatgtatattgtgcctttgtctatagtatcggatgattcccaaatctc

SEQ ID NO: 13746 - protein, 516 aa, Zea mays subsp. mays
  peptide (1)..(516): Ceres Seq. ID no. 12454960
MEANPKNTFTIKVEDGKPGKDGRLAVGPVFRSVLAKDGFPQLEPDMKTSWDVFRVAAVKYADNRMLGWRPFKDGVPGPYLWKSYKEIYDEVLQAGSALQKLGVQPGSRVGIYGANCPQWIVAMQACNGYSLVCVPLYDTLGAGAVDYIIDHAEIDVVFIQDKKIKEILSPNCKSAKRLKALVAFTSATTEQNKEADQIGIKMYAWDDFLKVGKDNPRQPCPPQASDICTVMYTSGTSGQPKGVMLTHESHAMYVKGVDLFMDQFDDKMTTDDVFLSFLPLAHILDRMIEEYFFHKGASIGYYHGDLNALRDDIVELKPTLLVGVPRVYERIYEGILKAIAELRPLRRVIFNALYNRKLASMKAGYSHKTASPFADMLVFRKVKARLGGRLRLLISGGAPLSNEIEEFMRVTTCAYFIQGYGLTETLGPSTVCYIDDMALVGSAGVPATYTEIRLEEVPEMGYDPLGVPSRGEICIRGKSLFAGYYKSPELTNEAIVDGWFHTGDIGEMTPDGILKV

SEQ ID NO: 13747 - protein, 471 aa, Zea mays subsp. mays
  peptide (1)..(471): Ceres Seq. ID no. 12454961
MKTSWDVFRVAAVKYADNRMLGWRPFKDGVPGPYLWKSYKEIYDEVLQAGSALQKLGVQPGSRVGIYGANCPQWIVAMQACNGYSLVCVPLYDTLGAGAVDYIIDHAEIDVVFIQDKKIKEILSPNCKSAKRLKALVAFTSATTEQNKEADQIGIKMYAWDDFLKVGKDNPRQPCPPQASDICTVMYTSGTSGQPKGVMLTHESHAMYVKGVDLFMDQFDDKMTTDDVFLSFLPLAHILDRMIEEYFFHKGASIGYYHGDLNALRDDIVELKPTLLVGVPRVYERIYEGILKAIAELRPLRRVIFNALYNRKLASMKAGYSHKTASPFADMLVFRKVKARLGGRLRLLISGGAPLSNEIEEFMRVTTCAYFIQGYGLTETLGPSTVCYIDDMALVGSAGVPATYTEIRLEEVPEMGYDPLGVPSRGEICIRGKSLFAGYYKSPELTNEAIVDGWFHTGDIGEMTPDGILKV

SEQ ID NO: 13748 - protein, 452 aa, Zea mays subsp. mays
  peptide (1)..(452): Ceres Seq. ID no. 12454962
MLGWRPFKDGVPGPYLWKSYKEIYDEVLQAGSALQKLGVQPGSRVGIYGANCPQWIVAMQACNGYSLVCVPLYDTLGAGAVDYIIDHAEIDVVFIQDKKIKEILSPNCKSAKRLKALVAFTSATTEQNKEADQIGIKMYAWDDFLKVGKDNPRQPCPPQASDICTVMYTSGTSGQPKGVMLTHESHAMYVKGVDLFMDQFDDKMTTDDVFLSFLPLAHILDRMIEEYFFHKGASIGYYHGDLNALRDDIVELKPTLLVGVPRVYERIYEGILKAIAELRPLRRVIFNALYNRKLASMKAGYSHKTASPFADMLVFRKVKARLGGRLRLLISGGAPLSNEIEEFMRVTTCAYFIQGYGLTETLGPSTVCYIDDMALVGSAGVPATYTEIRLEEVPEMGYDPLGVPSRGEICIRGKSLFAGYYKSPELTNEAIVDGWFHTGDIGEMTPDGILKV

SEQ ID NO: 13749 - DNA, 1698 bp, Zea mays subsp. mays
  misc_feature (1)..(1698): Ceres Seq. ID no. 13494587
  misc_feature (1)..(1698): Ortholog of  Ceres SEQ ID NO 14316344 as cited in SEQ ID NO 60120
cctttttccccttcacagccccgtactactatccccgctaccgctagccgccgcgctgctcatctggtggcggctcgcctccctccccccatccgccgccgccggctcctcctctagctccctccttaccccgagctttaagctcgtgctacctgcctacctatccgtagggagagagagagagaggggagaaggttcggtcggtcggtcgggggctctcggatctcgccgctgcctccccgtttcttcgttgggatctcgctcgcttcgcgcccatggccgccgtcgcgacgccaccggcccccgcgcccgccgctccggcaccggcaccggcaccggctgctgctccggctcccgtcaccgtcgcccctgccgcggaccaaaccacggatctgctgcagaagttgtcgctggattcgcagcccaaggcggcgggtgcgacagagcctgctgctgctgccgctgccgccaaggagggtgctgtgacaaaccagccgctgagtgtggccatcccgccagagcggtctatcacgccggtgcttcaggactttatggatcccaacctgttctatctaccagcgtattactatggaggctacgacagttccatgagcgagtgggatgattatccaagatatctaaattcagatggagtggagattgccccagcagtgtatggagatatttatggatatgggtatgctccttacggggcatactctccggccacttccccagttccaacggttgatggtcagatgtttggcgcacagcattaccagtatccaaccacgtattttcagcctcctacaccaattccttctaccactcaaagcaacctccagtcttccaacaatcctgaaaagccagcagctaaagcagatcctgccaaggcaaccgctaatggtgttccaaatggtactggtcacactcacagttacagtggaactgtaccaagccaacaaagttcagcactgacgcctgatggaacttatagggcgcccttgctaggtggagttccttctgctggttacctagacacgacatattatgggtatgacagcacaggggcacaatttgcatggtatgatggctctgcttatgcaaatggacagcaaagaacaaccacaactaatcgttttccatcctcgtcattcagtggtaatggttcatctgcaatatatcagaacaagagctccaccacgcagcagatgggtatgcagaatagaagacctacaactacatcagcagctcctacctatcccaataggatgtaccctagcccccgaccgtacaccccagtatgggaattcagtaaaaactggtcttccctacgggagtaacggttatgattccaggatatatggtcgatgtggtcttggtaatggtatggataacaggtacaggcccagggcatgtagtggatactatggttatggcaatgagagtcaggatggaacaattgagttaaacagaggtcctagatctggccggttcaagaaccagaaattgtacggtcatactgtcactattgctgtgaaagggcagtctctcccttctagtgaaagcaagaatgatagtgctgtgcctgatagagcaaagtacaatagagatgacttccctgttcagtacgatgctgcaaagttctttgtcattaaatcgtacagcgaggatgacatccacaagagcgtaaagtac

SEQ ID NO: 13750 - protein, 355 aa, Zea mays subsp. mays
  peptide (1)..(355): Ceres Seq. ID no. 13494588
MAAVATPPAPAPAAPAPAPAPAAAPAPVTVAPAADQTTDLLQKLSLDSQPKAAGATEPAAAAAAAKEGAVTNQPLSVAIPPERSITPVLQDFMDPNLFYLPAYYYGGYDSSMSEWDDYPRYLNSDGVEIAPAVYGDIYGYGYAPYGAYSPATSPVPTVDGQMFGAQHYQYPTTYFQPPTPIPSTTQSNLQSSNNPEKPAAKADPAKATANGVPNGTGHTHSYSGTVPSQQSSALTPDGTYRAPLLGGVPSAGYLDTTYYGYDSTGAQFAWYDGSAYANGQQRTTTTNRFPSSSFSGNGSSAIYQNKSSTTQQMGMQNRRPTTTSAAPTYPNRMYPSPRPYTPVWEFSKNWSSLRE

SEQ ID NO: 13751 - protein, 263 aa, Zea mays subsp. mays
  peptide (1)..(263): Ceres Seq. ID no. 13494589
MDPNLFYLPAYYYGGYDSSMSEWDDYPRYLNSDGVEIAPAVYGDIYGYGYAPYGAYSPATSPVPTVDGQMFGAQHYQYPTTYFQPPTPIPSTTQSNLQSSNNPEKPAAKADPAKATANGVPNGTGHTHSYSGTVPSQQSSALTPDGTYRAPLLGGVPSAGYLDTTYYGYDSTGAQFAWYDGSAYANGQQRTTTTNRFPSSSFSGNGSSAIYQNKSSTTQQMGMQNRRPTTTSAAPTYPNRMYPSPRPYTPVWEFSKNWSSLRE

SEQ ID NO: 13752 - protein, 244 aa, Zea mays subsp. mays
  peptide (1)..(244): Ceres Seq. ID no. 13494590
MSEWDDYPRYLNSDGVEIAPAVYGDIYGYGYAPYGAYSPATSPVPTVDGQMFGAQHYQYPTTYFQPPTPIPSTTQSNLQSSNNPEKPAAKADPAKATANGVPNGTGHTHSYSGTVPSQQSSALTPDGTYRAPLLGGVPSAGYLDTTYYGYDSTGAQFAWYDGSAYANGQQRTTTTNRFPSSSFSGNGSSAIYQNKSSTTQQMGMQNRRPTTTSAAPTYPNRMYPSPRPYTPVWEFSKNWSSLRE

SEQ ID NO: 13753 - DNA, 2052 bp, Zea mays subsp. mays
  misc_feature (1)..(2052): Ceres Seq. ID no. 12391582
  misc_feature (1)..(2052): Ortholog of  Ceres SEQ ID NO 13574398 as cited in SEQ ID NO 0
aaatgagctcgctctcctgctcctacaggctgcagttgcgctgtgcctgtgcttccagttccatcgctttcccctcctccccagtccccactcccagatgcgatttccctctccaccgccacagcgcctagcttagccagccagccggcggccatcgccgccgcaatggcgaccgcgtcggaggacgaggccgcctcggaccgctgcagcggcagctacagccccagcgccgacgtcagcgagtccgaaacctccagtgactgctccgcgcccaccacgcgccgcttcgcctcctcctcctcggcctccgccaccgtctcccgcctcgcgtcctcctcctcgtcgctccccaccccggcatcggccaccgccttctacctctccaagccaacccccgacctctccgagatcgacatgatgaaggagcgcttcgcgaagctcctgctcggcgaggacatgtcgggcagcgggaagggcgtctgcaccgcgctcgccatctccaatgccatcaccaacctctccgccaccgtgttcggcgagctgtggaggctggagccgctcgcgacggcgaggaaggcgatgtggacgcgggagatggagtggctgctctccgtcgctgactccatcgtcgagctcaccccctccatccaggagctccccgaaggcggcggccagttcgaggtcatggtcccgcgcccgcgcagcgacctctacatgaacctccccgcgctcaagaagctcgacgccatgctcctcgcgatgattgacgggttcaaggatacggagttctggtacgtggacagaggggttatggtcgaggatagcgggggtccgttcccgtcctcatcctcgtcgtcttgtggccggccgtcagtgcggcaggaggacaagtggtggttgccctgcccaagagtgccgcccaaggggctgtccgtggacgcgaggaggaagctgcagcaaagcagggattgtgcaaaccagatactcaaggcggccatggcgattaacagcgatgtgctcgccgagatggaaatccccgaagtgtacctggagacactgcccaagaacggtaaatcttgcttgggtgagataatttatcgatacataacagctgagcagttctcaccagaatgtctcctagattgcttggatctatcatctgagcaccacacacttgaagtggcaaacagaatagaaggtgccatccatgtttggaaactgaaaggccaaaaaaagtcgacgcctcaagccaaatcaaagatatcttggggtggaaaagtgaagggtcttgttggagataaggagaagaaccacactttgtctgaaagagctgatggtctattgcagagcttaaggttgagatatccaggcctgccacaaacttcccttgacatgaacaagatacagtataacaaggatgtcgggcagtccatacttgaaagctactcaagggttctggagagcttggcatttaacataattgcaagaattgatgatgtgatctatgttgatgacgctacaaacagatcagctgctgccgagtctgtttcgatcttcaatcgtggcacaggcgtgccagttcagaagagaatctctccaagcccattctctattcagaattcgccgtatggctctccgttcgcaacacccactttctgctcctccaccccagttacaggcagtcctggaagggtacagcccccattaaacaaaaatattctaggaactcaagaaatcaaggtcgaaaagctcttttctggtgatctagagaaggtctggacatatgcaggaaacttgagcgctaggaaagacgctggagatgctcctgagagagactgaagggcgatggaggaaggtagacatgtaccgacagccgacagatcctgtaattgctagtagctagatcttcctgtacagaagcagcatgagtttttttttgttctttttgtagcgagccgatcattgtgtgctctgcttacaatgaatggatgtcacctgatctgaacagagaaacttgtagtttcagctgtagtttttttgtctggattggtt

SEQ ID NO: 13754 - protein, 557 aa, Zea mays subsp. mays
  peptide (1)..(557): Ceres Seq. ID no. 12391583
MATASEDEAASDRCSGSYSPSADVSESETSSDCSAPTTRRFASSSSASATVSRLASSSSSLPTPASATAFYLSKPTPDLSEIDMMKERFAKLLLGEDMSGSGKGVCTALAISNAITNLSATVFGELWRLEPLATARKAMWTREMEWLLSVADSIVELTPSIQELPEGGGQFEVMVPRPRSDLYMNLPALKKLDAMLLAMIDGFKDTEFWYVDRGVMVEDSGGPFPSSSSSSCGRPSVRQEDKWWLPCPRVPPKGLSVDARRKLQQSRDCANQILKAAMAINSDVLAEMEIPEVYLETLPKNGKSCLGEIIYRYITAEQFSPECLLDCLDLSSEHHTLEVANRIEGAIHVWKLKGQKKSTPQAKSKISWGGKVKGLVGDKEKNHTLSERADGLLQSLRLRYPGLPQTSLDMNKIQYNKDVGQSILESYSRVLESLAFNIIARIDDVIYVDDATNRSAAAESVSIFNRGTGVPVQKRISPSPFSIQNSPYGSPFATPTFCSSTPVTGSPGRVQPPLNKNILGTQEIKVEKLFSGDLEKVWTYAGNLSARKDAGDAPERD

SEQ ID NO: 13755 - protein, 474 aa, Zea mays subsp. mays
  peptide (1)..(474): Ceres Seq. ID no. 12391584
MMKERFAKLLLGEDMSGSGKGVCTALAISNAITNLSATVFGELWRLEPLATARKAMWTREMEWLLSVADSIVELTPSIQELPEGGGQFEVMVPRPRSDLYMNLPALKKLDAMLLAMIDGFKDTEFWYVDRGVMVEDSGGPFPSSSSSSCGRPSVRQEDKWWLPCPRVPPKGLSVDARRKLQQSRDCANQILKAAMAINSDVLAEMEIPEVYLETLPKNGKSCLGEIIYRYITAEQFSPECLLDCLDLSSEHHTLEVANRIEGAIHVWKLKGQKKSTPQAKSKISWGGKVKGLVGDKEKNHTLSERADGLLQSLRLRYPGLPQTSLDMNKIQYNKDVGQSILESYSRVLESLAFNIIARIDDVIYVDDATNRSAAAESVSIFNRGTGVPVQKRISPSPFSIQNSPYGSPFATPTFCSSTPVTGSPGRVQPPLNKNILGTQEIKVEKLFSGDLEKVWTYAGNLSARKDAGDAPERD

SEQ ID NO: 13756 - protein, 473 aa, Zea mays subsp. mays
  peptide (1)..(473): Ceres Seq. ID no. 12391585
MKERFAKLLLGEDMSGSGKGVCTALAISNAITNLSATVFGELWRLEPLATARKAMWTREMEWLLSVADSIVELTPSIQELPEGGGQFEVMVPRPRSDLYMNLPALKKLDAMLLAMIDGFKDTEFWYVDRGVMVEDSGGPFPSSSSSSCGRPSVRQEDKWWLPCPRVPPKGLSVDARRKLQQSRDCANQILKAAMAINSDVLAEMEIPEVYLETLPKNGKSCLGEIIYRYITAEQFSPECLLDCLDLSSEHHTLEVANRIEGAIHVWKLKGQKKSTPQAKSKISWGGKVKGLVGDKEKNHTLSERADGLLQSLRLRYPGLPQTSLDMNKIQYNKDVGQSILESYSRVLESLAFNIIARIDDVIYVDDATNRSAAAESVSIFNRGTGVPVQKRISPSPFSIQNSPYGSPFATPTFCSSTPVTGSPGRVQPPLNKNILGTQEIKVEKLFSGDLEKVWTYAGNLSARKDAGDAPERD

SEQ ID NO: 13757 - DNA, 1131 bp, Zea mays subsp. mays
  misc_feature (1)..(1131): Ceres Seq. ID no. 12419222
  misc_feature (1)..(1131): Ortholog of  Ceres SEQ ID NO 14311832 as cited in SEQ ID NO 59054
aagtcgcctccgcgcctccgcatataggcagcgtcgcccctctccgctttcccgaattagcgccaccgccacctccgcctccgatcccgcctctcccgggaacgaagccgagccgcccgaatcgccctccacccatccacccacccatatagccgggccccggaccgctctccaccggctcgcgcccccgacccctccgccgtccgccgccgcatcgcgtgggagggggaggaggaggaggaggaggaggccatggccgctgccgtagcttgcaggcgcgcggcgctcctgcacgggcaccagcagtggccgcagcggtgggcggccgcgccctgcccccgctccatctcgcagctcgtcaagaccaacggccgccgcgccttcctcgtagacaccctcgccctggtcaggaagctggagtcgcagggcgtgccccaccaagcaggcggaggcgatcacctccgccatcacggaggtcctcaacgacagcctcgagagcatctccgagtccttcgtctccaaggccgagatgcagaagagtgagatgctgcaggagtccaatatctccaagttcaagtcccaagtgcagagctcgcaggaaaaccatttctctttactacagcgggagactgagaaacttcgcggagatattgataagatgaggagtgaactgaagtatgagatcgacaaggtcaccgcagaacagcgattggatctgaatcttgaaagagggcgcatacgtgatgagcttgccaagcagaatgaggaaaccactgagcttaccacaaagcttgacaaggaaatccactcactgaaggcccagttggaggcagcaaagtacgatgtcatcaagtactgcataggtaccattgtttcgatctcagccgtcggcctcgccgtcctccgcatcgtgatgtgaaggcagcaaagcaaatacgttctttggttttacccatattcgtcgcccgtccgtggaaacccgcaagaagagaataggttctaattctgttcctagtttttaaaggggacaaaacgtgctcaggggagggggacacttggtagtagggagatgttgctcaaacttgtaaaaatagattgcccgtggaagaaatgcatccgaaatgattctcc

SEQ ID NO: 13758 - protein, 129 aa, Zea mays subsp. mays
  peptide (1)..(129): Ceres Seq. ID no. 12419223
MQKSEMLQESNISKFKSQVQSSQENHFSLLQRETEKLRGDIDKMRSELKYEIDKVTAEQRLDLNLERGRIRDELAKQNEETTELTTKLDKEIHSLKAQLEAAKYDVIKYCIGTIVSISAVGLAVLRIVM

SEQ ID NO: 13759 - protein, 124 aa, Zea mays subsp. mays
  peptide (1)..(124): Ceres Seq. ID no. 12419224
MLQESNISKFKSQVQSSQENHFSLLQRETEKLRGDIDKMRSELKYEIDKVTAEQRLDLNLERGRIRDELAKQNEETTELTTKLDKEIHSLKAQLEAAKYDVIKYCIGTIVSISAVGLAVLRIVM

SEQ ID NO: 13760 - protein, 96 aa, Zea mays subsp. mays
  peptide (1)..(96): Ceres Seq. ID no. 12419225
MAAAVACRRAALLHGHQQWPQRWAAAPCPRSISQLVKTNGRRAFLVDTLALVRKLESQGVPHQAGGGDHLRHHGGPQRQPREHLRVLRLQGRDAEE

SEQ ID NO: 13761 - DNA, 2328 bp, Zea mays subsp. mays
  misc_feature (1)..(2328): Ceres Seq. ID no. 12391602
  misc_feature (1)..(2328): Ortholog of  Ceres SEQ ID NO 13592852 as cited in SEQ ID NO 20709
  misc_feature (1)..(2328): Ortholog of  Ceres SEQ ID NO 13532807 as cited in SEQ ID NO 53012
  misc_feature (1)..(2328): Ortholog of  Ceres SEQ ID NO 14313425 as cited in SEQ ID NO 54973
  misc_feature (1)..(2328): Ortholog of  Ceres SEQ ID NO 13663060 as cited in SEQ ID NO 60964
  misc_feature (1)..(2328): Ortholog of  Ceres SEQ ID NO 13500573 as cited in SEQ ID NO 67431
  misc_feature (1)..(2328): Ortholog of  Ceres SEQ ID NO 13656501 as cited in SEQ ID NO 69206
atcgttttccgtcctccagtccgtcaatccagtccccatccccacggcgccgacgactcgggggcttcccccccttggacttggcccgggtgggagtagcacgtcggggaagggaagcaagcgtccgcgagtaaggacagaaaaccgaagggaggagtggagaggaggagcttgcttggagcgggtggacgggtggtgtgtatatagttaagcgggcgggcgggcagccaatgccgtcgggcgcgcagggctaggagcatgggcggagggggcgcgatcgtgcacggcttccgccgctggttccaccgccggagcgaaggctccacctccaactccaaccagccgtccctcgccggcgagggggaagcggacgacggctcatccgatctcgaggtcatcgaggacccggatctcctcggcctccgcgccatccgcgtgcccaagcgcaagatgccgctgcccgtcgagagccacaggaagaactcagtagaaatggagttcttcacagagtacggagaggcaagccagtaccagatccaagaagtcattggtaaagggagctacggagtagttgctgcagctgtggacacccgcaccggtgagcgggttgctatcaagaagatcaatgatgtgtttgagcacgtctcggatgccacacgcatactgcgggagatcaagctcctccggttgcttcgtcacccagacatagtcgagattaagcacatcatgctccctccttctcggagggagttccaagacatctatgttgtttttgagctcatggagtcggatctccatcaagtgatcagggcgaatgatgacctcacccctgaacatcaccagtttttcctgtaccaacttcttcgagctctcaagtacatacatgccgctaatgtattccatcgtgatctaaagcccaagaatatactggctaactcggactgcaaactgaaaatatgtgactttggacttgcccgtgcatcattcaatgatgccccttcagctatattttggacagactatgtggcaacaaggtggtaccgggcacctgaactatgtggttcctttttctccaaatacactcctgcaattgatatttggagcattgggtgcatatttgctgaacttctcactggaaggccactatttcctgggaagaatgttgtacaccaattagatattataacagatcttcttgggactccatcatctgagaccttatcccggattcgaaatgagaaggccaggagatatttgagctgcatgcggaaaaaatatcccgtgccctttactcataaatttcgacatgctgatcctttggctcttcgtcttctagagcgtttgcttgcatttgatcctaaagaccggcctagtgcagaagaggctctagctgatccatactttgcatcccttgctaatgtagaacgtgagccatcaagacacccgatttctaaacttgagtttgaatttgaaagaaagaagctggccaaagatgatgttagagaactgatctatcgagagattttggagtatcatccacagatgctggaggagtacatgaaaggcggagaacagattagcttcctctatccaagcggagtcgaccgcttcaaactgcagttcgctcatcttgaggagcattacagcaaaggagaaagaggttccccactgcaaagaaagcatgcttccttaccaagggaaagagtggttgtatccaaggatggcaatactgaacaacaaattaatgaccaggagagaagcgcagattctgttgcccgcactaccgtgagccctccaaggtcagaggatgctgacatggatgatgtgaaacccacaagcttaagctctcggagctacctgaagagtgcaagcataagcgcttccaagtgcgtcgttgtcagaaataaacacccagagccagaggatgatggaatacctgaggagatggaaggcaccgtcgatggattgtctgaaaaggtctccaggatgcactcctaaggcaggactgtccatggcgacagcaatctcgacacaagatttctgtctggtgcactgtaatgccgacgacacactgtttggatcttgtgtacacccacagctagttcaactaagatgtagcactagttcgtccatggaggaagcagaatggacgatgaagtgtggtcagcctgtcgaccatgaggtgttttcttccaatggagtctagggtatgtttgagttctacaacggcttgtgccgtacgaagtgtcagcagtgtacgaggaggaggatatcgttgtcagtacacattttgcctgtctagaaaattatgagtactttctccgatcg

SEQ ID NO: 13762 - protein, 579 aa, Zea mays subsp. mays
  peptide (1)..(579): Ceres Seq. ID no. 12391603
MGGGGAIVHGFRRWFHRRSEGSTSNSNQPSLAGEGEADDGSSDLEVIEDPDLLGLRAIRVPKRKMPLPVESHRKNSVEMEFFTEYGEASQYQIQEVIGKGSYGVVAAAVDTRTGERVAIKKINDVFEHVSDATRILREIKLLRLLRHPDIVEIKHIMLPPSRREFQDIYVVFELMESDLHQVIRANDDLTPEHHQFFLYQLLRALKYIHAANVFHRDLKPKNILANSDCKLKICDFGLARASFNDAPSAIFWTDYVATRWYRAPELCGSFFSKYTPAIDIWSIGCIFAELLTGRPLFPGKNVVHQLDIITDLLGTPSSETLSRIRNEKARRYLSCMRKKYPVPFTHKFRHADPLALRLLERLLAFDPKDRPSAEEALADPYFASLANVEREPSRHPISKLEFEFERKKLAKDDVRELIYREILEYHPQMLEEYMKGGEQISFLYPSGVDRFKLQFAHLEEHYSKGERGSPLQRKHASLPRERVVVSKDGNTEQQINDQERSADSVARTTVSPPRSEDADMDDVKPTSLSSRSYLKSASISASKCVVVRNKHPEPEDDGIPEEMEGTVDGLSEKVSRMHS

SEQ ID NO: 13763 - protein, 515 aa, Zea mays subsp. mays
  peptide (1)..(515): Ceres Seq. ID no. 12391604
MPLPVESHRKNSVEMEFFTEYGEASQYQIQEVIGKGSYGVVAAAVDTRTGERVAIKKINDVFEHVSDATRILREIKLLRLLRHPDIVEIKHIMLPPSRREFQDIYVVFELMESDLHQVIRANDDLTPEHHQFFLYQLLRALKYIHAANVFHRDLKPKNILANSDCKLKICDFGLARASFNDAPSAIFWTDYVATRWYRAPELCGSFFSKYTPAIDIWSIGCIFAELLTGRPLFPGKNVVHQLDIITDLLGTPSSETLSRIRNEKARRYLSCMRKKYPVPFTHKFRHADPLALRLLERLLAFDPKDRPSAEEALADPYFASLANVEREPSRHPISKLEFEFERKKLAKDDVRELIYREILEYHPQMLEEYMKGGEQISFLYPSGVDRFKLQFAHLEEHYSKGERGSPLQRKHASLPRERVVVSKDGNTEQQINDQERSADSVARTTVSPPRSEDADMDDVKPTSLSSRSYLKSASISASKCVVVRNKHPEPEDDGIPEEMEGTVDGLSEKVSRMHS

SEQ ID NO: 13764 - protein, 501 aa, Zea mays subsp. mays
  peptide (1)..(501): Ceres Seq. ID no. 12391605
MEFFTEYGEASQYQIQEVIGKGSYGVVAAAVDTRTGERVAIKKINDVFEHVSDATRILREIKLLRLLRHPDIVEIKHIMLPPSRREFQDIYVVFELMESDLHQVIRANDDLTPEHHQFFLYQLLRALKYIHAANVFHRDLKPKNILANSDCKLKICDFGLARASFNDAPSAIFWTDYVATRWYRAPELCGSFFSKYTPAIDIWSIGCIFAELLTGRPLFPGKNVVHQLDIITDLLGTPSSETLSRIRNEKARRYLSCMRKKYPVPFTHKFRHADPLALRLLERLLAFDPKDRPSAEEALADPYFASLANVEREPSRHPISKLEFEFERKKLAKDDVRELIYREILEYHPQMLEEYMKGGEQISFLYPSGVDRFKLQFAHLEEHYSKGERGSPLQRKHASLPRERVVVSKDGNTEQQINDQERSADSVARTTVSPPRSEDADMDDVKPTSLSSRSYLKSASISASKCVVVRNKHPEPEDDGIPEEMEGTVDGLSEKVSRMHS

SEQ ID NO: 13765 - DNA, 971 bp, Zea mays subsp. mays
  misc_feature (1)..(971): Ceres Seq. ID no. 12391568
  misc_feature (1)..(971): Ortholog of  Ceres SEQ ID NO 13595452 as cited in SEQ ID NO 56454
acacctccttatcgcaacgcgagcagcagttgcattggaggcgaggaggagccacgccggggctcaaggaatggccgctctccgccacctcgctgccggccccacctgccaccaccaccaccacggcgtcgcggcagccaccgcctccctccggctccatcgcctccccctccccttccgcccccttcgctcccgctccggctccttcaccagggtttatgcgatctccagcaatgacatcagggtcggcaccaacgtcgaggtcgacggcgcgccatggaaagttctagagttcctccacgtcaagcctggaaaaggcgctgctttcgtcaggacaaaactgcgtaactatgtaactggcaacacggtcgagaaaaccttccgtgctggaagtacgctacaggaaccatccctttcaaaggagaccaagcaatttacatacaaggatggctcccagttcgtgttcatggatctgacaacatttgaagaaagtcggttaaatgaagcagatgtcggtgacaaacaaaaatggctgaaagaggggatggactgcaatttgttgtactggaatgggaagatcattgatttcgacctcccaatcactgtgaggctgactgtaactgatactgacccaggggcaagtgatagtgcgcaaggaggaacaaagcctgcaaccctggaaactggagctgttgtcactgtgccctcttttgtgaacgtaggcgatgatattctggtggattcaagaactgggcagtatatgaatcgagcataacgaattgaagaggatttcggatttgaggagagtactgcttttttgtttgaccattttagtcccattcacttgtacaaacgccctgggtctttggccccaggaaatttacatttctgctgcatgtgaatcctcactctgattataaccatgtacatctttggtttccagatataaggaaaattgtgttcagattttt

SEQ ID NO: 13766 - protein, 257 aa, Zea mays subsp. mays
  peptide (1)..(257): Ceres Seq. ID no. 12391569
HLLIATRAAVALEARRSHAGAQGMAALRHLAAGPTCHHHHHGVAAATASLRLHRLPLPFRPLRSRSGSFTRVYAISSNDIRVGTNVEVDGAPWKVLEFLHVKPGKGAAFVRTKLRNYVTGNTVEKTFRAGSTLQEPSLSKETKQFTYKDGSQFVFMDLTTFEESRLNEADVGDKQKWLKEGMDCNLLYWNGKIIDFDLPITVRLTVTDTDPGASDSAQGGTKPATLETGAVVTVPSFVNVGDDILVDSRTGQYMNRA

SEQ ID NO: 13767 - protein, 234 aa, Zea mays subsp. mays
  peptide (1)..(234): Ceres Seq. ID no. 12391570
MAALRHLAAGPTCHHHHHGVAAATASLRLHRLPLPFRPLRSRSGSFTRVYAISSNDIRVGTNVEVDGAPWKVLEFLHVKPGKGAAFVRTKLRNYVTGNTVEKTFRAGSTLQEPSLSKETKQFTYKDGSQFVFMDLTTFEESRLNEADVGDKQKWLKEGMDCNLLYWNGKIIDFDLPITVRLTVTDTDPGASDSAQGGTKPATLETGAVVTVPSFVNVGDDILVDSRTGQYMNRA

SEQ ID NO: 13768 - DNA, 1836 bp, Zea mays subsp. mays
  misc_feature (1)..(1836): Ceres Seq. ID no. 12436188
  misc_feature (1)..(1836): Ortholog of  Ceres SEQ ID NO 15176532 as cited in SEQ ID NO 58184
  misc_feature (1)..(1836): Ortholog of  Ceres SEQ ID NO 14303627 as cited in SEQ ID NO 62070
  misc_feature (1)..(1836): Ortholog of  Ceres SEQ ID NO 13597546 as cited in SEQ ID NO 65017
  misc_feature (1)..(1836): Ortholog of  Ceres SEQ ID NO 14308015 as cited in SEQ ID NO 65798
  misc_feature (1)..(1836): Ortholog of  Ceres SEQ ID NO 14307912 as cited in SEQ ID NO 66380
  misc_feature (1)..(1836): Ortholog of  Ceres SEQ ID NO 15176077 as cited in SEQ ID NO 66728
  misc_feature (1)..(1836): Ortholog of  Ceres SEQ ID NO 14307908 as cited in SEQ ID NO 67189
  misc_feature (1)..(1836): Ortholog of  Ceres SEQ ID NO 14308045 as cited in SEQ ID NO 67444
  misc_feature (1)..(1836): Ortholog of  Ceres SEQ ID NO 13654353 as cited in SEQ ID NO 68318
agcaaccaaagcacacccctcctccttgctctgccgtgctcggagttgggagttggagcaccaccaccaccactcttcccctctcctctccctcctcgctcgtcctgttggaagcagcacacacacgagagagaaagagagacacaaggagatggcgctgctgttgctcctgctggccgtgctcggcgtggtgctggcgagcagcctgctgctgcggtggaacgagctgcggtacagccgccgccggggcctgccgccgggcacaatggggtggccgctcttcggcgagaccaccgagttcctcaagcaggggcctagcttcatgaagcagaggaggctcaggtacgggagcctgttccggacgcacatcctgggctgccccacggtggtgtgcatggagcccggagctgaaccggcgggcgctggccagcgagggcgccggcttcgtcccgggctacccgcagtccatgctcgacatcctggggcccaacaacatcgccgccgtgcacggcccgctccaccgcgccatgcggggcgccatgctcgcgctcacgcggccacacatgatccgcgccgcgctcctccccaagatcgacgccttcatgcgcgcccacctccacggctgggccggacgccgcgtcgacatccaggagatgaccaaggagatggctttgctctcgggctctcaggcagatcgctggcatctctgcgggcccacactccgacgccctaaaggcagagctgtacacccttgtacttggcaccttctccctgccaatcaacgtcccaggaaccaactacagcaaagggctccaggcaaggaagaagctcgtggcaatgctgcggcagatgatcgctgaccggaggtcctctggctgcgcccgagacgacatgctggacgcgctgctcagcggcaacgagggtaccagggcgaagctcagcgacgaccagatcatcgaccttctcatcaccctcatatactctgggtacgagactgtgtcgaccacctcgatgatggcggtgaagtacctgtcggacaaccccaaagctctcggacagatcaggaaagagcaccttgacatcaggaaggctaagtcaccggaggatccccttgactggaacgactacaagtccatgaccttcaccaaagctgtcatttatgagactctaaggctagctacagtagtcaacgggctgctgaggaaaactacccatgacgtagaaatgaatgggtatgttattccaaaaggctggagaatttatgtatacacaagggagataaactacgacccgttcctgtacccggaacccatggttttcaacccatggagatggatggagacgaacctggaatcacatccgcacttcatgctgttcggaggaggtgcccgcatgtgcccagggaaggaagtaggaacagttgaaatcgcaacgttccttcactatttcgtgacgcgttacagatgggaggaggagggaaacaacacaatatcgaagttccccagagtggcggctcccaatgggctacatatccgagttcaagattactgaacttcgtgaggcgttttgtgaagtttaggtagggattcagacagatagaaataacccatgcgatgctgatgctgctggcctcttcgaaaggactagaacagccattagtgcctgtaaaatgtgtccatgccgatagtaatgttattatagggaggatataggtatcataggtttattagaaatttgatgtagaaagccaacagatgctcctgtattcttttgctccatcaaaacagaggtatcatttggcttctatgcttttgaatcgaacatggtacagaaccc

SEQ ID NO: 13769 - protein, 243 aa, Zea mays subsp. mays
  peptide (1)..(243): Ceres Seq. ID no. 12436189
ATKAHPSSLLCRARSWELEHHHHHSSPLLSLLARPVGSSTHTREKERHKEMALLLLLLAVLGVVLASSLLLRWNELRYSRRRGLPPGTMGWPLFGETTEFLKQGPSFMKQRRLRYGSLFRTHILGCPTVVCMEPGAEPAGAGQRGRRLRPGLPAVHARHPGAQQHRRRARPAPPRHAGRHARAHAATHDPRRAPPQDRRLHARPPPRLGRTPRRHPGDDQGDGFALGLSGRSLASLRAHTPTP

SEQ ID NO: 13770 - protein, 237 aa, Zea mays subsp. mays
  peptide (1)..(237): Ceres Seq. ID no. 12436190
MLRQMIADRRSSGCARDDMLDALLSGNEGTRAKLSDDQIIDLLITLIYSGYETVSTTSMMAVKYLSDNPKALGQIRKEHLDIRKAKSPEDPLDWNDYKSMTFTKAVIYETLRLATVVNGLLRKTTHDVEMNGYVIPKGWRIYVYTREINYDPFLYPEPMVFNPWRWMETNLESHPHFMLFGGGARMCPGKEVGTVEIATFLHYFVTRYRWEEEGNNTISKFPRVAAPNGLHIRVQDY

SEQ ID NO: 13771 - protein, 233 aa, Zea mays subsp. mays
  peptide (1)..(233): Ceres Seq. ID no. 12436191
MIADRRSSGCARDDMLDALLSGNEGTRAKLSDDQIIDLLITLIYSGYETVSTTSMMAVKYLSDNPKALGQIRKEHLDIRKAKSPEDPLDWNDYKSMTFTKAVIYETLRLATVVNGLLRKTTHDVEMNGYVIPKGWRIYVYTREINYDPFLYPEPMVFNPWRWMETNLESHPHFMLFGGGARMCPGKEVGTVEIATFLHYFVTRYRWEEEGNNTISKFPRVAAPNGLHIRVQDY

SEQ ID NO: 13772 - protein, 193 aa, Zea mays subsp. mays
  peptide (1)..(193): Ceres Seq. ID no. 12436192
MALLLLLLAVLGVVLASSLLLRWNELRYSRRRGLPPGTMGWPLFGETTEFLKQGPSFMKQRRLRYGSLFRTHILGCPTVVCMEPGAEPAGAGQRGRRLRPGLPAVHARHPGAQQHRRRARPAPPRHAGRHARAHAATHDPRRAPPQDRRLHARPPPRLGRTPRRHPGDDQGDGFALGLSGRSLASLRAHTPTP

SEQ ID NO: 13773 - DNA, 2082 bp, Zea mays subsp. mays
  misc_feature (1)..(2082): Ceres Seq. ID no. 12436164
  misc_feature (1)..(2082): Ortholog of  Ceres SEQ ID NO 15171453 as cited in SEQ ID NO 60332
aagggaaacttttgaaaagctttttcaaaatttggagcaaggcactgaggcgagcgcgggtggccgccggcagcgaggaaggctactgttaggatcatctcgctacaaaatcgggttcccgagatggaggggaaggcggtagccgtcggttgtggtggcgccggcgtcgatccggcggatgatctcaagtacatctccgggctgagcaccattctcgtggccaccatccaggaagtgaaggaccaggtctcccagatggagttcatcttctgcagccagctcttcccgcacatccaggccaagtcgaagcttgtccaggcgcatctcgccgacacgatgaaggccagtgaggttgagtggaggaagacggaggctggcctggtgaagcagctggaggaggtcagccgtggtaagatgctcgcggaggagagattgctgcaactgggcacctctcttgaggagatgaagaggaagcttgtggattcggagcaattggctgcgaggcatgaggcagagaagaaacagcttctggggaggttggaggatgaaacgaggaaaggtgaggtggtatgtcagctccaaagggagattgaggagaaggacgctgaggtggtcagggagagagaggcacatcagcggctgctgcaggaatttgagcaattggctgcgaggcatgaatctgagaagaaacagcttctggggaggttggaggatgagatggggaatggtgaggtggtacgtcagctccagagggagattgaggagaaggccgctgaggtggtcagggagagagaggcacaccagcggctgcagcagcaggttgacctgaaggataagaatctgcttctggagcagagcaagcggagggacttgattgaggattacactcagctgaagacaaactacaagcatttgaagtctcagtacacctttcttcttgggaagattgaccagcatgaaggctccaagcctcctgaggacattcctgcagatagaagaaacactgaaagtcctccaagtaagaggaagttcaaagatttggagcacacaaacaaggagcgcatccaaatccttcccaacacaagggacctgaagaatgactctgctccaggtgccaaagcccaagctgcccaacacgctagttcagtcaggagtccaatcagaaactcacaccttgctgtgccatctcgcccaatgaatccattggcaaatcattctgccaacaattcaaaactacaagcttcaaccagtgtcgccagcccatgtctaaattggagggagacccgtgcacgcaaagaacaaggtgttgctgatccacacgatgatttccttgatacacctctggaagctgtcaagaataccatcaggaaccctgcaactcccgaagaagcacaggcacttgccgcctctcctcaagttatggatttcgacaattcagatgatgaaacccaagatctgaatattgcaactcaagccctccggcacatccccaatatgccagttcccaagcagcaaaacacaatatcggtacatccaccaaagaaagacatcaaatatagagaatcagtgagaaagaaagctgaccgggagaacctgaaaggtgttgagtgcaagcaatgcaagaagttttatgatgctgttcttcctggtggtcgtgcagatggcgatggtgcaggctctacaagcttacgatgtgagcaccacgatggtgtgtcaaggcatcggtacaggtacgcgccgcctctgacgccggaagggttttggaacattggtttcgaatcagaaatgtagcactacatcaagtagcaggaaaccttcagtgtcctcggtcaccccaagatattgtagcaatgactacgacaagttgcatgtcgctgctcaagttgcggaaatagtcattctgtgattaaggttgatggtaggcagtagctactgtgaatatgttggagatagaatgcactgtcagctatttacctttttgtggattacatcaagttgatcattttgtagcgaaccacctttaacataccattggaaagcaattcttttttatagaaaggagacatctgaataacagcttac

SEQ ID NO: 13774 - protein, 555 aa, Zea mays subsp. mays
  peptide (1)..(555): Ceres Seq. ID no. 12436165
MEGKAVAVGCGGAGVDPADDLKYISGLSTILVATIQEVKDQVSQMEFIFCSQLFPHIQAKSKLVQAHLADTMKASEVEWRKTEAGLVKQLEEVSRGKMLAEERLLQLGTSLEEMKRKLVDSEQLAARHEAEKKQLLGRLEDETRKGEVVCQLQREIEEKDAEVVREREAHQRLLQEFEQLAARHESEKKQLLGRLEDEMGNGEVVRQLQREIEEKAAEVVREREAHQRLQQQVDLKDKNLLLEQSKRRDLIEDYTQLKTNYKHLKSQYTFLLGKIDQHEGSKPPEDIPADRRNTESPPSKRKFKDLEHTNKERIQILPNTRDLKNDSAPGAKAQAAQHASSVRSPIRNSHLAVPSRPMNPLANHSANNSKLQASTSVASPCLNWRETRARKEQGVADPHDDFLDTPLEAVKNTIRNPATPEEAQALAASPQVMDFDNSDDETQDLNIATQALRHIPNMPVPKQQNTISVHPPKKDIKYRESVRKKADRENLKGVECKQCKKFYDAVLPGGRADGDGAGSTSLRCEHHDGVSRHRYRYAPPLTPEGFWNIGFESEM

SEQ ID NO: 13775 - protein, 511 aa, Zea mays subsp. mays
  peptide (1)..(511): Ceres Seq. ID no. 12436166
MEFIFCSQLFPHIQAKSKLVQAHLADTMKASEVEWRKTEAGLVKQLEEVSRGKMLAEERLLQLGTSLEEMKRKLVDSEQLAARHEAEKKQLLGRLEDETRKGEVVCQLQREIEEKDAEVVREREAHQRLLQEFEQLAARHESEKKQLLGRLEDEMGNGEVVRQLQREIEEKAAEVVREREAHQRLQQQVDLKDKNLLLEQSKRRDLIEDYTQLKTNYKHLKSQYTFLLGKIDQHEGSKPPEDIPADRRNTESPPSKRKFKDLEHTNKERIQILPNTRDLKNDSAPGAKAQAAQHASSVRSPIRNSHLAVPSRPMNPLANHSANNSKLQASTSVASPCLNWRETRARKEQGVADPHDDFLDTPLEAVKNTIRNPATPEEAQALAASPQVMDFDNSDDETQDLNIATQALRHIPNMPVPKQQNTISVHPPKKDIKYRESVRKKADRENLKGVECKQCKKFYDAVLPGGRADGDGAGSTSLRCEHHDGVSRHRYRYAPPLTPEGFWNIGFESEM

SEQ ID NO: 13776 - protein, 484 aa, Zea mays subsp. mays
  peptide (1)..(484): Ceres Seq. ID no. 12436167
MKASEVEWRKTEAGLVKQLEEVSRGKMLAEERLLQLGTSLEEMKRKLVDSEQLAARHEAEKKQLLGRLEDETRKGEVVCQLQREIEEKDAEVVREREAHQRLLQEFEQLAARHESEKKQLLGRLEDEMGNGEVVRQLQREIEEKAAEVVREREAHQRLQQQVDLKDKNLLLEQSKRRDLIEDYTQLKTNYKHLKSQYTFLLGKIDQHEGSKPPEDIPADRRNTESPPSKRKFKDLEHTNKERIQILPNTRDLKNDSAPGAKAQAAQHASSVRSPIRNSHLAVPSRPMNPLANHSANNSKLQASTSVASPCLNWRETRARKEQGVADPHDDFLDTPLEAVKNTIRNPATPEEAQALAASPQVMDFDNSDDETQDLNIATQALRHIPNMPVPKQQNTISVHPPKKDIKYRESVRKKADRENLKGVECKQCKKFYDAVLPGGRADGDGAGSTSLRCEHHDGVSRHRYRYAPPLTPEGFWNIGFESEM

SEQ ID NO: 13777 - DNA, 2211 bp, Zea mays subsp. mays
  misc_feature (1)..(2211): Ceres Seq. ID no. 12550712
  misc_feature (1)..(2211): Ortholog of  Ceres SEQ ID NO 14310841 as cited in SEQ ID NO 53666
  misc_feature (1)..(2211): Ortholog of  Ceres SEQ ID NO 15178736 as cited in SEQ ID NO 56439
  misc_feature (1)..(2211): Ortholog of  Ceres SEQ ID NO 14308493 as cited in SEQ ID NO 60320
acacacaaaccgccgccgccgctaccttcaccactgcggactgcaccagctgcccgccgactactccgtttctcttcctagtacattgccgcgtcgaaggcgaggtcctcagcagcgccggcggactccgctcgcacgccatactcagcctactccgtcttcccctgtctagcagacaccctcttcccctctccactcccaatcttatcgtcgcctccctcgacgtcgctgctgcctccacttcaccatggcgcttcacgccccggtcctcgttctgaaggactcgctgaagcgggagtctggcgcgaaggttcaccaagccaacatccaggcggccaaggctgtcgctgacatcatacgcactacattgggtcccagatccatgctgaaaatgcttctggatgctagtggaggtattgtggttactaatgatggtaatgccattttgagggaaatagacattgcacaccctgctgccaagtctatgatcgaactaagtcgtacacaggatgaagaagttggtgatggcactacatctgtcattgttctagctggagagatgctacatgttgcacaggcattcatcgacaagaactaccatccaactgttatttgccgagcatataccaaagcgcttgatgatgctattgctgtacttgacaaaattgcaatggctgttgatgtgaatgatcgtggggcaatgctaggccttgtgaagagctccattggtacgaaattcactggccagtttggtgaccttattgctgaccttgctattgatgctactacaacagcaggtgttgaccttggtcagggtatgcgtgaagttgatatcaagaaatacattaaagttgaaaaggttcctggtggtcagttggaggattctagagtccttaaaggagttatgatcaataaggatgtcgtggctcctgggaaaatgaggagaaagatagtaaacccccgtatcatcctgttggactgccctgttgagtataagaaaggagaaaatcagaccaacgctgagttgatgaaggaagaagattggcaggttctgttagagatggaggaagaatacataaagaacctgtgcggtcaaattctaaaattcaagcctgatttagtcataactganaaagggctcagtgatctcgctatccattatttgagcaaggctggggttagtgcaatccgtagacttaggaaaactgacaacaacaggattgctaaagcttgtggagcagttatagtgaacaggcctgaggagctccaagaatctgatgttggaacaagagctggcctgttcgaggttaagaagataggtgatgagttcttttcctttattgttgactgtaaagatcccaaggcatgtactgttctgttgaggggagcaagcaaggatgtattgaatgaagttgagagaaacctgcaggatgccatgtccgttgcaaggaacattttgaaaaatccaaaactccttcctggaggtggcgctacagagctgactgtatcagcaacactgaagcaaaagagttcttcagttgaaggtgtggaaaagtggccctatgaagctgctgctctagcatttgaggcaattccaaggactttggcccaaaattgcggtttgaatgttattaggataatgacacaacttcaaggaaagcatgctaatggtgaaaatgcgtgggttggcattgatggaaggactggtgatattgtcgatatgaaagagcgaaagatctgggattcctacagtgttaaagcacaaacgttcaagacagcaattgaggctgcttgcatgcttttgagaatcgatgacattgtcagcggtatcaagaagaagcaggctcctggagcctcagctcccaaagcaaccccaaattgaaactgagggcgatgctgacaatgagcagatgattccagagtagaggctgtggcgaacctgcactggcaaagttatttactagtgtcaaggtagcacttcgagcagagttcattttggtggttagccttagcttaaagatgcaccttgttttatatagtttgatgagtggtacgagggttttgggatccaggttttgagtgtggttgctgctcgttttgatttggactgatgaaaaagcagtgaaactagcctttatttatggctaactttgcctgttgtatgccgcaaatctactttttttcttggcaacgtctcgtttcgcacgatcc

SEQ ID NO: 13778 - protein, 544 aa, Zea mays subsp. mays
  peptide (1)..(544): Ceres Seq. ID no. 12550713
  misc_feature (295)..(295): Xaa is any aa, unknown or other
MALHAPVLVLKDSLKRESGAKVHQANIQAAKAVADIIRTTLGPRSMLKMLLDASGGIVVTNDGNAILREIDIAHPAAKSMIELSRTQDEEVGDGTTSVIVLAGEMLHVAQAFIDKNYHPTVICRAYTKALDDAIAVLDKIAMAVDVNDRGAMLGLVKSSIGTKFTGQFGDLIADLAIDATTTAGVDLGQGMREVDIKKYIKVEKVPGGQLEDSRVLKGVMINKDVVAPGKMRRKIVNPRIILLDCPVEYKKGENQTNAELMKEEDWQVLLEMEEEYIKNLCGQILKFKPDLVITXKGLSDLAIHYLSKAGVSAIRRLRKTDNNRIAKACGAVIVNRPEELQESDVGTRAGLFEVKKIGDEFFSFIVDCKDPKACTVLLRGASKDVLNEVERNLQDAMSVARNILKNPKLLPGGGATELTVSATLKQKSSSVEGVEKWPYEAAALAFEAIPRTLAQNCGLNVIRIMTQLQGKHANGENAWVGIDGRTGDIVDMKERKIWDSYSVKAQTFKTAIEAACMLLRIDDIVSGIKKKQAPGASAPKATPN

SEQ ID NO: 13779 - protein, 499 aa, Zea mays subsp. mays
  peptide (1)..(499): Ceres Seq. ID no. 12550714
  misc_feature (250)..(250): Xaa is any aa, unknown or other
MLKMLLDASGGIVVTNDGNAILREIDIAHPAAKSMIELSRTQDEEVGDGTTSVIVLAGEMLHVAQAFIDKNYHPTVICRAYTKALDDAIAVLDKIAMAVDVNDRGAMLGLVKSSIGTKFTGQFGDLIADLAIDATTTAGVDLGQGMREVDIKKYIKVEKVPGGQLEDSRVLKGVMINKDVVAPGKMRRKIVNPRIILLDCPVEYKKGENQTNAELMKEEDWQVLLEMEEEYIKNLCGQILKFKPDLVITXKGLSDLAIHYLSKAGVSAIRRLRKTDNNRIAKACGAVIVNRPEELQESDVGTRAGLFEVKKIGDEFFSFIVDCKDPKACTVLLRGASKDVLNEVERNLQDAMSVARNILKNPKLLPGGGATELTVSATLKQKSSSVEGVEKWPYEAAALAFEAIPRTLAQNCGLNVIRIMTQLQGKHANGENAWVGIDGRTGDIVDMKERKIWDSYSVKAQTFKTAIEAACMLLRIDDIVSGIKKKQAPGASAPKATPN

SEQ ID NO: 13780 - protein, 496 aa, Zea mays subsp. mays
  peptide (1)..(496): Ceres Seq. ID no. 12550715
  misc_feature (247)..(247): Xaa is any aa, unknown or other
MLLDASGGIVVTNDGNAILREIDIAHPAAKSMIELSRTQDEEVGDGTTSVIVLAGEMLHVAQAFIDKNYHPTVICRAYTKALDDAIAVLDKIAMAVDVNDRGAMLGLVKSSIGTKFTGQFGDLIADLAIDATTTAGVDLGQGMREVDIKKYIKVEKVPGGQLEDSRVLKGVMINKDVVAPGKMRRKIVNPRIILLDCPVEYKKGENQTNAELMKEEDWQVLLEMEEEYIKNLCGQILKFKPDLVITXKGLSDLAIHYLSKAGVSAIRRLRKTDNNRIAKACGAVIVNRPEELQESDVGTRAGLFEVKKIGDEFFSFIVDCKDPKACTVLLRGASKDVLNEVERNLQDAMSVARNILKNPKLLPGGGATELTVSATLKQKSSSVEGVEKWPYEAAALAFEAIPRTLAQNCGLNVIRIMTQLQGKHANGENAWVGIDGRTGDIVDMKERKIWDSYSVKAQTFKTAIEAACMLLRIDDIVSGIKKKQAPGASAPKATPN

SEQ ID NO: 13781 - DNA, 1079 bp, Zea mays subsp. mays; identical to SEQ ID NO: 7842
  misc_feature (1)..(1079): Ceres Seq. ID no. 12402905
  misc_feature (1)..(1079): Ortholog of  Ceres SEQ ID NO 15169533 as cited in SEQ ID NO 67374

SEQ ID NO: 13782 - protein, 295 aa, Zea mays subsp. mays; identical to SEQ ID NO: 7843
  peptide (1)..(295): Ceres Seq. ID no. 12402906

SEQ ID NO: 13783 - protein, 247 aa, Zea mays subsp. mays; identical to SEQ ID NO: 7844
  peptide (1)..(247): Ceres Seq. ID no. 12402907

SEQ ID NO: 13784 - protein, 227 aa, Zea mays subsp. mays; identical to SEQ ID NO: 7845
  peptide (1)..(227): Ceres Seq. ID no. 12402908

SEQ ID NO: 13785 - DNA, 1325 bp, Zea mays subsp. mays
  misc_feature (1)..(1325): Ceres Seq. ID no. 13587551
  misc_feature (1)..(1325): Ortholog of  Ceres SEQ ID NO 15169142 as cited in SEQ ID NO 58748
saacatcctaatcgaaaacatagttgtgttctatatagttcctctcactgctatcgctgctgttacaaccctggaaaacctggaggcgaagctgcccttcctgaagccagtggtggagcaaccagcaatcaagacggtttggaggcctaccttccccagattgcactcattgtgttcctcgcattgctacctactcttcttatgtttctctcgaaacaagaggggatcccttcgcagggccatgcagtcagggcggcatcgggaaagtatttctatttcatcgttttcaacgtcttcctttgctatacgcttggaagcacattgttcaaatctttgacgaccattatcaatcaccctgctgagattgtgaatatgcttgccaagagcctgcctggaagcgcaacgttcttcctcacgtttgtcgcgctgaagttcttggttggctatggccttgagctctctcgcctggttcctctcatcattttccacctgaaaaggaagtacctatgcaagacggaggaagaagtgagagcggcatgggctccagtggatctgggatataacaccaggataccaaatgacatgctcatcgcaacagttgttctgtgctactcagtcattgcgcctttgattattccgttcggtgttgcatactttgccctcggttggcttatagcaagaaatcagatcctgagagtttacgttcctagctacgaaagctacggacgaatgtggccacacatgcacacgaggatcatcgcggctctgatggtttaccagaccaccatgatcggcttcatctccctgaagaagttcgcctacgcgtccgttctcgtgcccctgcttccagccagcataatcttcgcctacgtctgccacatgcgcttctacccggcgttcgccaagactcccctggaggtggtggtgcggcacgacctgaaggagactccgaacatggaggccatctacaccgcgtacataccgccgtgcttgaagcctgataagctcgaagatctggacgctttcgaggacgcccagtcgcgcgccacctccagagtcccgtctatttagctgtgcacatcgttgacttccgcggaagacttgaagaaattctgttcacttgtcattacattcgtgtgggatttctgatggatttcaatgcttccacgttgaaccctctggacttgtttcaggataggaatctgatgtgaagaatgtacatatgctcgatctgtgtgtctgctgagcgtgtgtggatgtggactsctgtaggtaggtagatsctgtggatattggagggttctaagttgtcttcatttccatcc

SEQ ID NO: 13786 - protein, 356 aa, Zea mays subsp. mays
  peptide (1)..(356): Ceres Seq. ID no. 15220816
  misc_feature (1)..(1): Xaa is any aa, unknown or other
XHPNRKHSCVLYSSSHCYRCCYNPGKPGGEAALPEASGGATSNQDGLEAYLPQIALIVFLALLPTLLMFLSKQEGIPSQGHAVRAASGKYFYFIVFNVFLCYTLGSTLFKSLTTIINHPAEIVNMLAKSLPGSATFFLTFVALKFLVGYGLELSRLVPLIIFHLKRKYLCKTEEEVRAAWAPVDLGYNTRIPNDMLIATVVLCYSVIAPLIIPFGVAYFALGWLIARNQILRVYVPSYESYGRMWPHMHTRIIAALMVYQTTMIGFISLKKFAYASVLVPLLPASIIFAYVCHMRFYPAFAKTPLEVVVRHDLKETPNMEAIYTAYIPPCLKPDKLEDLDAFEDAQSRATSRVPSI

SEQ ID NO: 13787 - protein, 289 aa, Zea mays subsp. mays
  peptide (1)..(289): Ceres Seq. ID no. 15220817
MFLSKQEGIPSQGHAVRAASGKYFYFIVFNVFLCYTLGSTLFKSLTTIINHPAEIVNMLAKSLPGSATFFLTFVALKFLVGYGLELSRLVPLIIFHLKRKYLCKTEEEVRAAWAPVDLGYNTRIPNDMLIATVVLCYSVIAPLIIPFGVAYFALGWLIARNQILRVYVPSYESYGRMWPHMHTRIIAALMVYQTTMIGFISLKKFAYASVLVPLLPASIIFAYVCHMRFYPAFAKTPLEVVVRHDLKETPNMEAIYTAYIPPCLKPDKLEDLDAFEDAQSRATSRVPSI

SEQ ID NO: 13788 - protein, 232 aa, Zea mays subsp. mays
  peptide (1)..(232): Ceres Seq. ID no. 15220818
MLAKSLPGSATFFLTFVALKFLVGYGLELSRLVPLIIFHLKRKYLCKTEEEVRAAWAPVDLGYNTRIPNDMLIATVVLCYSVIAPLIIPFGVAYFALGWLIARNQILRVYVPSYESYGRMWPHMHTRIIAALMVYQTTMIGFISLKKFAYASVLVPLLPASIIFAYVCHMRFYPAFAKTPLEVVVRHDLKETPNMEAIYTAYIPPCLKPDKLEDLDAFEDAQSRATSRVPSI

SEQ ID NO: 13789 - DNA, 1499 bp, Zea mays subsp. mays; identical to SEQ ID NO: 10683
  misc_feature (1)..(1499): Ceres Seq. ID no. 13580175
  misc_feature (1)..(1499): Ortholog of  Ceres SEQ ID NO 13596194 as cited in SEQ ID NO 68484

SEQ ID NO: 13790 - protein, 348 aa, Zea mays subsp. mays; identical to SEQ ID NO: 10684
  peptide (1)..(348): Ceres Seq. ID no. 13580176

SEQ ID NO: 13791 - protein, 275 aa, Zea mays subsp. mays; identical to SEQ ID NO: 10685
  peptide (1)..(275): Ceres Seq. ID no. 13580177

SEQ ID NO: 13792 - DNA, 2012 bp, Zea mays subsp. mays
  misc_feature (1)..(2012): Ceres Seq. ID no. 12391571
  misc_feature (1)..(2012): Ortholog of  Ceres SEQ ID NO 13655463 as cited in SEQ ID NO 69035
  misc_feature (1)..(2012): Ortholog of  Ceres SEQ ID NO 15180063 as cited in SEQ ID NO 0
aaagaacgaagaaaccaagcagctaccatcatcatcagtccagcaacaatggcggcggcggaaccggtaccagtaccagtaccagtaccggcggcagctggcgggaccaacaataagatcaagacggtggtgctggtgcaggagaaccgctccttcgaccacatgctggggtggatgaagtcgctgaacccggacatcgacggcgtgacgggggccgagaccaaccacgtggacgcctccgacccggcctcccgcgccgtccgcttcagcgacggcgccgagtacgtggacccggacccgggccactccatgcaggccatctacgagcaggtgtacgggacgcccttcgtcgacgccgccacgacgcccgccaccccgccgggcgtcgccccctccatgtccggcttcgcgcagcaggccgagaaggagaggcccggcatgtccgccaccgtcatggccggcttccgccccgacgccgtgcccgtgtaccgggacctggtgcgggagttcgccgtgtgcgaccgctggttcgcgtccaacccggcgtccacgcagcccaaccggctgttcgtgcactccgccacctcccacggcctcgtcagcaacgacagcagggcgctggtggcgggcctcccgcagcggaccatcttcgacgcgctccacgacgagggcctctccttcggcgtctactaccagtacccgccgtccacgctattctaccggagcctccgccagctcaagtacgccgccagcttccacgccttcgacctccacttcgcgcgccactgccgggagggcaggctgcccagctacgtcgtcgtggagcagcgctacttcgacctccgcctcctcccggggaacgacgaccatccgtcccacgacgtggccgagggccagcgcttcgtcaaggaggtctacgaggcgctgcgctcgggcccgcagtggccccagacgctcctcgtcgtcacctacgacgagcacggcggcttctacgaccacgtgcccacgcccgcgggggccggcgtcgtgcccagccccgacggcatcgtcagcgccaagcccttctccttcgccttcgaccgcctcggcgtccgcgtcccggcgctgctcgtgtcgccctggatcgagcccgggaccgtgctgcacgggccaccgtcgggaccctgcccgacgtccgagttcgagcactcctccatcccggcaaccgtcaagaagctcttcaacctcaggagcttcctcaccaggcgcgacgcctgggccggcaccttcgactgcgtcctcacgcgcgacacgccgcgcaccgactgcccacgtacgtcactagtacttgctcatcagtagctagcgtgtaggaaggaacggacagacatggaactgatgatgatgatgtgcatgcagtcaccctgcccgagccagtgaagctgcggcggacggcggcggcggagcatgccccgctgtccgagttccaggaggagctggtgcagctcgccgcggtgctcaacggcgaccacaccaaggagtcgtacccgcaagggctcgtcgagggcatgacggtggcggaggcggccaggtactgcgtcgacgccttcaaggccttcttggacgagtgcgagaaatgcaaggaccgcggcgaggacggctcccacatccccacggtgaagccgacgacgacggggaaggagaaggacaagagcaagagcagcttcgcttccaagtcgctgtcctgccttccctgctgtgtccgtccctcttcctcgtgacctccctctccttctacacgcgatgcgcccacgactccaggcatcacaagttcccattcagaatcggtcgggtagtgaattttacagtgtgatacctcacttgtgtagattgattcattcctagtcatatgcatttgcattccgcattatattgattaaatattctaacgcataatagaaaggtggagtagatacagagaatcggtccgttcgcttgtcttgtttaatggaagtttaatggattgtttagtg

SEQ ID NO: 13793 - protein, 446 aa, Zea mays subsp. mays
  peptide (1)..(446): Ceres Seq. ID no. 12391572
KERRNQAATIIISPATMAAAEPVPVPVPVPAAAGGTNNKIKTVVLVQENRSFDHMLGWMKSLNPDIDGVTGAETNHVDASDPASRAVRFSDGAEYVDPDPGHSMQAIYEQVYGTPFVDAATTPATPPGVAPSMSGFAQQAEKERPGMSATVMAGFRPDAVPVYRDLVREFAVCDRWFASNPASTQPNRLFVHSATSHGLVSNDSRALVAGLPQRTIFDALHDEGLSFGVYYQYPPSTLFYRSLRQLKYAASFHAFDLHFARHCREGRLPSYVVVEQRYFDLRLLPGNDDHPSHDVAEGQRFVKEVYEALRSGPQWPQTLLVVTYDEHGGFYDHVPTPAGAGVVPSPDGIVSAKPFSFAFDRLGVRVPALLVSPWIEPGTVLHGPPSGPCPTSEFEHSSIPATVKKLFNLRSFLTRRDAWAGTFDCVLTRDTPRTDCPRTSLVLAHQ

SEQ ID NO: 13794 - protein, 430 aa, Zea mays subsp. mays
  peptide (1)..(430): Ceres Seq. ID no. 12391573
MAAAEPVPVPVPVPAAAGGTNNKIKTVVLVQENRSFDHMLGWMKSLNPDIDGVTGAETNHVDASDPASRAVRFSDGAEYVDPDPGHSMQAIYEQVYGTPFVDAATTPATPPGVAPSMSGFAQQAEKERPGMSATVMAGFRPDAVPVYRDLVREFAVCDRWFASNPASTQPNRLFVHSATSHGLVSNDSRALVAGLPQRTIFDALHDEGLSFGVYYQYPPSTLFYRSLRQLKYAASFHAFDLHFARHCREGRLPSYVVVEQRYFDLRLLPGNDDHPSHDVAEGQRFVKEVYEALRSGPQWPQTLLVVTYDEHGGFYDHVPTPAGAGVVPSPDGIVSAKPFSFAFDRLGVRVPALLVSPWIEPGTVLHGPPSGPCPTSEFEHSSIPATVKKLFNLRSFLTRRDAWAGTFDCVLTRDTPRTDCPRTSLVLAHQ

SEQ ID NO: 13795 - protein, 392 aa, Zea mays subsp. mays
  peptide (1)..(392): Ceres Seq. ID no. 12391574
MLGWMKSLNPDIDGVTGAETNHVDASDPASRAVRFSDGAEYVDPDPGHSMQAIYEQVYGTPFVDAATTPATPPGVAPSMSGFAQQAEKERPGMSATVMAGFRPDAVPVYRDLVREFAVCDRWFASNPASTQPNRLFVHSATSHGLVSNDSRALVAGLPQRTIFDALHDEGLSFGVYYQYPPSTLFYRSLRQLKYAASFHAFDLHFARHCREGRLPSYVVVEQRYFDLRLLPGNDDHPSHDVAEGQRFVKEVYEALRSGPQWPQTLLVVTYDEHGGFYDHVPTPAGAGVVPSPDGIVSAKPFSFAFDRLGVRVPALLVSPWIEPGTVLHGPPSGPCPTSEFEHSSIPATVKKLFNLRSFLTRRDAWAGTFDCVLTRDTPRTDCPRTSLVLAHQ

SEQ ID NO: 13796 - DNA, 1083 bp, Zea mays subsp. mays
  misc_feature (1)..(1083): Ceres Seq. ID no. 12455027
  misc_feature (1)..(1083): Ortholog of  Ceres SEQ ID NO 14315063 as cited in SEQ ID NO 52256
  misc_feature (1)..(1083): Ortholog of  Ceres SEQ ID NO 14310736 as cited in SEQ ID NO 52901
  misc_feature (1)..(1083): Ortholog of  Ceres SEQ ID NO 15172325 as cited in SEQ ID NO 54668
  misc_feature (1)..(1083): Ortholog of  Ceres SEQ ID NO 13594345 as cited in SEQ ID NO 58043
  misc_feature (1)..(1083): Ortholog of  Ceres SEQ ID NO 14308594 as cited in SEQ ID NO 60384
  misc_feature (1)..(1083): Ortholog of  Ceres SEQ ID NO 12614112 as cited in SEQ ID NO 60891
  misc_feature (1)..(1083): Ortholog of  Ceres SEQ ID NO 13662880 as cited in SEQ ID NO 65422
  misc_feature (1)..(1083): Ortholog of  Ceres SEQ ID NO 12779098 as cited in SEQ ID NO 67698
  misc_feature (1)..(1083): Ortholog of  Ceres SEQ ID NO 13596180 as cited in SEQ ID NO 67941
  misc_feature (1)..(1083): Ortholog of  Ceres SEQ ID NO 13591190 as cited in SEQ ID NO 68044
attactctagcaaaccacgtcgtcgtaagatcagaacgtacgtgatgatggtgctacgttcgcagggaacgtgagaaggaacgagagggtccagctagactccaagatgccggccatcgacgcctccaagcttccctggaccagcctcggcaagagcccagagtcacggagagccatgatccagagcacgctcacgaccaacccgacactatcgctcgccgaaaccatcgtctgcaacacgttccaggaggtcgagtccgtggcgctggcccgcctccccgtaccggcggtcgccatcggcccgctggaggcgcccaagtcggtgtcgtcggcggcggcggccggccatttctgggcgcaagacgaggcctgcctccgctggctcgacgcgcaggctcccggctcggtcgtgtacgtggcgttcgggagcctgacgttgttcgacgcggaacggctccaggagctggcagacgggctggcgctcacggggcggccgttcctgtgggtggtccggccgaacttcgccgacggcgtcggcgagcgctggctcgacgggttccggcgccgcgttggagaaggcaggggcctggtcgtcggctgggctccccagcagcgcgtgctcgcgcacccctcggtggcgtgcttcgtcacgcactgcgggtggaactccaccatggaaggggtgcggcacggcgtcccgttcctttgctggccctacttcgccgaccagttcctgaaccagagctacatctgcgacctgtggggcgtcgggttgaaggtgtgcgccgacgccgacgagaggggcgttgtcnccaaggaggagatcagggacaaggtggcgcggctgcttggggacgaggcgatcaaggcgaggacggtggccttgaagagcgcagcgtgcgccagcgtcgcggacggagggtcctcgcaccaggatttgctcaagttagtgaatctgctgagagagaaatagcctacagcatgtcagaaatgtttttcagaagttgagtggttatatattcatcagtagcacagacgtgaagaaaataaaagtagatgtgcagacatgcattgtttcaggcg

SEQ ID NO: 13797 - protein, 288 aa, Zea mays subsp. mays
  peptide (1)..(288): Ceres Seq. ID no. 12455028
  misc_feature (236)..(236): Xaa is any aa, unknown or other
MPAIDASKLPWTSLGKSPESRRAMIQSTLTTNPTLSLAETIVCNTFQEVESVALARLPVPAVAIGPLEAPKSVSSAAAAGHFWAQDEACLRWLDAQAPGSVVYVAFGSLTLFDAERLQELADGLALTGRPFLWVVRPNFADGVGERWLDGFRRRVGEGRGLVVGWAPQQRVLAHPSVACFVTHCGWNSTMEGVRHGVPFLCWPYFADQFLNQSYICDLWGVGLKVCADADERGVVXKEEIRDKVARLLGDEAIKARTVALKSAACASVADGGSSHQDLLKLVNLLREK

SEQ ID NO: 13798 - protein, 265 aa, Zea mays subsp. mays
  peptide (1)..(265): Ceres Seq. ID no. 12455029
  misc_feature (213)..(213): Xaa is any aa, unknown or other
MIQSTLTTNPTLSLAETIVCNTFQEVESVALARLPVPAVAIGPLEAPKSVSSAAAAGHFWAQDEACLRWLDAQAPGSVVYVAFGSLTLFDAERLQELADGLALTGRPFLWVVRPNFADGVGERWLDGFRRRVGEGRGLVVGWAPQQRVLAHPSVACFVTHCGWNSTMEGVRHGVPFLCWPYFADQFLNQSYICDLWGVGLKVCADADERGVVXKEEIRDKVARLLGDEAIKARTVALKSAACASVADGGSSHQDLLKLVNLLREK

SEQ ID NO: 13799 - DNA, 635 bp, Zea mays subsp. mays
  misc_feature (1)..(635): Ceres Seq. ID no. 12378559
  misc_feature (1)..(635): Ortholog of  Ceres SEQ ID NO 15180470 as cited in SEQ ID NO 0
gtgagtgctcgcggctttcccgtcttgtcccttctctctcttctctccttctccttgcttcagaaacgcaccagagagctctcggaccggattgaagtgcgccgcccgtgagctctcggccgacgctgggaacttgagcagactgggcgagcaccaggaaatttgcgccgtgggagcggtggatggacctccgggaggcgtccgtctgccacgcccacgacgagctgctggcgctgagctccgccgcggcggcagccacggcggccgaggacttcctccggtggcagttccccgagtccccgcgcgggaaagggtggtggtcggcggcgcggcagctcgtggaagacgcctggcgcagcctcggcgaggccaagaacgcggcgaggctcatggacaacgtcgtgctctgcgagttcttcaccacctggatgattctgacgcacgcttaactgaaggcgcaatgctgatggcgacgcccctgcctctttttgcaacttgttattgctccagtacttgtgcttcaatttcattcgatttctgtgtgcacatttgaataagtggttctttgctggtacaaatggaaatgacctgatccgcctgtgtcgataagattgtaataagtggttctttgctcc

SEQ ID NO: 13800 - protein, 88 aa, Zea mays subsp. mays
  peptide (1)..(88): Ceres Seq. ID no. 12378560
MDLREASVCHAHDELLALSSAAAAATAAEDFLRWQFPESPRGKGWWSAARQLVEDAWRSLGEAKNAARLMDNVVLCEFFTTWMILTHA

SEQ ID NO: 13801 - DNA, 1718 bp, Zea mays subsp. mays
  misc_feature (1)..(1718): Ceres Seq. ID no. 12391622
  misc_feature (1)..(1718): Ortholog of  Ceres SEQ ID NO 14314879 as cited in SEQ ID NO 54119
atgcgaacaccttgcagtgagtgacacacctcctgctcttccatacgcctccagtagtccagtgcagcctgagctgagctgcactgaggtacgagtagctcacgacaccactcggtgataaactaatggcgtcggcctccgccgctcccgcgccggacagggaggagattgtgttcctggacgtggagacgtcaaccccgccgtgcgtgctcctcgagttcggtgccgtagtcgtgtgctcgcgcaggctcgtggacgtctcctccttcgccacgctcgtgcggcccgcgaacctcgacgcgctcccggacccgaccgcgcggagcaacggcatcacgcgcggcaccctcgctgacgcgccgccgttccgcgacgtcgccgacatggtctacgacgtcctgcacggtgggtgtaggtgtagctagtgctgcgcctgcgcgcccccgcggcctcactcgaccacatgcatgggagggtgtgggcagggcacaacatcgtgcacttcgattccatgataatcatggacgcgttcgccgagattgggcgaccccctcctcaacccaaggccatgatcgacacccttccgttgcttacccagtgtttcgggccgagagcaggggacatgaagctggcaagcttggcaaactattttggtctagggaagcaaaggcacaggagcctggatgatgtgaaaatgaatattgacgttttcaagaactgtgctacagtcctgttcctggaggaaagccttcgaggtgtgcgtgtgcctaccgttcagaacatgtcgtcggggggtgcaacaatcagaacccaaggaataacaagtgatcctgcaccgaacagggataatcccaacgagtcgttgctggtgggatcgtccactgtgcatgtggaggaaatgatgctagacaccactgtcactgtgcagacggatacaaggagctcaggtgccttttctgggttcgttgagctagacgacgtttcaacggagagtatcaagatctcagctccgctgttcctacgcccgttcggtccgagagcaatcgtccagcacaagggttccccgctccagctcatctgtccaggtctggaagtcctctgggtcaacacaaaggggttcccaaacagcccacatcgaccaaaggtgggcataaaggtcgacatacctgagaaccttagtaaggtactagggttttgcgacgatctagcgcagagctcgtcgtcgtcgccaggaccaggagcaatatgcagtaattccagatggaaatccctgattgagagagacgcggatcggcgtccaacggtctggctgaagattcctacctttggcagtggcgacaccgcagcctgccggacacatgtatacgaaaaggagtgcgacggtgtcgttccaaggcttgtttccgaaagggtcgatccatcggaactggcctcgatgcttcaagggaacaaggtggtggatgcgttcgtctcggtggaaacattcgaccactaccaaagcgctggcattcggttggttgccaataggctggatgtgcacttcaaaaggcaacagcaggcctagctagttccttatggtgctctccggtcaggccgaggctggattgaaggggattgacccatccaattctcctgtgattctcttgttaccgaatcgatccaggactatataaataagtaagtttatgtcgtctccgtatgtgcttgcaaaacttccg

SEQ ID NO: 13802 - protein, 366 aa, Zea mays subsp. mays
  peptide (1)..(366): Ceres Seq. ID no. 12391623
MHGRVWAGHNIVHFDSMIIMDAFAEIGRPPPQPKAMIDTLPLLTQCFGPRAGDMKLASLANYFGLGKQRHRSLDDVKMNIDVFKNCATVLFLEESLRGVRVPTVQNMSSGGATIRTQGITSDPAPNRDNPNESLLVGSSTVHVEEMMLDTTVTVQTDTRSSGAFSGFVELDDVSTESIKISAPLFLRPFGPRAIVQHKGSPLQLICPGLEVLWVNTKGFPNSPHRPKVGIKVDIPENLSKVLGFCDDLAQSSSSSPGPGAICSNSRWKSLIERDADRRPTVWLKIPTFGSGDTAACRTHVYEKECDGVVPRLVSERVDPSELASMLQGNKVVDAFVSVETFDHYQSAGIRLVANRLDVHFKRQQQA

SEQ ID NO: 13803 - protein, 350 aa, Zea mays subsp. mays
  peptide (1)..(350): Ceres Seq. ID no. 12391624
MIIMDAFAEIGRPPPQPKAMIDTLPLLTQCFGPRAGDMKLASLANYFGLGKQRHRSLDDVKMNIDVFKNCATVLFLEESLRGVRVPTVQNMSSGGATIRTQGITSDPAPNRDNPNESLLVGSSTVHVEEMMLDTTVTVQTDTRSSGAFSGFVELDDVSTESIKISAPLFLRPFGPRAIVQHKGSPLQLICPGLEVLWVNTKGFPNSPHRPKVGIKVDIPENLSKVLGFCDDLAQSSSSSPGPGAICSNSRWKSLIERDADRRPTVWLKIPTFGSGDTAACRTHVYEKECDGVVPRLVSERVDPSELASMLQGNKVVDAFVSVETFDHYQSAGIRLVANRLDVHFKRQQQA

SEQ ID NO: 13804 - protein, 347 aa, Zea mays subsp. mays
  peptide (1)..(347): Ceres Seq. ID no. 12391625
MDAFAEIGRPPPQPKAMIDTLPLLTQCFGPRAGDMKLASLANYFGLGKQRHRSLDDVKMNIDVFKNCATVLFLEESLRGVRVPTVQNMSSGGATIRTQGITSDPAPNRDNPNESLLVGSSTVHVEEMMLDTTVTVQTDTRSSGAFSGFVELDDVSTESIKISAPLFLRPFGPRAIVQHKGSPLQLICPGLEVLWVNTKGFPNSPHRPKVGIKVDIPENLSKVLGFCDDLAQSSSSSPGPGAICSNSRWKSLIERDADRRPTVWLKIPTFGSGDTAACRTHVYEKECDGVVPRLVSERVDPSELASMLQGNKVVDAFVSVETFDHYQSAGIRLVANRLDVHFKRQQQA

SEQ ID NO: 13805 - DNA, 863 bp, Zea mays subsp. mays
  misc_feature (1)..(863): Ceres Seq. ID no. 12419219
  misc_feature (1)..(863): Ortholog of  Ceres SEQ ID NO 14312124 as cited in SEQ ID NO 57290
accaaaccgcttcgcttgctcctcagctccctgtcgcacacaccttacgccgggtaggcaggagcaggactcccactgtcccaccgagccagaggccctccgatccgagcgagcaggggcgccaccgtctccaatggctcggccacagcaacggtaccgcggcgtgcggcaacgccactggggctcctgggtctccgatatccgccaccctctcctgaagacgaggatctggctgggcaccttcgagacggccgaggacgcggcgcgcgcctacgacgaggcggcgcgcatcatgtgcggccctcgcgtgcgcaccaacttccccgaggacgccgccgccgacggacaggggcagccggccgcgacggcgcttctctcccccgcgctcgtcgccaagctccaccgctttcaaccttgcgtccgtgcaggcggcgcgcggcagggccgatgactccgcggcagccgccgcctcggcgcccgccgtgctngcacgcatcgcgccgatgcctgccagcaatgccagcatgcgaatcgcccccttgacgtcggcggctgtggctgcggggcactggagcggcgactttctcgaggagcagtacgtggaccagatgatcgaggagcttctagactccaacttctctgtggagatctactagtttcacccgactcctctgctccgtctcatctctctgtttggtttcgtcagctcagctcagctagggagtgtagtgagttagtagtgagttagtacagtagtatcattagccatgccaggatgaacttgaggtttctttggttagactcttgagcagtntgatgtgtatacggtagcgtcgtcagagcataaaattttttcnnctgcc

SEQ ID NO: 13806 - protein, 149 aa, Zea mays subsp. mays
  peptide (1)..(149): Ceres Seq. ID no. 12419220
PNRFACSSAPCRTHLTPGRQEQDSHCPTEPEALRSERAGAPPSPMARPQQRYRGVRQRHWGSWVSDIRHPLLKTRIWLGTFETAEDAARAYDEAARIMCGPRVRTNFPEDAAADGQGQPAATALLSPALVAKLHRFQPCVRAGGARQGR

SEQ ID NO: 13807 - protein, 105 aa, Zea mays subsp. mays
  peptide (1)..(105): Ceres Seq. ID no. 12419221
MARPQQRYRGVRQRHWGSWVSDIRHPLLKTRIWLGTFETAEDAARAYDEAARIMCGPRVRTNFPEDAAADGQGQPAATALLSPALVAKLHRFQPCVRAGGARQGR

SEQ ID NO: 13808 - DNA, 1161 bp, Zea mays subsp. mays
  misc_feature (1)..(1161): Ceres Seq. ID no. 13587719
  misc_feature (1)..(1161): Ortholog of  Ceres SEQ ID NO 14314068 as cited in SEQ ID NO 52242
  misc_feature (1)..(1161): Ortholog of  Ceres SEQ ID NO 14314999 as cited in SEQ ID NO 52342
  misc_feature (1)..(1161): Ortholog of  Ceres SEQ ID NO 13585458 as cited in SEQ ID NO 60907
  misc_feature (1)..(1161): Ortholog of  Ceres SEQ ID NO 13598678 as cited in SEQ ID NO 61508
  misc_feature (1)..(1161): Ortholog of  Ceres SEQ ID NO 12625392 as cited in SEQ ID NO 63315
  misc_feature (1)..(1161): Ortholog of  Ceres SEQ ID NO 13598319 as cited in SEQ ID NO 68758
  misc_feature (1)..(1161): Ortholog of  Ceres SEQ ID NO 12589816 as cited in SEQ ID NO 0
catcgagacacacacagaacttctcctgtcggcctactaatacagctagctagctgccctcttaggtatactgtgatggccacaaccttgtcctccacagtagtagttgcacttggtgcacctctcttcttgctccttgtaacgtgtggctcgtgcgcgaggccggtgagctttaacgcctccgacctcaccgccgatcccggctgggatgctgccagggccacctggtacggtgcgcccaccggcgccggccctgatgacgacggtggtgcctgtggattcaagaacgtgaatctgccgccgttctcggcaatgacgtcgtgcggcaacgagcccctgttcaaggacggcaagggctgcggctcctgctaccagatacgatgccaaaaccacccggcctgctccggcaacccagagacggtgatcatcactgacatgaactactaccccgtggccaagtaccacttcgacctcagcggcacggcgttcggcgccatggccaagcccggccgcaacgacgagctccgccacgccggcatcatcgacatccagttcaagagggtgccctgcaactaccccgggcagaaggtgacgttccacgtcgaggagggctccaaccccgtctacttcgcggtgctggtcgagttcgaagacggcgacggcgacgcggtgcaggtggacctcatggaggccaactctgcgtcgtggacgccgatgcgcgagtcctggggatccatctggaggctcgactccggccaccgcctcaccgcgccattctccctgcgcattacgaacgagtccggcaagacgctggtggctgaccatgtcatccccgccaactgggtgcccaacacctactaccgttctatcgtccagtattagccgctcccagctgctgcgccggccggataataatatacaattctgtgtcattgtgctttactattagtttggtattagtattgtatttctgcatgggactgatgaggcacagagctgaagtgaggtgcctcactccattgctaatttgctactaggtgttaagttggtgtgcggcttcagggagttgaagactgggaagtggaggaagcagtgctttttcccgcccattgtcgtgaatgcatgtaccagtgcgattaagattatataaattatattgac

SEQ ID NO: 13809 - protein, 293 aa, Zea mays subsp. mays
  peptide (1)..(293): Ceres Seq. ID no. 13587720
HRDTHRTSPVGLLIQLASCPLRYTVMATTLSSTVVVALGAPLFLLLVTCGSCARPVSFNASDLTADPGWDAARATWYGAPTGAGPDDDGGACGFKNVNLPPFSAMTSCGNEPLFKDGKGCGSCYQIRCQNHPACSGNPETVIITDMNYYPVAKYHFDLSGTAFGAMAKPGRNDELRHAGIIDIQFKRVPCNYPGQKVTFHVEEGSNPVYFAVLVEFEDGDGDAVQVDLMEANSASWTPMRESWGSIWRLDSGHRLTAPFSLRITNESGKTLVADHVIPANWVPNTYYRSIVQY

SEQ ID NO: 13810 - protein, 268 aa, Zea mays subsp. mays
  peptide (1)..(268): Ceres Seq. ID no. 13587721
MATTLSSTVVVALGAPLFLLLVTCGSCARPVSFNASDLTADPGWDAARATWYGAPTGAGPDDDGGACGFKNVNLPPFSAMTSCGNEPLFKDGKGCGSCYQIRCQNHPACSGNPETVIITDMNYYPVAKYHFDLSGTAFGAMAKPGRNDELRHAGIIDIQFKRVPCNYPGQKVTFHVEEGSNPVYFAVLVEFEDGDGDAVQVDLMEANSASWTPMRESWGSIWRLDSGHRLTAPFSLRITNESGKTLVADHVIPANWVPNTYYRSIVQY

SEQ ID NO: 13811 - protein, 189 aa, Zea mays subsp. mays
  peptide (1)..(189): Ceres Seq. ID no. 13587722
MTSCGNEPLFKDGKGCGSCYQIRCQNHPACSGNPETVIITDMNYYPVAKYHFDLSGTAFGAMAKPGRNDELRHAGIIDIQFKRVPCNYPGQKVTFHVEEGSNPVYFAVLVEFEDGDGDAVQVDLMEANSASWTPMRESWGSIWRLDSGHRLTAPFSLRITNESGKTLVADHVIPANWVPNTYYRSIVQY

SEQ ID NO: 13812 - DNA, 2645 bp, Zea mays subsp. mays
  misc_feature (1)..(2645): Ceres Seq. ID no. 12390337
  misc_feature (1)..(2645): Ortholog of  Ceres SEQ ID NO 15225222 as cited in SEQ ID NO 53759
agaacccaaccccaatccaacggctgcgagagctctcgtcgcgccgccgccgccacctgacagtctcctctcccctgcgcgcgcacgacgagcgccgggcaggaacagccgccaactccctccaacttccttaaaccctagcgacagcagcaggcaaccagcgccgacgaggaggaggagcgcggagtagaggggctccggcgaccgcgtcggagatggcagcgagccacggcgcggggacgctcaagtccacctccatcaacggggtcaagctctactcgctcaccggcggccgctatgtcgccccctgggtcgtcgcgaagaagaagcgcgccctccgaaaggacaaagagtatcagcggaggctggatttgatccacgacctgaggttcgagacagccaccaccaagatcaagctgacgcccgatgaccagtacctgatcgcctcaggtatttaccccccgcaagttaaagtctacgagttgaaggaattgtcgatgaagttcgagcggcacatgatctcagaaattgtagatttccagatccttggtgatgactattccaaactcgcgtttttgtgtgctgatcgttctgtaaatttgcacgctaagtatggaagccattatagcctgagaattccaagagtgggaagggacatggcctacgattgctggtcctgcgacttgctatgtgctgcttcatcaccagatctgtacaggataaacctagagcagggacgattccttgcttctctttcctccgaatcaccagcaataaatgcggttacacgaagtaagatccatgggcttgttgcttgcggtggtgaggatggtgcggttgagtgttttgatatgaggaaaaaaacttctgttggcagaattaatattccagctgttagttctgaagattattctcaggaggtcacgtctttgcaatttgatgaagatcaaggatactttatggcagtggggaccagtacaggaaagatatcaatatatgatttacgcatgtcttctcctctgagagttaaggatcacatgtatggtagcccaatattaaatatcaaatggcaccagacacttaattctactgaacctaaactgatcactgctgataagcacatagtgagaatctgggatcctaatacaggaaataacatgactagcattgaaccagatggtggtgctatcaatgatgtctgtgtcttccggaatagtggtttagtgctattagccctggacaatagccagatacctgcccacttcattcctgcgctcggccctgctccaaagtggtgttcacatcttgataacttaactgaggagatggaagagaaaccagatacaacgctgtttgatgagtacaagttcttgactaaagaagagatggagcgactgaaccttactcaatacattggcagcagtgctgtaagagcatatttacatggatttattgtacgttatgaactatacaagaagcaacgggcagcagttgctcctgttgagtacgagacaattaaggatgagataaagaaaaagaaattagaagctcagagaaaatctcgtataacgcaagtcgtcaaaataccgaaggttaacaggcagattatggacagtataagggaagatgaaatagatcttgatatggagaatgttgataaatcaagtattaagaagaagaaaagaaaactagaactgaataaggccattttggatgatgatcggttcaaagaaatgtttgagaataaggattttgaaattgacgaagaatcaaaagaatacctcgcacttcatcctcaggcagccacaaaggagcctcgcctgattgaagaacattttgatagtgttagcgaggacgaccaacaatctgatggtaacgcatctgacactctagcggaatctgacagtgatgatgtcatgcataattcaaagcgtataaggttatacgaggtcaaggatgaacaccatgcggaagcatttttgaacagcgtctctctttcaaacgaggatgccgctccccttgaggataggatagctgccctggaaaggaaacagaactccaaagcacttgatgcggtcaagtacgggcctggtggctcacgagagatttcgtttttctctaaaagccggagaaggcacaaggaagagtcgtctagcgacgacgaacccaagggtgtcaaaaagagagctgtgcagccgctgggcttgaagcagggaaaagccgagttctatatgtttggcggaaatcgtggcagaggtagaggcggtagtggcagaggtagaagcgggcaaggaagaggtggaggtggaggtggaggaggaagaggtggaggtggaagaggtggaggtaggggcaggggcaggggcagaggatgaatggggcctgtaacattgaccccgttcggccgttcctgcctttgcaggggttttggtaagcttgaaaatggatggatcctgcacatgcagtgggtagaaagtgtgttccttcacaacataggcaagagctagagtaactgaggattgctgcttcagaatttttgggaagagaaatttgttagaagacaatattacatatcttttggtctaccttgtaacggattgttgcattctggtgggtgtctatgggtacggtatagcatttttttc

SEQ ID NO: 13813 - protein, 719 aa, Zea mays subsp. mays
  peptide (1)..(719): Ceres Seq. ID no. 12390338
MAASHGAGTLKSTSINGVKLYSLTGGRYVAPWVVAKKKRALRKDKEYQRRLDLIHDLRFETATTKIKLTPDDQYLIASGIYPPQVKVYELKELSMKFERHMISEIVDFQILGDDYSKLAFLCADRSVNLHAKYGSHYSLRIPRVGRDMAYDCWSCDLLCAASSPDLYRINLEQGRFLASLSSESPAINAVTRSKIHGLVACGGEDGAVECFDMRKKTSVGRINIPAVSSEDYSQEVTSLQFDEDQGYFMAVGTSTGKISIYDLRMSSPLRVKDHMYGSPILNIKWHQTLNSTEPKLITADKHIVRIWDPNTGNNMTSIEPDGGAINDVCVFRNSGLVLLALDNSQIPAHFIPALGPAPKWCSHLDNLTEEMEEKPDTTLFDEYKFLTKEEMERLNLTQYIGSSAVRAYLHGFIVRYELYKKQRAAVAPVEYETIKDEIKKKKLEAQRKSRITQVVKIPKVNRQIMDSIREDEIDLDMENVDKSSIKKKKRKLELNKAILDDDRFKEMFENKDFEIDEESKEYLALHPQAATKEPRLIEEHFDSVSEDDQQSDGNASDTLAESDSDDVMHNSKRIRLYEVKDEHHAEAFLNSVSLSNEDAAPLEDRIAALERKQNSKALDAVKYGPGGSREISFFSKSRRRHKEESSSDDEPKGVKKRAVQPLGLKQGKAEFYMFGGNRGRGRGGSGRGRSGQGRGGGGGGGGRGGGGRGGGRGRGRGRG

SEQ ID NO: 13814 - protein, 625 aa, Zea mays subsp. mays
  peptide (1)..(625): Ceres Seq. ID no. 12390339
MKFERHMISEIVDFQILGDDYSKLAFLCADRSVNLHAKYGSHYSLRIPRVGRDMAYDCWSCDLLCAASSPDLYRINLEQGRFLASLSSESPAINAVTRSKIHGLVACGGEDGAVECFDMRKKTSVGRINIPAVSSEDYSQEVTSLQFDEDQGYFMAVGTSTGKISIYDLRMSSPLRVKDHMYGSPILNIKWHQTLNSTEPKLITADKHIVRIWDPNTGNNMTSIEPDGGAINDVCVFRNSGLVLLALDNSQIPAHFIPALGPAPKWCSHLDNLTEEMEEKPDTTLFDEYKFLTKEEMERLNLTQYIGSSAVRAYLHGFIVRYELYKKQRAAVAPVEYETIKDEIKKKKLEAQRKSRITQVVKIPKVNRQIMDSIREDEIDLDMENVDKSSIKKKKRKLELNKAILDDDRFKEMFENKDFEIDEESKEYLALHPQAATKEPRLIEEHFDSVSEDDQQSDGNASDTLAESDSDDVMHNSKRIRLYEVKDEHHAEAFLNSVSLSNEDAAPLEDRIAALERKQNSKALDAVKYGPGGSREISFFSKSRRRHKEESSSDDEPKGVKKRAVQPLGLKQGKAEFYMFGGNRGRGRGGSGRGRSGQGRGGGGGGGGRGGGGRGGGRGRGRGRG

SEQ ID NO: 13815 - protein, 619 aa, Zea mays subsp. mays
  peptide (1)..(619): Ceres Seq. ID no. 12390340
MISEIVDFQILGDDYSKLAFLCADRSVNLHAKYGSHYSLRIPRVGRDMAYDCWSCDLLCAASSPDLYRINLEQGRFLASLSSESPAINAVTRSKIHGLVACGGEDGAVECFDMRKKTSVGRINIPAVSSEDYSQEVTSLQFDEDQGYFMAVGTSTGKISIYDLRMSSPLRVKDHMYGSPILNIKWHQTLNSTEPKLITADKHIVRIWDPNTGNNMTSIEPDGGAINDVCVFRNSGLVLLALDNSQIPAHFIPALGPAPKWCSHLDNLTEEMEEKPDTTLFDEYKFLTKEEMERLNLTQYIGSSAVRAYLHGFIVRYELYKKQRAAVAPVEYETIKDEIKKKKLEAQRKSRITQVVKIPKVNRQIMDSIREDEIDLDMENVDKSSIKKKKRKLELNKAILDDDRFKEMFENKDFEIDEESKEYLALHPQAATKEPRLIEEHFDSVSEDDQQSDGNASDTLAESDSDDVMHNSKRIRLYEVKDEHHAEAFLNSVSLSNEDAAPLEDRIAALERKQNSKALDAVKYGPGGSREISFFSKSRRRHKEESSSDDEPKGVKKRAVQPLGLKQGKAEFYMFGGNRGRGRGGSGRGRSGQGRGGGGGGGGRGGGGRGGGRGRGRGRG

SEQ ID NO: 13816 - DNA, 1384 bp, Zea mays subsp. mays
  misc_feature (1)..(1384): Ceres Seq. ID no. 12435980
  misc_feature (1)..(1384): Ortholog of  Ceres SEQ ID NO 12609869 as cited in SEQ ID NO 52065
  misc_feature (1)..(1384): Ortholog of  Ceres SEQ ID NO 14301506 as cited in SEQ ID NO 61159
  misc_feature (1)..(1384): Ortholog of  Ceres SEQ ID NO 13597124 as cited in SEQ ID NO 64173
  misc_feature (1)..(1384): Ortholog of  Ceres SEQ ID NO 12780602 as cited in SEQ ID NO 65695
aaggaaacgtcacgtcaccaccacacacctcttcggctcttcctcttctcctccgtatagcggcgggcctccgtcgccccccttccaccccgttttgccgccccgcaggccacagcccaaaatcctcctcgtcgctggtgccctctccgcggcctcctccgccagccatggccgccgctgggcccgggctctactccgacatcgggaagaaggcaagaggtctcctgtacaaggactaccacactgaccggaagttcacgctcaccacttacgccgccaacggagctttcaaggcgcgtgtcaccatggacatgaagcaccgcgtcgtccgcgccatgatcgcgggtagcatgggagacggtgatggcgcacccgtgcatgtccaggataagaccgagtcggccattactgctgcaagcacaaggaaagatgaagctatctttaataaaatccagggccagctgaagcacaacaatgtgactgtggatgtgaaagcaacttcagaatcaaaagtgacaactacaatcacagttcacgagctagccacaccaggcctgaaggcatttttatgcattcctttcccgtacaagaaatctgcaaaggctgaactccagtacttgcaccaccatgctggtgttgctgcaagtgttggcctaaatgcaaaccctgtcgttaagctttctggtgtattcggaactaaaactgtttctgttggtgctgatgttgcatttgatacttcatccgggaacttaaccaaatacaatgctggactgagctactccacgtctgacttcgttgctgcagctactttgaacaacaaaggagacaagatcgccgcttcctactaccattcggtaagtccaaccacagctgttggaggagagctgagccacagcttctcgaccaacgggagcaccatcaccttcgggacgcagcatgccctggaccgtctgaccactgtgaaggcacgattcaacaactgcggcatggcaagcgcactgatccaacacaagtggaggcccaagtctttggtcaccatctccatggaggtggacaccaaggccatcgagaagagctccaagattgagctctccctcgtcctgaagccctgaggtcaccgccagcttctagttttgggatatactaggtctattttttttatctgcagctgaagtctccagcaaacaagtaaacctgtcaactttggtgccgatcccacaaactcaagttcacggtctctttggtggaaaactatgcggttttgtataccactggttgatgatgtttggagaaagttcagtatggctcaccagtcaccactgtctctcagattttaactgtttgatttgtcgattctttattcatacagatcgcaatttttttc

SEQ ID NO: 13817 - protein, 369 aa, Zea mays subsp. mays
  peptide (1)..(369): Ceres Seq. ID no. 12435981
GNVTSPPHTSSALPLLLRIAAGLRRPPSTPFCRPAGHSPKSSSSLVPSPRPPPPAMAAAGPGLYSDIGKKARGLLYKDYHTDRKFTLTTYAANGAFKARVTMDMKHRVVRAMIAGSMGDGDGAPVHVQDKTESAITAASTRKDEAIFNKIQGQLKHNNVTVDVKATSESKVTTTITVHELATPGLKAFLCIPFPYKKSAKAELQYLHHHAGVAASVGLNANPVVKLSGVFGTKTVSVGADVAFDTSSGNLTKYNAGLSYSTSDFVAAATLNNKGDKIAASYYHSVSPTTAVGGELSHSFSTNGSTITFGTQHALDRLTTVKARFNNCGMASALIQHKWRPKSLVTISMEVDTKAIEKSSKIELSLVLKP

SEQ ID NO: 13818 - protein, 314 aa, Zea mays subsp. mays
  peptide (1)..(314): Ceres Seq. ID no. 12435982
MAAAGPGLYSDIGKKARGLLYKDYHTDRKFTLTTYAANGAFKARVTMDMKHRVVRAMIAGSMGDGDGAPVHVQDKTESAITAASTRKDEAIFNKIQGQLKHNNVTVDVKATSESKVTTTITVHELATPGLKAFLCIPFPYKKSAKAELQYLHHHAGVAASVGLNANPVVKLSGVFGTKTVSVGADVAFDTSSGNLTKYNAGLSYSTSDFVAAATLNNKGDKIAASYYHSVSPTTAVGGELSHSFSTNGSTITFGTQHALDRLTTVKARFNNCGMASALIQHKWRPKSLVTISMEVDTKAIEKSSKIELSLVLKP

SEQ ID NO: 13819 - protein, 268 aa, Zea mays subsp. mays
  peptide (1)..(268): Ceres Seq. ID no. 12435983
MDMKHRVVRAMIAGSMGDGDGAPVHVQDKTESAITAASTRKDEAIFNKIQGQLKHNNVTVDVKATSESKVTTTITVHELATPGLKAFLCIPFPYKKSAKAELQYLHHHAGVAASVGLNANPVVKLSGVFGTKTVSVGADVAFDTSSGNLTKYNAGLSYSTSDFVAAATLNNKGDKIAASYYHSVSPTTAVGGELSHSFSTNGSTITFGTQHALDRLTTVKARFNNCGMASALIQHKWRPKSLVTISMEVDTKAIEKSSKIELSLVLKP

SEQ ID NO: 13820 - DNA, 436 bp, Zea mays subsp. mays
  misc_feature (1)..(436): Ceres Seq. ID no. 2816405
  misc_feature (1)..(436): Ortholog of  Ceres SEQ ID NO 13595556 as cited in SEQ ID NO 56727
gcgccctcctgcttctacccccggcagcggcaggggcaggaggagacgacggtcgccaccggcgccctgcaccggcggatgtcggatcgggagctccgccccctgcgctccatcagaatcacaggggacggtcgatgcctgttcaggtccgtcgcctacggcgcctgcctgaggagaggaaagcatgcgcccagcgacagcgcccagaaggaactggccgacgagctccgagccaaagtagctgatgagttcgtcaagcgaagaggagacaccgaatggttccttgaaggcagctttgagagttatgtgagacagatgagaaagcctcatgcttggggaggggaacctgagctgttcatgtgttcccacgttctcaggatgcccatcaccgtctacatgtatacgggcagctccgacggcccaaggatcatagcgg

SEQ ID NO: 13821 - protein, 145 aa, Zea mays subsp. mays
  peptide (1)..(145): Ceres Seq. ID no. 2816406
APSCFYPRQRQGQEETTVATGALHRRMSDRELRPLRSIRITGDGRCLFRSVAYGACLRRGKHAPSDSAQKELADELRAKVADEFVKRRGDTEWFLEGSFESYVRQMRKPHAWGGEPELFMCSHVLRMPITVYMYTGSSDGPRIIA

SEQ ID NO: 13822 - protein, 119 aa, Zea mays subsp. mays
  peptide (1)..(119): Ceres Seq. ID no. 2816407
MSDRELRPLRSIRITGDGRCLFRSVAYGACLRRGKHAPSDSAQKELADELRAKVADEFVKRRGDTEWFLEGSFESYVRQMRKPHAWGGEPELFMCSHVLRMPITVYMYTGSSDGPRIIA

SEQ ID NO: 13823 - protein, 80 aa, Zea mays subsp. mays
  peptide (1)..(80): Ceres Seq. ID no. 2816408
ALLLLPPAAAGAGGDDGRHRRPAPADVGSGAPPPALHQNHRGRSMPVQVRRLRRLPEERKACAQRQRPEGTGRRAPSQSS

SEQ ID NO: 13824 - DNA, 1385 bp, Zea mays subsp. mays
  misc_feature (1)..(1385): Ceres Seq. ID no. 12391575
  misc_feature (1)..(1385): Ortholog of  Ceres SEQ ID NO 15177328 as cited in SEQ ID NO 52523
  misc_feature (1)..(1385): Ortholog of  Ceres SEQ ID NO 13655881 as cited in SEQ ID NO 64426
aacacttctcttttgaggaccagtccaccgtccactcccagagtccaaaaccctacgatccgcgccaccatgccgcgcctcgccgccgccgccgccgccgtctcacgccgcgccggcgaggccctgcgccgcggcgcgtttgggggactgcggcctctctcctccctgcaaccgttaaacgccgcctccagcgacgaggtgctcgttgaaggaaagacaagtgcgcgcgctgccgtgctcaaccgccctggctacctcaacgccctcaccaccaccatgggagctaggctcaataaattttatcaatcatgggaggacaacccagacattggctttgtcatgatgaagggcagcggccgagcattctgtgctggtggggatgttgttagattacatgaacttatcactgaaggcaagctggaggaatgtaaggattttttcaagactttgtacatgttcatttattttctgggcacatacttgaaaccacatgttgccattcttgatggcattactatgggtggtggtggaggtgtttccatccctggaacattccgtgttgcaactgataggacagtctttgcaactccagaagttcatattggattccatcctgatgctgcagcctccttttatttgtcgcatctaactggccatgttggggaatatgtggccttgactggtgaaaagcttaatggaacagatatgattgctcttggcctcgctacacactatttcatgagtggccatctggatctgatcgatgaacgacttgcaaagttagtaactgatgatccatcagttattgattcgtcccttgcacaatattgagacatggtttatccgtacaaaaatagcattgttcataggctggaggtgattgataaatgcttcagccatgacacagttgaagagattgttgatgccttggaaagtgaagcagccagctcaaatgaagaatggtgtatcttggcgctgaaacgattgaaagaggcctctccgttagctttgaaggtctcactgcgatcgatacgcgagggtagatatcagacacttgatgagtgccttgtccgtgagtaccgcatgtccatgaatggaatctcaaagcaattttctcatgaattctgcgagggagtcagagcacgactagtcgacaaggacttcactcctaagtgggatcctcctgcccttgagtatgttacgaatgacatggttgacgcatacttcgcacctcttggcgattcggagcctgagttgaagctgcctatagaatcgcgagaggcatttgtatgatcacaaatcattccaagaaccggatcattgcaaggaccggactgggacctgataaacgtgttataatctgtgtagccattatttttggcagc

SEQ ID NO: 13825 - protein, 276 aa, Zea mays subsp. mays
  peptide (1)..(276): Ceres Seq. ID no. 12391576
NTSLLRTSPPSTPRVQNPTIRATMPRLAAAAAAVSRRAGEALRRGAFGGLRPLSSLQPLNAASSDEVLVEGKTSARAAVLNRPGYLNALTTTMGARLNKFYQSWEDNPDIGFVMMKGSGRAFCAGGDVVRLHELITEGKLEECKDFFKTLYMFIYFLGTYLKPHVAILDGITMGGGGGVSIPGTFRVATDRTVFATPEVHIGFHPDAAASFYLSHLTGHVGEYVALTGEKLNGTDMIALGLATHYFMSGHLDLIDERLAKLVTDDPSVIDSSLAQY

SEQ ID NO: 13826 - protein, 253 aa, Zea mays subsp. mays
  peptide (1)..(253): Ceres Seq. ID no. 12391577
MPRLAAAAAAVSRRAGEALRRGAFGGLRPLSSLQPLNAASSDEVLVEGKTSARAAVLNRPGYLNALTTTMGARLNKFYQSWEDNPDIGFVMMKGSGRAFCAGGDVVRLHELITEGKLEECKDFFKTLYMFIYFLGTYLKPHVAILDGITMGGGGGVSIPGTFRVATDRTVFATPEVHIGFHPDAAASFYLSHLTGHVGEYVALTGEKLNGTDMIALGLATHYFMSGHLDLIDERLAKLVTDDPSVIDSSLAQY

SEQ ID NO: 13827 - protein, 184 aa, Zea mays subsp. mays
  peptide (1)..(184): Ceres Seq. ID no. 12391578
MGARLNKFYQSWEDNPDIGFVMMKGSGRAFCAGGDVVRLHELITEGKLEECKDFFKTLYMFIYFLGTYLKPHVAILDGITMGGGGGVSIPGTFRVATDRTVFATPEVHIGFHPDAAASFYLSHLTGHVGEYVALTGEKLNGTDMIALGLATHYFMSGHLDLIDERLAKLVTDDPSVIDSSLAQY

SEQ ID NO: 13828 - DNA, 1328 bp, Zea mays subsp. mays
  misc_feature (1)..(1328): Ceres Seq. ID no. 12419342
  misc_feature (1)..(1328): Ortholog of  Ceres SEQ ID NO 13597798 as cited in SEQ ID NO 64311
atgtttttattttgctttggtttgtcactcttttttctcttactattttgatttaaagttttgagctactagcagttgaggatgaactaatttttatattttttgataaagtgctgatatcgatttaccattaatttttctatggatgaggtatgccagttattttgttaagctaatgctgcttctcgtgcaggtcaaagtaaagagaaggggagatgacaaaaaatatattgccaaggttttagctaggggtgttgaatgcgatcttgcgttgctatctgttgagaatgaagagttctggagaggaacagaggcacttcattttggtcgtttgccatgccttcaggattcagtaactgttgtgggatatcctcttggtggagacactatatctgtaacaaaaggcgttgtgtcgcgcattgaggtcactccatatgcacatggaacatcagatcttcttggcattcaaattacgcagccataaatcctggaaacagtgggggaccagcctttaatgatcaaggggagtgcattggtgtggcatttcaggtgtacaggtcagatgaagctgaaaatattggatatgttattccaactacagttgtatcccatttcttaaatgactatcagaaaaatggaaagtacacaggatttccatgtttgggtgtcttacttcagaaattggaaaatccggcattgcgtgaaagcttaaaagtaccttcaagcgagggtgttcttgttcgtcgggtggaacctactgctccagcaagcagtgttttgcgaaagggagatgtaattgttagctttgatggtatcgcagtaggatgtgaagcaacagtaccatttcggtccacagaacggattgctttccgctatctcacaagccaaaagtatgcaggcgatattgcccagctaggaatcattcgtgatggcaattccatgaaagtccagactattttgcagccaagaaaacatttagtgccgtttcatgttgaggggggacaaccttcttatctgattgttgctggccttgtcttcacacctttaacagaaccatttatagaggaggaatgcgaagatacactagggctgaaattgttagcaaaagcacgttactctctagcaacctttgagggggaggaaattgttattgtgtcgcaggttttggcgcacgaggtcaacattgggtatgagcacatgggcaatcaacaagtcatgaaactaaacggaaccacaataaagaatatccatcaccttgctcatcttgtggacacctgtaaagacaagttcctgacgttcgaattcgaagacgacttccttgttgtttt

SEQ ID NO: 13829 - protein, 129 aa, Zea mays subsp. mays
  peptide (1)..(129): Ceres Seq. ID no. 12419343
MKVQTILQPRKHLVPFHVEGGQPSYLIVAGLVFTPLTEPFIEEECEDTLGLKLLAKARYSLATFEGEEIVIVSQVLAHEVNIGYEHMGNQQVMKLNGTTIKNIHHLAHLVDTCKDKFLTFEFEDDFLVV

SEQ ID NO: 13830 - protein, 112 aa, Zea mays subsp. mays
  peptide (1)..(112): Ceres Seq. ID no. 12419344
MRYASYFVKLMLLLVQVKVKRRGDDKKYIAKVLARGVECDLALLSVENEEFWRGTEALHFGRLPCLQDSVTVVGYPLGGDTISVTKGVVSRIEVTPYAHGTSDLLGIQITQP

SEQ ID NO: 13831 - protein, 102 aa, Zea mays subsp. mays
  peptide (1)..(102): Ceres Seq. ID no. 12419345
MLLLVQVKVKRRGDDKKYIAKVLARGVECDLALLSVENEEFWRGTEALHFGRLPCLQDSVTVVGYPLGGDTISVTKGVVSRIEVTPYAHGTSDLLGIQITQP

SEQ ID NO: 13832 - DNA, 1234 bp, Zea mays subsp. mays
  misc_feature (1)..(1234): Ceres Seq. ID no. 13494778
  misc_feature (1)..(1234): Ortholog of  Ceres SEQ ID NO 12484482 as cited in SEQ ID NO 53324
  misc_feature (1)..(1234): Ortholog of  Ceres SEQ ID NO 15176234 as cited in SEQ ID NO 54949
  misc_feature (1)..(1234): Ortholog of  Ceres SEQ ID NO 14314507 as cited in SEQ ID NO 59337
gtctcccggcgcctgttccccgcggcaccgcggctacacataccctctccccatcccatttcccagatcccaccaacgcagcgcagggatcgagtagcccaccaccccaccccgcgacgctaaccgacgcaatggcgacgctcaccgttccttcctccgtcccggccgtcgccgaggactgcgagcagctccacaaggccttcgaaggttggggcaccaacgagaaactgatcatctccatcctggcccaccgcaacgccgcgcaggcccgcgcgatccgccgcggctatgccgaggcctacgggaaggagctgctccgcgctctcggcgacgagatccacggcaagttcgagagggcggtgatcctgtggacgctggaccccgcggagagggacgcggtgctggcgaacgaggaggcgaagaagagccaccccggcggccgcgcgctggtggagatcgcgtgcgcgcgcacgcccgcgcagctctttgcggtcaagcaggcgtaccatgaccggtttaagcgatcgctcgaggaggacgttgccgcgcatgtcaccggcgacttccgaaagcttttagtgcctcttgttagtgcgtaccgctatgatggcccagaggtgaacacatctttggctcattctgaagccaaaatacttcatgagaagatccataagaaggcttacagtgatgaggagatcattagaattctcaccacacggagcaaagctcagctacttgcaacattcaatagctacaaggatcagttcactcatgcaatcaacaaggatctgaaagctgaccccaaggatgagtttctttcaacactgcgggcgatcatccggtgcttcacctgccctgacagatacttcgagaaagtcattcgactggctcttggaggcatgggcactgatgaggatgacctcaccagggtcgtaactactcgcgccgaggtcgacctgaagctgataaaggaggcttatcagaagagaaacagtgtgccgctggagcgtgctgtggccaaagatacaactagagattatgaggatattatgcttgccctccttggggcggagtgaggaggcgtgcctcaactcgatctcatctgctcctacttgtttgatggggccaaaaaactgcatcgacgtggtatccacatggccgtggttttgaataataataaatttgtaacacgtagcctgcattagcagcgcgttttaaataaaggaacttcctg

SEQ ID NO: 13833 - protein, 357 aa, Zea mays subsp. mays
  peptide (1)..(357): Ceres Seq. ID no. 13494779
LPAPVPRGTAATHTLSPSHFPDPTNAAQGSSSPPPHPATLTDAMATLTVPSSVPAVAEDCEQLHKAFEGWGTNEKLIISILAHRNAAQARAIRRGYAEAYGKELLRALGDEIHGKFERAVILWTLDPAERDAVLANEEAKKSHPGGRALVEIACARTPAQLFAVKQAYHDRFKRSLEEDVAAHVTGDFRKLLVPLVSAYRYDGPEVNTSLAHSEAKILHEKIHKKAYSDEEIIRILTTRSKAQLLATFNSYKDQFTHAINKDLKADPKDEFLSTLRAIIRCFTCPDRYFEKVIRLALGGMGTDEDDLTRVVTTRAEVDLKLIKEAYQKRNSVPLERAVAKDTTRDYEDIMLALLGAE

SEQ ID NO: 13834 - protein, 314 aa, Zea mays subsp. mays
  peptide (1)..(314): Ceres Seq. ID no. 13494780
MATLTVPSSVPAVAEDCEQLHKAFEGWGTNEKLIISILAHRNAAQARAIRRGYAEAYGKELLRALGDEIHGKFERAVILWTLDPAERDAVLANEEAKKSHPGGRALVEIACARTPAQLFAVKQAYHDRFKRSLEEDVAAHVTGDFRKLLVPLVSAYRYDGPEVNTSLAHSEAKILHEKIHKKAYSDEEIIRILTTRSKAQLLATFNSYKDQFTHAINKDLKADPKDEFLSTLRAIIRCFTCPDRYFEKVIRLALGGMGTDEDDLTRVVTTRAEVDLKLIKEAYQKRNSVPLERAVAKDTTRDYEDIMLALLGAE

SEQ ID NO: 13835 - DNA, 2267 bp, Zea mays subsp. mays
  misc_feature (1)..(2267): Ceres Seq. ID no. 12435965
  misc_feature (1)..(2267): Ortholog of  Ceres SEQ ID NO 15176579 as cited in SEQ ID NO 54513
tagaaagcaatcgcccgcggtattatccatccaccacgctgcatctgcttctcacgccgcctcgccttcctcttccacccctcgccgtccgtcgtcctcagcgcttgtacgcttgcctcaaaacccctggcgccgtgctaaaaccctagccctcgaattccttcccctgcccgcgcggagcagacgagcctgagcccgtcctcctcgtccatggcgtcctcaggggccgccgctaacctctgggtactgcttggtctcggcatcgcgggcgttctcctggcggcgcggcgactgaggcgccctgcgcgccccgatcacggcgccttcgtcgcccgcctcgagctcctcccgccgccccagcctccgccgccgcaggcgccccacccgctcaccggactctgcttcgccatcgctgacgcattgcatgtcagtggttatattacaagtttcggcagtcttgaatgggcaaagacacacaatgcagaagtgctaacatcttcagtggtttcagctcttgttgatggtggtgctatttgtgttgggaaaactgttattgatgagatggcatacagtatccatggtgagaatagatattttgatacaccaacaaatcctgccgctccagatcgagtaccaggaggatgttcaagtggatcagctgttgcagttgctggtggaatggtagattttgccctgggtattgactcgattggaggtgtaaggatacctggtgcttattgtggtgtcttagcattcaggccttcgcatgctgtggtttccaatagtggtgtcattcctgttgcacctagcctggacactataggttggtttgcaaaggatccaagtgttttgcatcgtgttgggcatcttcttcttagacttccttatgctggtattcgccaaccgagaattttttacatagcagatgattgctttgaactttcaaagatacctgctaggagacttactcaggtggtgacaaaatctgtggagaagctctttggaagacaagtccggcatgtgaatctcgaaaattatttgagttcaagaatatccagcctgggtaactattcaaatgggcataagaatggggattcaaagttccctctgttgctagcactttgtaactccatgatatcacttcacaagcaggaattcaaagataagcatatggagtggataaattcagttaagcctgctgtggatgcacgcatagtcagtgatttgtctgaggatggtgattcagatattgatggctgccaaaatgtgaggaaagaagcgcgctctgctctaagtggacttcttaaggatgatgggattctggtgattccaactgctttggggtgccccccgaagcttaacgctaaggaactctcgtctgaaagctacaattctcagacactacgccttttgtctttagctagcatgtcagggtgttgccaggtttccattcctttgggtacacatgataagtgccccatttcagtttcgttgattgctaggcatggtggtgatcggtttttgttggacaccacacaaaccatgtatacaaccatccaagagcaagtggagatactagcgaaatctagtgtttcaagtaaacaggcgatgaatgaagaagcagctgaagctgctaaagagaaaggtaatgctgcatttaaggaaaaacaatggcaaaaggcagtaaatttctacactgaagcaataaagttaaatggaaaagtggctacatactacagcaacagagctgctgcctttctagaactaactagctaccgtcaggctgaggcagattgcacaagtgccatcgaacttgattccaagagcgtgaaagcttatttacggagaggcactgcaagggagatgctaggttattataaggaggccgttgatgatttcaaccacgcccttgttctagaaccaatgaacaagacggctggtgttgccatcaacaggttaaagaagctgtttccttgaatatgaagctgcatgaagatatgataacctcatattttgtgcacacacaaggggtgggattgaagtacctgagttcaaccgacggatgctgatcacagtttgagctagtgggaacggatttcaacactgagatcaggttaagggtcaatttagcggtttctctccccacccaaagttttggaaaagcaaaataaagaaggttttttgggaaccggaaagcagtttacgggtgtccgccatccccaccatgtataatatagtttcgccaattatttgttcagacgctttgc

SEQ ID NO: 13836 - protein, 588 aa, Zea mays subsp. mays
  peptide (1)..(588): Ceres Seq. ID no. 12435966
MASSGAAANLWVLLGLGIAGVLLAARRLRRPARPDHGAFVARLELLPPPQPPPPQAPHPLTGLCFAIADALHVSGYITSFGSLEWAKTHNAEVLTSSVVSALVDGGAICVGKTVIDEMAYSIHGENRYFDTPTNPAAPDRVPGGCSSGSAVAVAGGMVDFALGIDSIGGVRIPGAYCGVLAFRPSHAVVSNSGVIPVAPSLDTIGWFAKDPSVLHRVGHLLLRLPYAGIRQPRIFYIADDCFELSKIPARRLTQVVTKSVEKLFGRQVRHVNLENYLSSRISSLGNYSNGHKNGDSKFPLLLALCNSMISLHKQEFKDKHMEWINSVKPAVDARIVSDLSEDGDSDIDGCQNVRKEARSALSGLLKDDGILVIPTALGCPPKLNAKELSSESYNSQTLRLLSLASMSGCCQVSIPLGTHDKCPISVSLIARHGGDRFLLDTTQTMYTTIQEQVEILAKSSVSSKQAMNEEAAEAAKEKGNAAFKEKQWQKAVNFYTEAIKLNGKVATYYSNRAAAFLELTSYRQAEADCTSAIELDSKSVKAYLRRGTAREMLGYYKEAVDDFNHALVLEPMNKTAGVAINRLKKLFP

SEQ ID NO: 13837 - protein, 471 aa, Zea mays subsp. mays
  peptide (1)..(471): Ceres Seq. ID no. 12435967
MAYSIHGENRYFDTPTNPAAPDRVPGGCSSGSAVAVAGGMVDFALGIDSIGGVRIPGAYCGVLAFRPSHAVVSNSGVIPVAPSLDTIGWFAKDPSVLHRVGHLLLRLPYAGIRQPRIFYIADDCFELSKIPARRLTQVVTKSVEKLFGRQVRHVNLENYLSSRISSLGNYSNGHKNGDSKFPLLLALCNSMISLHKQEFKDKHMEWINSVKPAVDARIVSDLSEDGDSDIDGCQNVRKEARSALSGLLKDDGILVIPTALGCPPKLNAKELSSESYNSQTLRLLSLASMSGCCQVSIPLGTHDKCPISVSLIARHGGDRFLLDTTQTMYTTIQEQVEILAKSSVSSKQAMNEEAAEAAKEKGNAAFKEKQWQKAVNFYTEAIKLNGKVATYYSNRAAAFLELTSYRQAEADCTSAIELDSKSVKAYLRRGTAREMLGYYKEAVDDFNHALVLEPMNKTAGVAINRLKKLFP

SEQ ID NO: 13838 - protein, 432 aa, Zea mays subsp. mays
  peptide (1)..(432): Ceres Seq. ID no. 12435968
MVDFALGIDSIGGVRIPGAYCGVLAFRPSHAVVSNSGVIPVAPSLDTIGWFAKDPSVLHRVGHLLLRLPYAGIRQPRIFYIADDCFELSKIPARRLTQVVTKSVEKLFGRQVRHVNLENYLSSRISSLGNYSNGHKNGDSKFPLLLALCNSMISLHKQEFKDKHMEWINSVKPAVDARIVSDLSEDGDSDIDGCQNVRKEARSALSGLLKDDGILVIPTALGCPPKLNAKELSSESYNSQTLRLLSLASMSGCCQVSIPLGTHDKCPISVSLIARHGGDRFLLDTTQTMYTTIQEQVEILAKSSVSSKQAMNEEAAEAAKEKGNAAFKEKQWQKAVNFYTEAIKLNGKVATYYSNRAAAFLELTSYRQAEADCTSAIELDSKSVKAYLRRGTAREMLGYYKEAVDDFNHALVLEPMNKTAGVAINRLKKLFP

SEQ ID NO: 13839 - DNA, 700 bp, Zea mays subsp. mays; identical to SEQ ID NO: 1971
  misc_feature (1)..(700): Ceres Seq. ID no. 13494781
  misc_feature (1)..(700): Ortholog of  Ceres SEQ ID NO 14308586 as cited in SEQ ID NO 55143
  misc_feature (1)..(700): Ortholog of  Ceres SEQ ID NO 14314308 as cited in SEQ ID NO 57259
  misc_feature (1)..(700): Ortholog of  Ceres SEQ ID NO 15226216 as cited in SEQ ID NO 62291

SEQ ID NO: 13840 - protein, 233 aa, Zea mays subsp. mays; identical to SEQ ID NO: 1972
  peptide (1)..(233): Ceres Seq. ID no. 13494782

SEQ ID NO: 13841 - protein, 176 aa, Zea mays subsp. mays; identical to SEQ ID NO: 1973
  peptide (1)..(176): Ceres Seq. ID no. 13494783

SEQ ID NO: 13842 - protein, 161 aa, Zea mays subsp. mays; identical to SEQ ID NO: 1974
  peptide (1)..(161): Ceres Seq. ID no. 13494784

SEQ ID NO: 13843 - DNA, 1410 bp, Zea mays subsp. mays
  misc_feature (1)..(1410): Ceres Seq. ID no. 12419029
  misc_feature (1)..(1410): Ortholog of  Ceres SEQ ID NO 13598653 as cited in SEQ ID NO 65049
accgctacccaaccgccgccgcggttctcgctgccagcgacggacgggccacaccgcgcaggggctcagccccgccacccaccttaaccccgccgtcgggaggcgtcgtccccggcccggcccggcccggccctcgccctctactgcaactggactggcgcgtagacctgtccccgccacgagatcgttccgccctatgtcggtgaagatgctctttgcatagctcaagctgcaatctgatggactctgatgacaagaagtttggaaatggaccaagggagctcactggtgctgttgatttgatcagccactacaaactgctgccacaccatgatttcttttgcaagaaacctttgccgctggcaatatcagatacacattatcttcacaatgttgtgggagacactgaaattcgcaaaggagaaggaatggagttagatcaacttgttcataatgcatatctgagggataaacctgcttatattcagccctttgatatggaaactctggggcaagcgttccaacttcgagaaacagctcttgtggatttgccttctactgaaaaaggtataccgactatttcgggtaaaccaaaaagtgagtccaaggacaaagagaagaagcataaaaggcacaaagacaaagacaaggaacataagaagcacaaacatcggcataaggatcggagtaaggacaaagataaagacaaagacaaggataagaaaaaagataaaagtggccatcatgaaaagaagaggaagcatgagggaacagaagattcagtagatgtgcataagcacaagaagagtaagcacaagagctccaaaaccgatgagatggggaatggagttagttaacacttcctagctctacctccaatccttgtaatttgctgttaaaacttaaaaggagacagacggtctctgctatcaaaaccctgtgcagaatagtgggtatcatgaatgggagctcttatttttgcagagtccattgtgaagagaattgaatttgttaatataggtctaatccttccaactgtgcaaatcaactgtgttcctccctgaagcattggttgtagggtgcgcttgaaaggatgtgcaatgagattgtttcgatgtaacgtgcatgagtacactgagtagctgtggatggttatacagtttgtggtctagggatgtgcagtgagggcagggaattgggaataatttcgtgcccccatcgaccttgatttgtagggtaggatgatttactgtttaaccactagcaaatgttagtagccagttccatgttcatttactccacggcaactgtgctttcgtgtgccaataaccggagttgatccacatgtaatgaattggtgtcaaattgacgatcctgtgtttcaaagtatggttattggatcgtgttgcc

SEQ ID NO: 13844 - protein, 205 aa, Zea mays subsp. mays
  peptide (1)..(205): Ceres Seq. ID no. 12419030
MDSDDKKFGNGPRELTGAVDLISHYKLLPHHDFFCKKPLPLAISDTHYLHNVVGDTEIRKGEGMELDQLVHNAYLRDKPAYIQPFDMETLGQAFQLRETALVDLPSTEKGIPTISGKPKSESKDKEKKHKRHKDKDKEHKKHKHRHKDRSKDKDKDKDKDKKKDKSGHHEKKRKHEGTEDSVDVHKHKKSKHKSSKTDEMGNGVS

SEQ ID NO: 13845 - protein, 142 aa, Zea mays subsp. mays
  peptide (1)..(142): Ceres Seq. ID no. 12419031
MELDQLVHNAYLRDKPAYIQPFDMETLGQAFQLRETALVDLPSTEKGIPTISGKPKSESKDKEKKHKRHKDKDKEHKKHKHRHKDRSKDKDKDKDKDKKKDKSGHHEKKRKHEGTEDSVDVHKHKKSKHKSSKTDEMGNGVS

SEQ ID NO: 13846 - protein, 119 aa, Zea mays subsp. mays
  peptide (1)..(119): Ceres Seq. ID no. 12419032
METLGQAFQLRETALVDLPSTEKGIPTISGKPKSESKDKEKKHKRHKDKDKEHKKHKHRHKDRSKDKDKDKDKDKKKDKSGHHEKKRKHEGTEDSVDVHKHKKSKHKSSKTDEMGNGVS

SEQ ID NO: 13847 - DNA, 733 bp, Zea mays subsp. mays
  misc_feature (1)..(733): Ceres Seq. ID no. 12551453
  misc_feature (1)..(733): Ortholog of  Ceres SEQ ID NO 13663563 as cited in SEQ ID NO 66853
cataaagatctcgacctcgccccttcgaccgcaagccatcccgctccctcggtaagcttccaagcggagtccggcggcgtcgagtcgaatggcgggcaagtcgcacacgcgcaaggcgttcctcctgtgcaactacgtcctcatgggcgccgcttccagctgcatcttcctcacgctgtcgctgcgcctgctgccgtccccgtgcggcctcctcctgctcttcctccacgccctcaccgccgtcttctccgcggccggctgctcgggctccttcacggcgcccgccacgcccgcgcagtggcacaacgcgcacaccgcgggggccgcgctcaccgccatcttccagggggccgtcgcgctgctcgcgttcacccgcacctccgacttcctggccgagcttcagtcctacgtccgcgacgaggacggcgccgtcatcctcaagatggtcgggggcctcggcaccgccatcttcgtcctcgagtgggccgcgctcgcgctcgccttctccctccgcctcgatgacgacgacgacgacgacctccaggccaagaaccggcggccgtaccatgtctgatcgtccgctggtgttagctccttcagaatgatatatgaacaagattcgttgattctttgccgtctgttagtatgtactattgcttttttttggtactactgtgcctgttcaaccaaaattgttaaatgccaaagcaaatatacattgctttttgttgcc

SEQ ID NO: 13848 - protein, 173 aa, Zea mays subsp. mays
  peptide (1)..(173): Ceres Seq. ID no. 12551454
HKDLDLAPSTASHPAPSVSFQAESGGVESNGGQVAHAQGVPPVQLRPHGRRFQLHLPHAVAAPAAVPVRPPPALPPRPHRRLLRGRLLGLLHGARHARAVAQRAHRGGRAHRHLPGGRRAARVHPHLRLPGRASVLRPRRGRRRHPQDGRGPRHRHLRPRVGRARARLLPPPR

SEQ ID NO: 13849 - protein, 161 aa, Zea mays subsp. mays
  peptide (1)..(161): Ceres Seq. ID no. 12551455
MAGKSHTRKAFLLCNYVLMGAASSCIFLTLSLRLLPSPCGLLLLFLHALTAVFSAAGCSGSFTAPATPAQWHNAHTAGAALTAIFQGAVALLAFTRTSDFLAELQSYVRDEDGAVILKMVGGLGTAIFVLEWAALALAFSLRLDDDDDDDLQAKNRRPYHV

SEQ ID NO: 13850 - protein, 143 aa, Zea mays subsp. mays
  peptide (1)..(143): Ceres Seq. ID no. 12551456
MGAASSCIFLTLSLRLLPSPCGLLLLFLHALTAVFSAAGCSGSFTAPATPAQWHNAHTAGAALTAIFQGAVALLAFTRTSDFLAELQSYVRDEDGAVILKMVGGLGTAIFVLEWAALALAFSLRLDDDDDDDLQAKNRRPYHV

SEQ ID NO: 13851 - DNA, 1361 bp, Zea mays subsp. mays
  misc_feature (1)..(1361): Ceres Seq. ID no. 12391506
  misc_feature (1)..(1361): Ortholog of  Ceres SEQ ID NO 15171293 as cited in SEQ ID NO 51744
attaccaaaccaacagtttccagttcagcggtaggaacagaccgtcacggcgtcatccgccaaaggataatccatttgctcacacaggcgcaaacgctgagcgcctgagcctgctctcgcggtctaggagatggcgttgatcacgaatgtctctgactatgaggagcttgcagagcagaagctgcctaagatggtttatgacttctatgccgggggtgcagaagaccagtggacactcaaggagaataagggggcattctccaagattctggttcgaccacgggtgctgattgatgtgtctcatattgacatgtctacaagtatattgggttacaaaatttccatgcctattatggtggctcccactgctttgcacaaactggcccaccaagaaggagaggttgcttctgcccaggcagcagctgctgcaggaactataatgacgttgtcttcatggtcatcttgcagcattgaggaagttagctcaagtgcaccaggactccgtttcttccaactttcagtattcaaggatagggatatcgtgcaacagcttgtcagaagggctgaaaatgctggctacaaggcaatcgccgtcactgtcgacgctccacgccttggtcgcagggaagccgacgtcaggaacagattcacgctgcctgaaaatgtggtgttgaagtgctttgaaggactggatctcagcaagatggacaagactaagggttcaggccttgctgcttacgccactagccagattgacagctctctttcttggaaggatatcaagtggctacagacgattaccgggctgcctatcttagtgaaaggagtcataacagcagaagatgctcgaattgctatcgaatgcggtgtcgccggcattatcgtgtccaaccacgggggacgccagctagactatcttcctgcaaccatcagctgcctggaagaggtcgtgagagaagtgaagggccgccgtgtgcctgtgttcctcgacggcggcatccgccgtggcactgacgtgttcaaggccttggcgctgggagcctcaggagtgtttattggaaggcccgtactgttcgccctcgccgtggacggcagggcaggggtgaggaatgcgctgcggatgctgagggatgagctcgagatcaccatggcgctgagcggctgctcgtcgctgaaagatatcacccgcgatcgcgttatcactgagagcgacatgatccgtcgctctcggatgtaggcttcgattcgtttgctgttgtgttgtgttgtgccctggcatgactgtcttattcgaaactgaccggaccatcagattggttttgacttttgacctattggctaatgatgtgttaggttttctc

SEQ ID NO: 13852 - protein, 368 aa, Zea mays subsp. mays
  peptide (1)..(368): Ceres Seq. ID no. 12391507
MALITNVSDYEELAEQKLPKMVYDFYAGGAEDQWTLKENKGAFSKILVRPRVLIDVSHIDMSTSILGYKISMPIMVAPTALHKLAHQEGEVASAQAAAAAGTIMTLSSWSSCSIEEVSSSAPGLRFFQLSVFKDRDIVQQLVRRAENAGYKAIAVTVDAPRLGRREADVRNRFTLPENVVLKCFEGLDLSKMDKTKGSGLAAYATSQIDSSLSWKDIKWLQTITGLPILVKGVITAEDARIAIECGVAGIIVSNHGGRQLDYLPATISCLEEVVREVKGRRVPVFLDGGIRRGTDVFKALALGASGVFIGRPVLFALAVDGRAGVRNALRMLRDELEITMALSGCSSLKDITRDRVITESDMIRRSRM

SEQ ID NO: 13853 - protein, 348 aa, Zea mays subsp. mays
  peptide (1)..(348): Ceres Seq. ID no. 12391508
MVYDFYAGGAEDQWTLKENKGAFSKILVRPRVLIDVSHIDMSTSILGYKISMPIMVAPTALHKLAHQEGEVASAQAAAAAGTIMTLSSWSSCSIEEVSSSAPGLRFFQLSVFKDRDIVQQLVRRAENAGYKAIAVTVDAPRLGRREADVRNRFTLPENVVLKCFEGLDLSKMDKTKGSGLAAYATSQIDSSLSWKDIKWLQTITGLPILVKGVITAEDARIAIECGVAGIIVSNHGGRQLDYLPATISCLEEVVREVKGRRVPVFLDGGIRRGTDVFKALALGASGVFIGRPVLFALAVDGRAGVRNALRMLRDELEITMALSGCSSLKDITRDRVITESDMIRRSRM

SEQ ID NO: 13854 - protein, 308 aa, Zea mays subsp. mays
  peptide (1)..(308): Ceres Seq. ID no. 12391509
MSTSILGYKISMPIMVAPTALHKLAHQEGEVASAQAAAAAGTIMTLSSWSSCSIEEVSSSAPGLRFFQLSVFKDRDIVQQLVRRAENAGYKAIAVTVDAPRLGRREADVRNRFTLPENVVLKCFEGLDLSKMDKTKGSGLAAYATSQIDSSLSWKDIKWLQTITGLPILVKGVITAEDARIAIECGVAGIIVSNHGGRQLDYLPATISCLEEVVREVKGRRVPVFLDGGIRRGTDVFKALALGASGVFIGRPVLFALAVDGRAGVRNALRMLRDELEITMALSGCSSLKDITRDRVITESDMIRRSRM

SEQ ID NO: 13855 - DNA, 1161 bp, Zea mays subsp. mays
  misc_feature (1)..(1161): Ceres Seq. ID no. 12364133
  misc_feature (1)..(1161): Ortholog of  Ceres SEQ ID NO 13597609 as cited in SEQ ID NO 65216
attagcaaagcgtacatccctccaacaaaccttgagttgagagaggagagaggagacagcaagcgacacaacacagaggtaaccggctcacgcctgtctcggtggccgtgggcaatcatggccactgtgggacagtctggggccctgaggagggtcaccgtgcactacgccaactcgcccacaggcagcacggtggcagaagtgagctttgacgaccttgacgacnagctgctcctgtttgtgctcgccgatcttcttcctggccaggaaggtttacaccagtcgatcttggaaggaacatacaacaaccaggagaaccacatgagaggtgcagcacccagtgcaccatatggttattcacggccagaggagtaccgtgcagagagcagcactgctgcagcagcagcaactggttctaggaattcaggcatggatgaacagatcgcctcggacttcgagtacgccaagcagctgcagcaggagatggaggacctcagcgtcaaagacgaagacgacaacgatatcagctgcgtgccgtctccatctgactctgacgatgagcacgagcatcatgacgaagaggaagaggctgacaggcaggaggacggtgatggtgatgatgatccagacaacatgacttatgagcaaggacaggcacttgtagaatctgtggggactgagtacagaggtctatccgatgagctcatctcctacctgcagccatggaagtacaaggcagtcaaggcttcagggctcttctcccggaaaacaaaccatgaagactgcccgatctgcctgtccactttcagaaaccgggaaaccatgataacgttgccgtgcaggcatcactaccacgcagcttgtgtcaccagatggctcaaggtcaacaagacatgccctgtatgcaaatacgaactgtttggaccttcctaggatccgaccacgtcgacgatggagctgagaggataatgatgatgacgacgacaacgacagatggttgtgtcatctgctctctttttttagcgccaagaaaactggaaatgaaaaagggaaatcaatccgaaaggagaatagaaattaggaagtataggtagaatatctctcttgccagtgactgtgcgatgaattaagcatacctcgtgctatttatgagaaaaaggg

SEQ ID NO: 13856 - protein, 310 aa, Zea mays subsp. mays
  peptide (1)..(310): Ceres Seq. ID no. 12364134
  misc_feature (76)..(76): Xaa is any aa, unknown or other
ISKAYIPPTNLELREERGDSKRHNTEVTGSRLSRWPWAIMATVGQSGALRRVTVHYANSPTGSTVAEVSFDDLDDXLLLFVLADLLPGQEGLHQSILEGTYNNQENHMRGAAPSAPYGYSRPEEYRAESSTAAAAATGSRNSGMDEQIASDFEYAKQLQQEMEDLSVKDEDDNDISCVPSPSDSDDEHEHHDEEEEADRQEDGDGDDDPDNMTYEQGQALVESVGTEYRGLSDELISYLQPWKYKAVKASGLFSRKTNHEDCPICLSTFRNRETMITLPCRHHYHAACVTRWLKVNKTCPVCKYELFGPS

SEQ ID NO: 13857 - protein, 271 aa, Zea mays subsp. mays
  peptide (1)..(271): Ceres Seq. ID no. 12364135
  misc_feature (37)..(37): Xaa is any aa, unknown or other
MATVGQSGALRRVTVHYANSPTGSTVAEVSFDDLDDXLLLFVLADLLPGQEGLHQSILEGTYNNQENHMRGAAPSAPYGYSRPEEYRAESSTAAAAATGSRNSGMDEQIASDFEYAKQLQQEMEDLSVKDEDDNDISCVPSPSDSDDEHEHHDEEEEADRQEDGDGDDDPDNMTYEQGQALVESVGTEYRGLSDELISYLQPWKYKAVKASGLFSRKTNHEDCPICLSTFRNRETMITLPCRHHYHAACVTRWLKVNKTCPVCKYELFGPS

SEQ ID NO: 13858 - protein, 203 aa, Zea mays subsp. mays
  peptide (1)..(203): Ceres Seq. ID no. 12364136
MRGAAPSAPYGYSRPEEYRAESSTAAAAATGSRNSGMDEQIASDFEYAKQLQQEMEDLSVKDEDDNDISCVPSPSDSDDEHEHHDEEEEADRQEDGDGDDDPDNMTYEQGQALVESVGTEYRGLSDELISYLQPWKYKAVKASGLFSRKTNHEDCPICLSTFRNRETMITLPCRHHYHAACVTRWLKVNKTCPVCKYELFGPS

SEQ ID NO: 13859 - DNA, 1914 bp, Zea mays subsp. mays
  misc_feature (1)..(1914): Ceres Seq. ID no. 12454931
  misc_feature (1)..(1914): Ortholog of  Ceres SEQ ID NO 15174752 as cited in SEQ ID NO 53279
  misc_feature (1)..(1914): Ortholog of  Ceres SEQ ID NO 14308389 as cited in SEQ ID NO 55226
  misc_feature (1)..(1914): Ortholog of  Ceres SEQ ID NO 15177652 as cited in SEQ ID NO 56858
  misc_feature (1)..(1914): Ortholog of  Ceres SEQ ID NO 15226087 as cited in SEQ ID NO 58655
  misc_feature (1)..(1914): Ortholog of  Ceres SEQ ID NO 13597162 as cited in SEQ ID NO 63955
  misc_feature (1)..(1914): Ortholog of  Ceres SEQ ID NO 14308049 as cited in SEQ ID NO 66203
  misc_feature (1)..(1914): Ortholog of  Ceres SEQ ID NO 14313292 as cited in SEQ ID NO 67393
  misc_feature (1)..(1914): Ortholog of  Ceres SEQ ID NO 14313567 as cited in SEQ ID NO 68074
aaggcccaactccactcatcgccactgcgccgaaacccaaagcggggaggaggagcggaaaagaaaaggaaaatgggaggagcggaagcaagtccgagcaagtcagaggatccgccggcctatctccgcctataaaatgccgtcccaccccccaccttcctagcagctgctctccaccaagagctgctggcaccaccaaaccaatcgctggatttgtccagagtatttccggtttcaccgccctagatctgacccgagacgccgcgtcttcgctgagatggcgattactgtgaggcggtcgacgatggtgcgcccggcgcgggagacgccgcggcagcggctgtggaactccaacctcgacctcgtggtgccgcgcttccacacgcccagtgtctacttctaccgccgcgacggccccgtgccggatgcggaggggttcttcgacggcgagcggatgcggcgcgcgctggcagaggcgctcgtgccgttctatccaatggcgggccgcctcgcgcgggacgaggacggtagggtcgagatcgactgcaatggcgagggagtgctcttcgtcgaggccgacgcgcccgatgcctctgtcgatgactacggtgacttcgcgcccaccatggagctcaagcgcctcatcccgaccgtcgattacaccgacgacatctcggccttctcgctactcgtgctccaggtgacttatttcaaatgtggaggcgtctcccttggtgttggcatgcaacaccatgcagcggatggcatgtctggcttgcacttcattaactcatggtctgacctctgccgtggagctcaaatttctgtcatgcccttcattgaccgcacccttcttcgtgctcgtgatccaccaactccatcttttcaacatatcgagtaccagcctgccccagctatgttgtcctccacaacccagttccttgcttccaagtcaaagccacctgccactgctgtggacattttcaagctcactcgctcagaccttggccggctgcgctcacagcttcctgcaggggaaggtgcaccccggttcagcacatatgcagtgctagcggcacatgtctggaaatgtgtctcccttgcacgcagcctacctcctgaacaacccaccaagttgtattgcgccactgatggccgtcaacggctacagcctccactaccagatgggtactttggcaatgtcatcttcaccgcgacaccacttgctgaggcgggcaaggtgaccagtgagctggcagaaggagcagcagtcatccagggagcactggataggatggacaacgactactgccgctcagcgttagactacctggatcttcaaccggatctgtcagcacttgtgcgtggagcgcataccttccgctgcccgaacctagggctcaccagctgggtgcgccttcctatccatgatgctgacttcggatggggccggcctgtgttcatggggccaggtggcattgcgtatgaaggtctggcgtttgtcctcccaagtgcaaatggcgacggcagcctgtccattgctatctcgttgcaggctgagcacatggagaagttccggaagctaatcggcggtgccaactgttgaaggaggatgtcatagggcgagagggattatgctccgcccaaattctcagataaaatactgaagtttcaagtgaacccagtggctgcactttcactttgaagacttgcagaggaaattcatggtcacttcattttgtgaggttaattatagagaaagggtagaaattatatgaagaaacatagtaaaaaatcattgttaggaacaaactccaatagcaggctctacttgtacgtcgcagacataagctgagactgatctgcgattgcaacagattatactcttctatcaggttgactgaagttccctcg

SEQ ID NO: 13860 - protein, 442 aa, Zea mays subsp. mays
  peptide (1)..(442): Ceres Seq. ID no. 12454932
MAITVRRSTMVRPARETPRQRLWNSNLDLVVPRFHTPSVYFYRRDGPVPDAEGFFDGERMRRALAEALVPFYPMAGRLARDEDGRVEIDCNGEGVLFVEADAPDASVDDYGDFAPTMELKRLIPTVDYTDDISAFSLLVLQVTYFKCGGVSLGVGMQHHAADGMSGLHFINSWSDLCRGAQISVMPFIDRTLLRARDPPTPSFQHIEYQPAPAMLSSTTQFLASKSKPPATAVDIFKLTRSDLGRLRSQLPAGEGAPRFSTYAVLAAHVWKCVSLARSLPPEQPTKLYCATDGRQRLQPPLPDGYFGNVIFTATPLAEAGKVTSELAEGAAVIQGALDRMDNDYCRSALDYLDLQPDLSALVRGAHTFRCPNLGLTSWVRLPIHDADFGWGRPVFMGPGGIAYEGLAFVLPSANGDGSLSIAISLQAEHMEKFRKLIGGANC

SEQ ID NO: 13861 - protein, 433 aa, Zea mays subsp. mays
  peptide (1)..(433): Ceres Seq. ID no. 12454933
MVRPARETPRQRLWNSNLDLVVPRFHTPSVYFYRRDGPVPDAEGFFDGERMRRALAEALVPFYPMAGRLARDEDGRVEIDCNGEGVLFVEADAPDASVDDYGDFAPTMELKRLIPTVDYTDDISAFSLLVLQVTYFKCGGVSLGVGMQHHAADGMSGLHFINSWSDLCRGAQISVMPFIDRTLLRARDPPTPSFQHIEYQPAPAMLSSTTQFLASKSKPPATAVDIFKLTRSDLGRLRSQLPAGEGAPRFSTYAVLAAHVWKCVSLARSLPPEQPTKLYCATDGRQRLQPPLPDGYFGNVIFTATPLAEAGKVTSELAEGAAVIQGALDRMDNDYCRSALDYLDLQPDLSALVRGAHTFRCPNLGLTSWVRLPIHDADFGWGRPVFMGPGGIAYEGLAFVLPSANGDGSLSIAISLQAEHMEKFRKLIGGANC

SEQ ID NO: 13862 - protein, 383 aa, Zea mays subsp. mays
  peptide (1)..(383): Ceres Seq. ID no. 12454934
MRRALAEALVPFYPMAGRLARDEDGRVEIDCNGEGVLFVEADAPDASVDDYGDFAPTMELKRLIPTVDYTDDISAFSLLVLQVTYFKCGGVSLGVGMQHHAADGMSGLHFINSWSDLCRGAQISVMPFIDRTLLRARDPPTPSFQHIEYQPAPAMLSSTTQFLASKSKPPATAVDIFKLTRSDLGRLRSQLPAGEGAPRFSTYAVLAAHVWKCVSLARSLPPEQPTKLYCATDGRQRLQPPLPDGYFGNVIFTATPLAEAGKVTSELAEGAAVIQGALDRMDNDYCRSALDYLDLQPDLSALVRGAHTFRCPNLGLTSWVRLPIHDADFGWGRPVFMGPGGIAYEGLAFVLPSANGDGSLSIAISLQAEHMEKFRKLIGGANC

SEQ ID NO: 13863 - DNA, 387 bp, Zea mays subsp. mays
  misc_feature (1)..(387): Ceres Seq. ID no. 13622708
  misc_feature (1)..(387): Ortholog of  Ceres SEQ ID NO 15224695 as cited in SEQ ID NO 65418
gatagatgcccgaccaatctaatagcgccgcaacgcgaagcgcgaagccgcgaagcctcacctacagttccttcgcgcaccggcaccgcggcggcagttcagcatggtggcagcatccgtagccgagcgggcctatgaggcggcgacgcggtccgcgctggtggcgctggagcgcaacctcatcccggacgcggtgacccggcgcctgacgcggctcctgctcgcgcagcgcctccgccagggctacctcccctccgcgccgctccagctgcagcagctcctccagttcgtccactctcttgaagagatgcccattgccattgaaacagacaaagctaaagcccaacactatgagttgccaactacatttttcaagctagtgctggg

SEQ ID NO: 13864 - protein, 94 aa, Zea mays subsp. mays
  peptide (1)..(94): Ceres Seq. ID no. 13622709
MVAASVAERAYEAATRSALVALERNLIPDAVTRRLTRLLLAQRLRQGYLPSAPLQLQQLLQFVHSLEEMPIAIETDKAKAQHYELPTTFFKLVL

SEQ ID NO: 13865 - DNA, 442 bp, Zea mays subsp. mays
  misc_feature (1)..(442): Ceres Seq. ID no. 2817268
  misc_feature (1)..(442): Ortholog of  Ceres SEQ ID NO 13596277 as cited in SEQ ID NO 67896
aatggcagaattccaattttctctccacaccaggccacgccacacacaggatagcgagcgggagcgacggcggcggcggaggagctagggttttgatccggcctcgccggctaggctgcgccgccccgacgccgaagccatggacagggagcttctagagacgtttgacgtggccaagaaggcggccgacgcggcggcaggggacggcaactcgccggaggctggccgctgcctcgacgcgctgcggcggctgcgcgacattcgcgtcaacaccgacatcctcgtctcgacgcaggttggcaaacgccttcgaccccttactaagcatcctcactcaggcattcaagcagttgctgcagacctttttgggtactggaaaaaggttgtccttgaagagtcaggaaagaaaaatggcggctcagagaatgaaagatcaagtgac

SEQ ID NO: 13866 - protein, 101 aa, Zea mays subsp. mays
  peptide (1)..(101): Ceres Seq. ID no. 2817269
MDRELLETFDVAKKAADAAAGDGNSPEAGRCLDALRRLRDIRVNTDILVSTQVGKRLRPLTKHPHSGIQAVAADLFGYWKKVVLEESGKKNGGSENERSSD

SEQ ID NO: 13867 - protein, 51 aa, Zea mays subsp. mays
  peptide (1)..(51): Ceres Seq. ID no. 2817270
WQNSNFLSTPGHATHRIASGSDGGGGGARVLIRPRRLGCAAPTPKPWTGSF

SEQ ID NO: 13868 - DNA, 488 bp, Zea mays subsp. mays
  misc_feature (1)..(488): Ceres Seq. ID no. 2817291
  misc_feature (1)..(488): Ortholog of  Ceres SEQ ID NO 13594308 as cited in SEQ ID NO 57706
actacacgccaaccaaacgccacccgataataaaaacacgagcggcagcagcgatgcttcaggttcgcgcgtccccggccttcctcccctccacctcctccccgccatcgtcgtcgcaggcgccaccgcgttcccgctctcggggaagagccagcggcgccgcggcgggctggtcgcggtgccgcaggcgagccgcgtggctaggcggtccgtgatggcagcggcgggggcagccgcagccgccccggcggcggccaagctcgaggacgccgacgcgctcatcgactctgtggagaccttcatcttcgactgcgacggtgtgatctggaagggcgacaagctgatcgacggcgtgctggagactctcgacctgctccgatcaaagggcaagcggctggtgttcgtgaccaacaactccaccaagtcgaggaagcagtacggcaggaagttcgagacgctggggctgagcgtcgacgaggaagagatct

SEQ ID NO: 13869 - protein, 162 aa, Zea mays subsp. mays
  peptide (1)..(162): Ceres Seq. ID no. 2817292
LHANQTPPDNKNTSGSSDASGSRVPGLPPLHLLPAIVVAGATAFPLSGKSQRRRGGLVAVPQASRVARRSVMAAAGAAAAAPAAAKLEDADALIDSVETFIFDCDGVIWKGDKLIDGVLETLDLLRSKGKRLVFVTNNSTKSRKQYGRKFETLGLSVDEEEI

SEQ ID NO: 13870 - protein, 91 aa, Zea mays subsp. mays
  peptide (1)..(91): Ceres Seq. ID no. 2817293
MAAAGAAAAAPAAAKLEDADALIDSVETFIFDCDGVIWKGDKLIDGVLETLDLLRSKGKRLVFVTNNSTKSRKQYGRKFETLGLSVDEEEI

SEQ ID NO: 13871 - DNA, 2115 bp, Zea mays subsp. mays
  misc_feature (1)..(2115): Ceres Seq. ID no. 13635237
  misc_feature (1)..(2115): Ortholog of  Ceres SEQ ID NO 14313670 as cited in SEQ ID NO 54491
atgtgtgggattctggcggtgctgggcgtcgttgaggtctccctcgccaagcgctcccgcatcattgagctctcgcgcaggttacggcaccgagggcctgattggagtggtttgcactgtcatgaggattgttaccttgcacaccagcggttggctattatcgatcctacatctggagaccagcctttgtacaatgaggataaaacagttgttgtaacggtgaacggcgaaatttacaatcatgaagaattgaaagctaagttgaaaactcatgagttccaaactggcagtgattgtgaagttatagcccatctttacgaagaatatggcgaagaatttgtggatatgttggatggaatgttctcctttgttcttcttgatacacgtgataaaagcttcatcgcagctcgtgatgctattggcatctgccctttatacatgggatggggtcttgatggatcagtctggttttcttcagagatgaaggcattgagtgatgattgtgaacgcttcataacatttcccccagggcatctctactccagcaagacaggtggtctaaggagatggtacaacccaccatggttttcagagactgtcccttcaaccccttacaatgctctcttcctccgggagatgtttgagaaggctgttattaagaggctgatgactgatgtgccatttggtgtgcttttatctggtggactcgactcttctttggttgcatctgttgcttcgcggcacttaaacgaaacaaaggttgacaggcagtggggaaataaattgcatactttctgtataggcttgaagggttctcctgatcttaaagctgctagagaagttgctgattacctcagcactgtacatcatgagttccacttcacagtgcaggaggggattgatgccttggaagaagtcatctaccatattgagacatatgatgttacaacaatcagagcaagtaccccaatgtttttgatgtcacgcaaaatcaaatctttgggtgtgaagatggttatttctggcgaaggttcagatgaaatttttggtggttacctttattttcacaaggcaccaaacaagaaagaattcctagaggaaacatgtcggaagataaaagcactacatctgtatgactgcttgagagctaacaaagcaacttctgcctggggtgttgaggctcgtgttccattccttgacaaaagtttcatcagtgtagcaatggacattgatcctgaatggaacatgataaaacgtgacctcggtcgaattgagaagtgggtcatgaggaaggcgttcgacgacgacgagcacccttacctgcccaagcatattctctacaggcagaaagaacagttcagtgacggcgttggctacaactggatcgatggcctcaaatccttcactgaacagcaggtgacggatgagatgatgaacaacgccgcccagatgttcccctacaacacgcccgtcaacaaggaggcctactactaccggatgatattcgagaggctcttccctcaggactcggcgagggagacggtgccgtggggcccgagcatcgcctgcagcacgcccgcggccatcgagtgggtggagcagtggaaggcctccaacgacccctccggccgcttcatctcctcccacgactccgccgccaccgaccacacggcggtaagccggcggtggccaacggcggcggcacggccggcgaacggcacggtcaacggcaaggacgtgccagtgccgatcgcggtctgacgagagtacgtgctcgcgcacctccctgctagcttctaccgggctgcagcctgcagcatgcactgtgcgagcacagccgatcagcgccaataaactggaggataagaacgactggtagctgtgtgtgtgtgtgtcgtgcgtgcccaccggccatatcccggtgcggcagcacgtgctattgttacgtgttgtactgccaccagcgtacgtgtctgtgtgtctcgatcatatctgtacgtttttagatttagaagagaaaaaaaaagtatgcccgtgtctgtatgtctggatcatatctgtacgttcttagatttagaagaaagaagaaaaagaatatatacgtgtctctatgtc

SEQ ID NO: 13872 - protein, 586 aa, Zea mays subsp. mays
  peptide (1)..(586): Ceres Seq. ID no. 13635238
MCGILAVLGVVEVSLAKRSRIIELSRRLRHRGPDWSGLHCHEDCYLAHQRLAIIDPTSGDQPLYNEDKTVVVTVNGEIYNHEELKAKLKTHEFQTGSDCEVIAHLYEEYGEEFVDMLDGMFSFVLLDTRDKSFIAARDAIGICPLYMGWGLDGSVWFSSEMKALSDDCERFITFPPGHLYSSKTGGLRRWYNPPWFSETVPSTPYNALFLREMFEKAVIKRLMTDVPFGVLLSGGLDSSLVASVASRHLNETKVDRQWGNKLHTFCIGLKGSPDLKAAREVADYLSTVHHEFHFTVQEGIDALEEVIYHIETYDVTTIRASTPMFLMSRKIKSLGVKMVISGEGSDEIFGGYLYFHKAPNKKEFLEETCRKIKALHLYDCLRANKATSAWGVEARVPFLDKSFISVAMDIDPEWNMIKRDLGRIEKWVMRKAFDDDEHPYLPKHILYRQKEQFSDGVGYNWIDGLKSFTEQQVTDEMMNNAAQMFPYNTPVNKEAYYYRMIFERLFPQDSARETVPWGPSIACSTPAAIEWVEQWKASNDPSGRFISSHDSAATDHTAVSRRWPTAAARPANGTVNGKDVPVPIAV

SEQ ID NO: 13873 - protein, 471 aa, Zea mays subsp. mays
  peptide (1)..(471): Ceres Seq. ID no. 13635239
MLDGMFSFVLLDTRDKSFIAARDAIGICPLYMGWGLDGSVWFSSEMKALSDDCERFITFPPGHLYSSKTGGLRRWYNPPWFSETVPSTPYNALFLREMFEKAVIKRLMTDVPFGVLLSGGLDSSLVASVASRHLNETKVDRQWGNKLHTFCIGLKGSPDLKAAREVADYLSTVHHEFHFTVQEGIDALEEVIYHIETYDVTTIRASTPMFLMSRKIKSLGVKMVISGEGSDEIFGGYLYFHKAPNKKEFLEETCRKIKALHLYDCLRANKATSAWGVEARVPFLDKSFISVAMDIDPEWNMIKRDLGRIEKWVMRKAFDDDEHPYLPKHILYRQKEQFSDGVGYNWIDGLKSFTEQQVTDEMMNNAAQMFPYNTPVNKEAYYYRMIFERLFPQDSARETVPWGPSIACSTPAAIEWVEQWKASNDPSGRFISSHDSAATDHTAVSRRWPTAAARPANGTVNGKDVPVPIAV

SEQ ID NO: 13874 - protein, 467 aa, Zea mays subsp. mays
  peptide (1)..(467): Ceres Seq. ID no. 13635240
MFSFVLLDTRDKSFIAARDAIGICPLYMGWGLDGSVWFSSEMKALSDDCERFITFPPGHLYSSKTGGLRRWYNPPWFSETVPSTPYNALFLREMFEKAVIKRLMTDVPFGVLLSGGLDSSLVASVASRHLNETKVDRQWGNKLHTFCIGLKGSPDLKAAREVADYLSTVHHEFHFTVQEGIDALEEVIYHIETYDVTTIRASTPMFLMSRKIKSLGVKMVISGEGSDEIFGGYLYFHKAPNKKEFLEETCRKIKALHLYDCLRANKATSAWGVEARVPFLDKSFISVAMDIDPEWNMIKRDLGRIEKWVMRKAFDDDEHPYLPKHILYRQKEQFSDGVGYNWIDGLKSFTEQQVTDEMMNNAAQMFPYNTPVNKEAYYYRMIFERLFPQDSARETVPWGPSIACSTPAAIEWVEQWKASNDPSGRFISSHDSAATDHTAVSRRWPTAAARPANGTVNGKDVPVPIAV

SEQ ID NO: 13875 - DNA, 1895 bp, Zea mays subsp. mays
  misc_feature (1)..(1895): Ceres Seq. ID no. 12567136
  misc_feature (1)..(1895): Ortholog of  Ceres SEQ ID NO 14312423 as cited in SEQ ID NO 55259
acccgtcctccacttgcccttctccgccaacagactgtccccggccgctgccattgccgattgctcacatccgcgttcgtgttcgcatccgcatcagggtcacctgcgccggcgagccatttgaaagggaggagtagcagactctcagaggtggacatgacgctgttgtgcgtgccgctggtggggcggacggtggaggagatgattacagacgcggcggcggccgccgccaccggcggcgacatggtcgagatccggcttgacttcatccaggggttccgcccgcgtgagcacctaccgcccctgctccgcggctgcccactcccggccctcgtcacctatcgacctgtctgggaaggaggccaatatgaaggtgatgacaccacaagatttgagacactacgtttagcaatggaattaggtgtagactatgttgatattgaattgaaggttgcagacaaatttatgagctttattgctggccataagccagagaaatgtaaacttattgtttcttcacataattatgaatatactccatcatgtgaggaaattacaaatcttgtcgctagtatacaagcagttggagctgatatagtgaaagttgcaacaaccgccaaggacattgtcgatgtatcacggatgttccaagtgatggtacactgccaagtgcctatgattggactcgtaatgagtgaaaaaggtttaatgtcaagagtgttagcgcccaagtttggtggatatcttacatttgggatactgaatgctacaaagacatcagcttctggacaaccaacagttgaggacttactggacatttacaacataaagtgtattgggcctgatacaaagattcttggtcttatagccaacccagtaaaacagagcaagagcccaattttacacaataaatgtcttcagtccattggatataatgctgtttatcttccacttcttggagataatcttgctagttttctggagacatactcatctcctgacttttcaggatttagttgctcacttcctttcaaagtagatgctgtacagtgttgtgatgaacatgatccagttgctaagtcaataggagccataaacactataattagaagaccagatggcaaattagtggggtacaatacggactacattggagctatatctgctattgaggatggcattggaggtccagggtcaaaggatgctgtcatctcaccattggctggtaggcttattgttgttgtaggagctgggggtgctggtaaggcaattgcttatggggcaaaggagaagggtgcgagggtagttatagcaaatcgcacctatgagaaggctgtacgtcttgccaatgcaattggtggtcaggccctgagattagaagacctggaaactttcagacctgaagaagggatgatccttgctaatgcaacatcattggggatgtacccaaatgttgatggtactcctattccaaagaaagccttgggtttctatgatgtggtatttgatgccgtatatgccccaaaagttactcggcttcttcgagaagcagaagaatgtggagttaaagttgttagtggtgtggaaatgtttattagacaagccatgggtcaatttgagcatttcaccggtggtatagaagctcctgaaagcctgatgcgtgagatagcagcaaaatacacctagcaggctaatggcgaaaacctatctttgatgaatatttgcccaaagattttctcgggctgagtgaataaatgttttgcagttatcatgtttgctgttatgttagatttagccgacttgtcacctgcacactgtaagattatgttgccatgctatagtgttcttgtacctgcaatagaagagttgcaagaataaagagtcagcttagaacc

SEQ ID NO: 13876 - protein, 561 aa, Zea mays subsp. mays
  peptide (1)..(561): Ceres Seq. ID no. 12567137
TRPPLALLRQQTVPGRCHCRLLTSAFVFASASGSPAPASHLKGRSSRLSEVDMTLLCVPLVGRTVEEMITDAAAAAATGGDMVEIRLDFIQGFRPREHLPPLLRGCPLPALVTYRPVWEGGQYEGDDTTRFETLRLAMELGVDYVDIELKVADKFMSFIAGHKPEKCKLIVSSHNYEYTPSCEEITNLVASIQAVGADIVKVATTAKDIVDVSRMFQVMVHCQVPMIGLVMSEKGLMSRVLAPKFGGYLTFGILNATKTSASGQPTVEDLLDIYNIKCIGPDTKILGLIANPVKQSKSPILHNKCLQSIGYNAVYLPLLGDNLASFLETYSSPDFSGFSCSLPFKVDAVQCCDEHDPVAKSIGAINTIIRRPDGKLVGYNTDYIGAISAIEDGIGGPGSKDAVISPLAGRLIVVVGAGGAGKAIAYGAKEKGARVVIANRTYEKAVRLANAIGGQALRLEDLETFRPEEGMILANATSLGMYPNVDGTPIPKKALGFYDVVFDAVYAPKVTRLLREAEECGVKVVSGVEMFIRQAMGQFEHFTGGIEAPESLMREIAAKYT

SEQ ID NO: 13877 - protein, 509 aa, Zea mays subsp. mays
  peptide (1)..(509): Ceres Seq. ID no. 12567138
MTLLCVPLVGRTVEEMITDAAAAAATGGDMVEIRLDFIQGFRPREHLPPLLRGCPLPALVTYRPVWEGGQYEGDDTTRFETLRLAMELGVDYVDIELKVADKFMSFIAGHKPEKCKLIVSSHNYEYTPSCEEITNLVASIQAVGADIVKVATTAKDIVDVSRMFQVMVHCQVPMIGLVMSEKGLMSRVLAPKFGGYLTFGILNATKTSASGQPTVEDLLDIYNIKCIGPDTKILGLIANPVKQSKSPILHNKCLQSIGYNAVYLPLLGDNLASFLETYSSPDFSGFSCSLPFKVDAVQCCDEHDPVAKSIGAINTIIRRPDGKLVGYNTDYIGAISAIEDGIGGPGSKDAVISPLAGRLIVVVGAGGAGKAIAYGAKEKGARVVIANRTYEKAVRLANAIGGQALRLEDLETFRPEEGMILANATSLGMYPNVDGTPIPKKALGFYDVVFDAVYAPKVTRLLREAEECGVKVVSGVEMFIRQAMGQFEHFTGGIEAPESLMREIAAKYT

SEQ ID NO: 13878 - protein, 494 aa, Zea mays subsp. mays
  peptide (1)..(494): Ceres Seq. ID no. 12567139
MITDAAAAAATGGDMVEIRLDFIQGFRPREHLPPLLRGCPLPALVTYRPVWEGGQYEGDDTTRFETLRLAMELGVDYVDIELKVADKFMSFIAGHKPEKCKLIVSSHNYEYTPSCEEITNLVASIQAVGADIVKVATTAKDIVDVSRMFQVMVHCQVPMIGLVMSEKGLMSRVLAPKFGGYLTFGILNATKTSASGQPTVEDLLDIYNIKCIGPDTKILGLIANPVKQSKSPILHNKCLQSIGYNAVYLPLLGDNLASFLETYSSPDFSGFSCSLPFKVDAVQCCDEHDPVAKSIGAINTIIRRPDGKLVGYNTDYIGAISAIEDGIGGPGSKDAVISPLAGRLIVVVGAGGAGKAIAYGAKEKGARVVIANRTYEKAVRLANAIGGQALRLEDLETFRPEEGMILANATSLGMYPNVDGTPIPKKALGFYDVVFDAVYAPKVTRLLREAEECGVKVVSGVEMFIRQAMGQFEHFTGGIEAPESLMREIAAKYT

SEQ ID NO: 13879 - DNA, 1422 bp, Zea mays subsp. mays; identical to SEQ ID NO: 9592
  misc_feature (1)..(1422): Ceres Seq. ID no. 13492589
  misc_feature (1)..(1422): Ortholog of  Ceres SEQ ID NO 15179320 as cited in SEQ ID NO 0

SEQ ID NO: 13880 - protein, 149 aa, Zea mays subsp. mays; identical to SEQ ID NO: 9593
  peptide (1)..(149): Ceres Seq. ID no. 13492590

SEQ ID NO: 13881 - protein, 125 aa, Zea mays subsp. mays; identical to SEQ ID NO: 9594
  peptide (1)..(125): Ceres Seq. ID no. 13492591

SEQ ID NO: 13882 - protein, 121 aa, Zea mays subsp. mays; identical to SEQ ID NO: 9595
  peptide (1)..(121): Ceres Seq. ID no. 13492592

SEQ ID NO: 13883 - DNA, 990 bp, Zea mays subsp. mays
  misc_feature (1)..(990): Ceres Seq. ID no. 14309633
  misc_feature (1)..(990): Ortholog of  Ceres SEQ ID NO 14307682 as cited in SEQ ID NO 54529
aacgcactctccactccttcgcggcgggggtttaggcgcacggcggcaggccaattaacgccgctgcggcgagcgccgggggggaaatgggcggcgacggcacgagggcgctggaccagacgccgacgtgggccgtggccgccgtctgcgctgtcatcgtcgcggcgtccatactcctcgagggcttcctccaccacctcggtcagttgctcaacaagaagcggaagaaggcgctgtttgacgctctggagaaggttaaatcggagctgatgactctggggttcatatcgcctctgctgaccgtgacgggaaggtacatcgcgcgcatctgcatcccggagggagccgcaaacaccatgctgccctgccgcctgtccggtcactcggtggcggaagagcccaagggccatggccgacggcacctatctgaagatccaaccaaccttttttcctgccgcaaaggcatggtgtcgcttgtttcagccgacggcatgcatcagctgcacattttcgtgttcttcttggccgtcttccatgttaccttcagtttcttcacaatgtccttgggtagagcaaagactcgtatatggaaggtgtgggaaaaggaaacttgctcccctcagtataattatttaaatgacccctcaaagttcaggcttacgcaccaaacatcttttgtgaggcaacatgcaagttgttggagcaaaagcacaatcacgctctattttgtgagcttctttaggcagttcttcagatccgtccgtaagacagaactttgaggggtctgtggcgtgttttgctctggtgcggcatgcctgtgtatcccattgagattctgtacaattgcaaacagagagcggtacctttttagttaattatcagagatgactgtagaaagaaactgattgtggtgaggttgagtggacgaataaatggcgagtctgcctcattggatgcatcatgaaacgggcacttttgaggagggatggt

SEQ ID NO: 13884 - protein, 230 aa, Zea mays subsp. mays
  peptide (1)..(230): Ceres Seq. ID no. 14309634
MGGDGTRALDQTPTWAVAAVCAVIVAASILLEGFLHHLGQLLNKKRKKALFDALEKVKSELMTLGFISPLLTVTGRYIARICIPEGAANTMLPCRLSGHSVAEEPKGHGRRHLSEDPTNLFSCRKGMVSLVSADGMHQLHIFVFFLAVFHVTFSFFTMSLGRAKTRIWKVWEKETCSPQYNYLNDPSKFRLTHQTSFVRQHASCWSKSTITLYFVSFFRQFFRSVRKTEL

SEQ ID NO: 13885 - protein, 169 aa, Zea mays subsp. mays
  peptide (1)..(169): Ceres Seq. ID no. 14309635
MTLGFISPLLTVTGRYIARICIPEGAANTMLPCRLSGHSVAEEPKGHGRRHLSEDPTNLFSCRKGMVSLVSADGMHQLHIFVFFLAVFHVTFSFFTMSLGRAKTRIWKVWEKETCSPQYNYLNDPSKFRLTHQTSFVRQHASCWSKSTITLYFVSFFRQFFRSVRKTEL

SEQ ID NO: 13886 - protein, 140 aa, Zea mays subsp. mays
  peptide (1)..(140): Ceres Seq. ID no. 14309636
MLPCRLSGHSVAEEPKGHGRRHLSEDPTNLFSCRKGMVSLVSADGMHQLHIFVFFLAVFHVTFSFFTMSLGRAKTRIWKVWEKETCSPQYNYLNDPSKFRLTHQTSFVRQHASCWSKSTITLYFVSFFRQFFRSVRKTEL

SEQ ID NO: 13887 - DNA, 438 bp, Zea mays subsp. mays
  misc_feature (1)..(438): Ceres Seq. ID no. 2872073
  misc_feature (1)..(438): Ortholog of  Ceres SEQ ID NO 13596030 as cited in SEQ ID NO 62043
acacggcgtgccgcggtgggcgaccttttttgcaccgggagataaatcgacagcaccctgacctcaagtcctcaacccgcaggccgcagctgctcccgcccgccgcgcaagcggccaagcgccgccggttcttctcgagcaagagtacatgacttttgagctaagtgtttttcgtgagttctcataaatcattgtcctcataacttgtaatgggtggaagccagtatgatgatgactgggtgttgcccagtgccgatatcactcttgttctggttgggaaacttggctatggcaagagtgcaactggaaatagcatccttggacgggaagcatttgtatcagaatattcacatgccagtgttactaatacttgtcagttgggaagcactaccctgaaggacggccgcaccatcaatgttattgatacaccagggttat

SEQ ID NO: 13888 - protein, 76 aa, Zea mays subsp. mays
  peptide (1)..(76): Ceres Seq. ID no. 2872074
MGGSQYDDDWVLPSADITLVLVGKLGYGKSATGNSILGREAFVSEYSHASVTNTCQLGSTTLKDGRTINVIDTPGL

SEQ ID NO: 13889 - protein, 56 aa, Zea mays subsp. mays
  peptide (1)..(56): Ceres Seq. ID no. 2872075
MMMTGCCPVPISLLFWLGNLAMARVQLEIASLDGKHLYQNIHMPVLLILVSWEALP

SEQ ID NO: 13890 - protein, 55 aa, Zea mays subsp. mays
  peptide (1)..(55): Ceres Seq. ID no. 2872076
MMTGCCPVPISLLFWLGNLAMARVQLEIASLDGKHLYQNIHMPVLLILVSWEALP

SEQ ID NO: 13891 - DNA, 1376 bp, Zea mays subsp. mays; identical to SEQ ID NO: 5542
  misc_feature (1)..(1376): Ceres Seq. ID no. 13491083
  misc_feature (1)..(1376): Ortholog of  Ceres SEQ ID NO 12590227 as cited in SEQ ID NO 681

SEQ ID NO: 13892 - protein, 364 aa, Zea mays subsp. mays; identical to SEQ ID NO: 5543
  peptide (1)..(364): Ceres Seq. ID no. 13491084

SEQ ID NO: 13893 - protein, 342 aa, Zea mays subsp. mays; identical to SEQ ID NO: 5544
  peptide (1)..(342): Ceres Seq. ID no. 13491085

SEQ ID NO: 13894 - protein, 319 aa, Zea mays subsp. mays; identical to SEQ ID NO: 5545
  peptide (1)..(319): Ceres Seq. ID no. 13491086

SEQ ID NO: 13895 - DNA, 1402 bp, Zea mays subsp. mays
  misc_feature (1)..(1402): Ceres Seq. ID no. 12389013
  misc_feature (1)..(1402): Ortholog of  Ceres SEQ ID NO 13599520 as cited in SEQ ID NO 633
  misc_feature (1)..(1402): Ortholog of  Ceres SEQ ID NO 13595142 as cited in SEQ ID NO 56671
  misc_feature (1)..(1402): Ortholog of  Ceres SEQ ID NO 15168569 as cited in SEQ ID NO 58123
  misc_feature (1)..(1402): Ortholog of  Ceres SEQ ID NO 15226382 as cited in SEQ ID NO 63295
  misc_feature (1)..(1402): Ortholog of  Ceres SEQ ID NO 13598460 as cited in SEQ ID NO 63382
actccctcctcgtcgcttgccacaagtcctcgggcgtccgtcgatcataccgcataccgccggcgcagtcctcgccggcgctggacggggtgaagttttagatcaccagaggggcatttttctctcatcgggcagtagaagttttggatcttatccagctagcctccaatccatcatggatcatgacggcacgaacctggctgtcaatgaggctgtgcgctcggtgcagctgctcaagattgacggctacagcgccaccgctaccatgagcgagttggatttcatcaaatccagaaggaacctcgctggccacgagtgggaggtccttttctatcctcagttcagccgttacggtggctgcatagctttgaagctcgtccttgtcagtgaacccccgagggacaaggacaagctgctgagggcgagcctgagatgccgccttgtatgccctagccagccgcatctccatgcctccatagagaagagcgtgtcccatgtatttaccagtgactctagatgctcgtctgaagttatcctcatcccaaaatatgagctaccatcatcaggttacctcgtgaacgattcactgaccgtggaatgcacggtcaccgtgctacgcgacttggacgccacggctaaggtgctgtccctgccagtgccactgccaccaccctccgacctacaccagcacttcgatgagctgttgcagagcaagaatggagcggacgtcacgttccgtgtctccgggaagtcattcgccgcccacaaggccattctcgccgcaaggtccccggttttcatggctcagttcttcggaggcatgaaggaaagaagctctgctcatgtggagatcagagacatggactctgctgcgttcagttccatgcttcacttcatctataccgacatggtcccagagctcgacggtgcccaggagcctgaggcggcagcgatcatggctcagcacctactggtagctgctgacatgtatgggctgaacaggctgaagctgatatgtgaatgcaagctctctggtggcatcgacatcggcacggcggcttcgacgttggctctcgccgaacagcacgactgctcgctgctcaaagccaagtgtctcgagttcatcaccaggtcgcctgagacacttgaagctgtcctggcaactgatggatacgcgcatctggcggcaagctgtcccttggttctggctgaactactgatggctgcgcgtggaaggaagatctgagctggatgatggttttcgttgacagtcctattattactagtttttaattatcccttcctcgtatgatgagttgctttggcttctcatattttggttatggtttcccaagatgtatggcctaaagcatgatgaactagtgcttgcagttgatttccc

SEQ ID NO: 13896 - protein, 414 aa, Zea mays subsp. mays
  peptide (1)..(414): Ceres Seq. ID no. 12389014
LPPRRLPQVLGRPSIIPHTAGAVLAGAGRGEVLDHQRGIFLSSGSRSFGSYPASLQSIMDHDGTNLAVNEAVRSVQLLKIDGYSATATMSELDFIKSRRNLAGHEWEVLFYPQFSRYGGCIALKLVLVSEPPRDKDKLLRASLRCRLVCPSQPHLHASIEKSVSHVFTSDSRCSSEVILIPKYELPSSGYLVNDSLTVECTVTVLRDLDATAKVLSLPVPLPPPSDLHQHFDELLQSKNGADVTFRVSGKSFAAHKAILAARSPVFMAQFFGGMKERSSAHVEIRDMDSAAFSSMLHFIYTDMVPELDGAQEPEAAAIMAQHLLVAADMYGLNRLKLICECKLSGGIDIGTAASTLALAEQHDCSLLKAKCLEFITRSPETLEAVLATDGYAHLAASCPLVLAELLMAARGRKI

SEQ ID NO: 13897 - protein, 356 aa, Zea mays subsp. mays
  peptide (1)..(356): Ceres Seq. ID no. 12389015
MDHDGTNLAVNEAVRSVQLLKIDGYSATATMSELDFIKSRRNLAGHEWEVLFYPQFSRYGGCIALKLVLVSEPPRDKDKLLRASLRCRLVCPSQPHLHASIEKSVSHVFTSDSRCSSEVILIPKYELPSSGYLVNDSLTVECTVTVLRDLDATAKVLSLPVPLPPPSDLHQHFDELLQSKNGADVTFRVSGKSFAAHKAILAARSPVFMAQFFGGMKERSSAHVEIRDMDSAAFSSMLHFIYTDMVPELDGAQEPEAAAIMAQHLLVAADMYGLNRLKLICECKLSGGIDIGTAASTLALAEQHDCSLLKAKCLEFITRSPETLEAVLATDGYAHLAASCPLVLAELLMAARGRKI

SEQ ID NO: 13898 - protein, 326 aa, Zea mays subsp. mays
  peptide (1)..(326): Ceres Seq. ID no. 12389016
MSELDFIKSRRNLAGHEWEVLFYPQFSRYGGCIALKLVLVSEPPRDKDKLLRASLRCRLVCPSQPHLHASIEKSVSHVFTSDSRCSSEVILIPKYELPSSGYLVNDSLTVECTVTVLRDLDATAKVLSLPVPLPPPSDLHQHFDELLQSKNGADVTFRVSGKSFAAHKAILAARSPVFMAQFFGGMKERSSAHVEIRDMDSAAFSSMLHFIYTDMVPELDGAQEPEAAAIMAQHLLVAADMYGLNRLKLICECKLSGGIDIGTAASTLALAEQHDCSLLKAKCLEFITRSPETLEAVLATDGYAHLAASCPLVLAELLMAARGRKI

SEQ ID NO: 13899 - DNA, 1448 bp, Zea mays subsp. mays; identical to SEQ ID NO: 7069
  misc_feature (1)..(1448): Ceres Seq. ID no. 13494789
  misc_feature (1)..(1448): Ortholog of  Ceres SEQ ID NO 15168525 as cited in SEQ ID NO 58192

SEQ ID NO: 13900 - protein, 332 aa, Zea mays subsp. mays; identical to SEQ ID NO: 7070
  peptide (1)..(332): Ceres Seq. ID no. 13494790
  misc_feature (60)..(60): Xaa is any aa, unknown or other
  misc_feature (85)..(85): Xaa is any aa, unknown or other
  misc_feature (100)..(100): Xaa is any aa, unknown or other
  misc_feature (104)..(104): Xaa is any aa, unknown or other
  misc_feature (293)..(293): Xaa is any aa, unknown or other

SEQ ID NO: 13901 - protein, 297 aa, Zea mays subsp. mays; identical to SEQ ID NO: 7071
  peptide (1)..(297): Ceres Seq. ID no. 13494791
  misc_feature (25)..(25): Xaa is any aa, unknown or other
  misc_feature (50)..(50): Xaa is any aa, unknown or other
  misc_feature (65)..(65): Xaa is any aa, unknown or other
  misc_feature (69)..(69): Xaa is any aa, unknown or other
  misc_feature (258)..(258): Xaa is any aa, unknown or other

SEQ ID NO: 13902 - DNA, 1152 bp, Zea mays subsp. mays
  misc_feature (1)..(1152): Ceres Seq. ID no. 12455003
  misc_feature (1)..(1152): Ortholog of  Ceres SEQ ID NO 15168977 as cited in SEQ ID NO 20587
attaaagaaaaaggaaattttcttgggcgttcttcggcttcattgtcacaaggttcgagttcgtcaccgtctagtacgactgtgcgagggaggaagaggcgaggagaagatgcagatcttcgtgaagaccctgacggggaagaccatcaccctcgaggtggagagcagcgacaccgtcgacaacgtcaaggccaaaatccaggacaaggaagctgcatgggagtcgagctattcgagtccgcggcaagaatggaagcacatcgctgaacctgtcatgcaggtatacaccgagacaacagacggatcttcagtcgagtcgaaggagagcgctctagtgtggcactatttggatgcagaccatgatttcggttccttccaagcgaaggagctaaaggatcatcttgagagggtgctatcaaatgagcccgttgttgtgaagtgtggccattatatcgtagaagtaaagccgcagggagttagcaagggtcgtgctgtcgacaagctgattcaagcactggccaacaacaacgggaaggcacaggatttcctgatgtgcgtcggcaacgacagatctgacgaggacatgttcgaatgcatcaacggtatggcctccaacgatgtctcatcgaccacagtaccggaggtgtttgcctgttcggtcggccagaagcccagcaaagcaaaatactatgtggacgacaccagcgaagtgatcagattgctcagggatgcaacccgcttctcatcgtcgcagcggagggaggacgtcaacgccagccgcgggcgtgtgaccttcagagacgcactcgattacgtggactaggcaccagcagcaattcttagttactcgaaatgattagctgcggagcttgtaaattccgctgtcttctgtctgccaatggttttcgttctagagaattgtagtgtagccgacatcgacatggatcgtcgtcaccgatacacgaacagcggaaatatgagttgaagttcgtcgtttcgaggctcagaattggtacatttatagaattgtagtgtaggcaattttttggtagggaatagtaattggtacatttatagaattgtcaattgtttttcttctaccgctgataatactatagcttcgctaaattaatattattgtttcacttagcg

SEQ ID NO: 13903 - protein, 273 aa, Zea mays subsp. mays
  peptide (1)..(273): Ceres Seq. ID no. 12455004
LKKKEIFLGVLRLHCHKVRVRHRLVRLCEGGRGEEKMQIFVKTLTGKTITLEVESSDTVDNVKAKIQDKEAAWESSYSSPRQEWKHIAEPVMQVYTETTDGSSVESKESALVWHYLDADHDFGSFQAKELKDHLERVLSNEPVVVKCGHYIVEVKPQGVSKGRAVDKLIQALANNNGKAQDFLMCVGNDRSDEDMFECINGMASNDVSSTTVPEVFACSVGQKPSKAKYYVDDTSEVIRLLRDATRFSSSQRREDVNASRGRVTFRDALDYVD

SEQ ID NO: 13904 - protein, 237 aa, Zea mays subsp. mays
  peptide (1)..(237): Ceres Seq. ID no. 12455005
MQIFVKTLTGKTITLEVESSDTVDNVKAKIQDKEAAWESSYSSPRQEWKHIAEPVMQVYTETTDGSSVESKESALVWHYLDADHDFGSFQAKELKDHLERVLSNEPVVVKCGHYIVEVKPQGVSKGRAVDKLIQALANNNGKAQDFLMCVGNDRSDEDMFECINGMASNDVSSTTVPEVFACSVGQKPSKAKYYVDDTSEVIRLLRDATRFSSSQRREDVNASRGRVTFRDALDYVD

SEQ ID NO: 13905 - protein, 182 aa, Zea mays subsp. mays
  peptide (1)..(182): Ceres Seq. ID no. 12455006
MQVYTETTDGSSVESKESALVWHYLDADHDFGSFQAKELKDHLERVLSNEPVVVKCGHYIVEVKPQGVSKGRAVDKLIQALANNNGKAQDFLMCVGNDRSDEDMFECINGMASNDVSSTTVPEVFACSVGQKPSKAKYYVDDTSEVIRLLRDATRFSSSQRREDVNASRGRVTFRDALDYVD

SEQ ID NO: 13906 - DNA, 595 bp, Zea mays subsp. mays
  misc_feature (1)..(595): Ceres Seq. ID no. 2924141
  misc_feature (1)..(595): Ortholog of  Ceres SEQ ID NO 14305573 as cited in SEQ ID NO 683
aaaaaacaaagcaagtagctcctcacagtttgtgaaaaagatgatgacgtcattaccttacacttgccaatcacaaagtccttcaccgtacttcgacctgtctctttttaggtatgatgagaagctgatttcagcaattgatcggcatcggcattgcacagagcatccaataaaatttatgtcagtgaggcaaaatgttgtcaaatttaagatcaagccaggttcagattctggtgcttctgacagcagagcaaaaagaatctcgtccttcttgtttcacccatttttcccgcttgcactttcgattcagcagacttatatgcagccaactgttgtcaacatccatttcaggagatagaaaaggtataacggttgccttagttgtatttgtgtcattagtgaacttgcagcattgctggtggcaaagttttggccatatgtgctctagtagatatgctggaacaagatccattgctggcggtgaggatggctagttngatttntcttccaaaacaaagacaaaatgcaaatgggctatnttctctatngatgtgggctcatgggctcatcagtattatcattgtgcttcacagtg

SEQ ID NO: 13907 - protein, 118 aa, Zea mays subsp. mays
  peptide (1)..(118): Ceres Seq. ID no. 2924142
KNKASSSSQFVKKMMTSLPYTCQSQSPSPYFDLSLFRYDEKLISAIDRHRHCTEHPIKFMSVRQNVVKFKIKPGSDSGASDSRAKRISSFLFHPFFPLALSIQQTYMQPTVVNIHFRR

SEQ ID NO: 13908 - protein, 105 aa, Zea mays subsp. mays
  peptide (1)..(105): Ceres Seq. ID no. 2924143
MMTSLPYTCQSQSPSPYFDLSLFRYDEKLISAIDRHRHCTEHPIKFMSVRQNVVKFKIKPGSDSGASDSRAKRISSFLFHPFFPLALSIQQTYMQPTVVNIHFRR

SEQ ID NO: 13909 - protein, 104 aa, Zea mays subsp. mays
  peptide (1)..(104): Ceres Seq. ID no. 2924144
MTSLPYTCQSQSPSPYFDLSLFRYDEKLISAIDRHRHCTEHPIKFMSVRQNVVKFKIKPGSDSGASDSRAKRISSFLFHPFFPLALSIQQTYMQPTVVNIHFRR

SEQ ID NO: 13910 - DNA, 1111 bp, Zea mays subsp. mays
  misc_feature (1)..(1111): Ceres Seq. ID no. 12436364
  misc_feature (1)..(1111): Ortholog of  Ceres SEQ ID NO 12619999 as cited in SEQ ID NO 66123
  misc_feature (1)..(1111): Ortholog of  Ceres SEQ ID NO 13656436 as cited in SEQ ID NO 69154
atcccgtctcgtttcgtctcggtctcgcacctctcacgacggcaccaccccagcgcggcgcgagtggagacgccgctgctccgtgcttcgccgcgcctacctaacccaagacctgctagacctgagtggctgagtgttcgtgttcggtcaaaacccaccgcgcgagcgcctccagagtccaaacccgctacaaatctcgcgctgcgcattctccccgtacgatacggcggcacggcccacgagccaggcggtggcggcagctagctagctgcggagtagcaccagccaccggagggaagtgggcggcgcgatgggggacgagccggacggggaggcggaggagtacctcttcaaggtggtgatcatcggcgacagcgcggtggggaagagcaacctgctgtcccgctacgcgcgcaacgagttcaacccccactccaaggccaccatcggggtggagttccagacgcagagcatggccatcgaaggcaaggaggtcaaggcccagatctgggacaccgccggccaggagcgcttccgcgccgtcacctccgcctactaccgcggcgccttcggcgcgctcctcgtctatgacattacccgccgctccaccttcgacaacgtcggccgctggctccaggagctcaacacacattcggacacgacggtggccaagatgctggtgggcaacaagtgtgacctgggcgacatccgccaggtgcccgtggaggaaggcaaggcgctggccgaggccgagggcctcttcttcatggagacgtcggccctggacgccaccaacgtgaggacggccttcgagatcgtgatcagggagatctacagcaacgtgagccgcaaggtcctgaactcggactcgtacaaggccgagctgtccctcaacagggtgagcatcgacggcgactcaaaagacgagcagaagcaggggagccggttcgggtgctgctagaagtggtcggggggtagcggtacattattggatcgggttggatttgaaccggagatgatgctttttcatttttttttgggtggcgggtgggggcttgcttgtaaactgtaatacaaggtttgactctttgtttgctgttacgttacactc

SEQ ID NO: 13911 - protein, 216 aa, Zea mays subsp. mays
  peptide (1)..(216): Ceres Seq. ID no. 12436365
MGDEPDGEAEEYLFKVVIIGDSAVGKSNLLSRYARNEFNPHSKATIGVEFQTQSMAIEGKEVKAQIWDTAGQERFRAVTSAYYRGAFGALLVYDITRRSTFDNVGRWLQELNTHSDTTVAKMLVGNKCDLGDIRQVPVEEGKALAEAEGLFFMETSALDATNVRTAFEIVIREIYSNVSRKVLNSDSYKAELSLNRVSIDGDSKDEQKQGSRFGCC

SEQ ID NO: 13912 - protein, 162 aa, Zea mays subsp. mays
  peptide (1)..(162): Ceres Seq. ID no. 12436366
MAIEGKEVKAQIWDTAGQERFRAVTSAYYRGAFGALLVYDITRRSTFDNVGRWLQELNTHSDTTVAKMLVGNKCDLGDIRQVPVEEGKALAEAEGLFFMETSALDATNVRTAFEIVIREIYSNVSRKVLNSDSYKAELSLNRVSIDGDSKDEQKQGSRFGCC

SEQ ID NO: 13913 - DNA, 978 bp, Zea mays subsp. mays
  misc_feature (1)..(978): Ceres Seq. ID no. 13622791
  misc_feature (1)..(978): Ortholog of  Ceres SEQ ID NO 13656286 as cited in SEQ ID NO 69168
  misc_feature (1)..(978): Ortholog of  Ceres SEQ ID NO 15174351 as cited in SEQ ID NO 0
accaaccaaccaaccaacccacagttcccatataggcagccatcggctacacagcctcgcctccgtaagcagagtttgtcgttgtggaggcaggaagagagacgacggcggccatggcgacctccttccaggggacgaccaccaagcgcaccgcctgcgacaagacggtgtaccttgtggacaagctcaccgccgacaaccgcatctaccacaaggcctgcttccgctgccaccactgcaagggcaccctcaagctcgccaactacaactccttcgagggagtgctctactgcaggcctcacttcgaccagctgttcaagaggacagggagcttggacaagagcttcgaaggaactccgaaggttgtcaagccagaaagaaacgttgggaatgagaatgctactaaagtctcaagcgcctttgctggcaccagagagaaatgtgttggatgcagcaagacagtctatccaactgagagggtcactgttaacaacactatgtaccacaagagctgcttcaagtgctgccatggagggtgcaccatcagcccttctaactacattgcgcacgaggggaagctgtactgcaagcaccaccacatccagctgatcaaggaaaggggaacttcagccagcttgagaatgaccacgagaagacatcacaggctgggtcactggaggaggatgaacatgagtattgatcactgagcacaaccacagatgaataatgaatcctcttgcatttccctagagcactatgtatttctgtggcgtggttcgatttcagttttaccaatggaggtcatgtgtgttcagagaacaatgatattgttgtcttgtatctgcatgtaaacgttgttatctttgagtcagatactctacctggtttcaccattttcattggtcagaagatgcctctgcacctacaagacagaactgtaagctcttggtccatcttttgtttaagatgatgtttggc

SEQ ID NO: 13914 - protein, 202 aa, Zea mays subsp. mays
  peptide (1)..(202): Ceres Seq. ID no. 13622792
TNQPTNPQFPYRQPSATQPRLRKQSLSLWRQEERRRRPWRPPSRGRPPSAPPATRRCTLWTSSPPTTASTTRPASAATTARAPSSSPTTTPSRECSTAGLTSTSCSRGQGAWTRASKELRRLSSQKETLGMRMLLKSQAPLLAPERNVLDAARQSIQLRGSLLTTLCTTRAASSAAMEGAPSALLTTLRTRGSCTASTTTSS

SEQ ID NO: 13915 - protein, 197 aa, Zea mays subsp. mays
  peptide (1)..(197): Ceres Seq. ID no. 13622793
MATSFQGTTTKRTACDKTVYLVDKLTADNRIYHKACFRCHHCKGTLKLANYNSFEGVLYCRPHFDQLFKRTGSLDKSFEGTPKVVKPERNVGNENATKVSSAFAGTREKCVGCSKTVYPTERVTVNNTMYHKSCFKCCHGGCTISPSNYIAHEGKLYCKHHHIQLIKERGTSASLRMTTRRHHRLGHWRRMNMSIDH

SEQ ID NO: 13916 - protein, 130 aa, Zea mays subsp. mays
  peptide (1)..(130): Ceres Seq. ID no. 13622794
PTNQPTHSSHIGSHRLHSLASVSRVCRCGGRKRDDGGHGDLLPGDDHQAHRLRQDGVPCGQAHRRQPHLPQGLLPLPPLQGHPQARQLQLLRGSALLQASLRPAVQEDRELGQELRRNSEGCQARKKRWE

SEQ ID NO: 13917 - DNA, 2017 bp, Zea mays subsp. mays
  misc_feature (1)..(2017): Ceres Seq. ID no. 13622795
  misc_feature (1)..(2017): Ortholog of  Ceres SEQ ID NO 14313636 as cited in SEQ ID NO 64205
atccttctagcttcgatctctatatacctctgtatgtgagtgaggccaatgagagccctcgtagtcgtaagtttcgcttcggcgtgcttgctgctgctgttgcagctcgcaggagcgtcgcatgtcgtctacaactacaaggacctcgaagccgaggctgctgcggcgacggaccaggtgccgccgtccatcgtcaaccccctgctcaggacggggtaccacttccagccccccaagaactggatcaatgatcccaacgcgcccatgtactacaaggggtggtaccatttcttctaccaatacaatcccaagggcgccgtatggggcaacatcgtgtgggcgcactcggtgtcgcgagacctcatcaactgggtggcgctagagccggcgctcagaccaagcatcccgggcgacaggtacggctgctggtccgggtcggcgacggtgctgcccgacggcggcggcccggtgatcatgtacacgggcgtggaccacccggacatcaactaccaggtccagaacgtggcgtacccgaagaacgtgtcggacccgctgctccgggagtgggtgaagccctcgcacaaccccgtcatcgtccccgagggcggcatcaacgcgacgcagttccgcgacccgaccacggcctggcgcggccccggccccgagcagtggcggctgctcgtcggcagcgcggcggggtcgtcgccgccccgcggcgtggcgtacgtgtaccgtagccgcgacttccggcggtggaggcgggtgcggcggccgctgcactcggcgcccacggggatgtgggagtgccctgacttctacccggtgagcaagggcggcgcgccgcgcgcggggctcgagacgtccgtgccgcccggcccaagggtcaagcacgtgctcaagaacagcctcgacctccggcggtacgactactacaccgtgggcacgtaccacccgagggccgagcggtacgtgccggacgaccccgccggcgacgagcaccgcctgcgctacgactacggcaacttctacgcgtccaagacgttctacgacccggccaagcggcgccgcatcctgtggggctgggctaacgagtccgacaccgccgccgacgatgtggctaaaggctgggctggaatccaggcgattccaaggacggtgtggctggaccccagtgggaagcagctgctgcagtggcctatcgaggaggtggaggcgctgagagcaaagtcggtcactctcaggaacagggtaatcaaggcaggacatcacgtcgaggtgaccgggatacaaacggcacaggctgacgtggaggtgagcttcgaagtgtcgccggcggccctggccggtgccgagacgctggacccggcgctggcctacgacgcggagaggctgtgcggcgtgaagcgcgcggacgtgaggggcggcgtggggccgttcgggctgtgggtgctggcctccgccaaccgcaaggagagaaccgcggtgttcttcagggtgttcaagcccgccgccggcgacaagcccgtggtgctcatgtgcaccgaccctaccaagtcgtccctgaacccgaacctgtaccgcccgacatttgcaggatttgtcgacacggacatctcgaacggcaagatatccctgagaagcctgatcgaccggtcggtcgttgagagcttcggagccgggggcaagacctgcatcctctccagggtctacccgtcgctggccatcggcaaggacgctcgcctctacgtgttcaacaacgggagggcgcacgtcaaggtgtcccgtctcaccgcgtgggagatgaagaagccggtcatgaacggggcctgaagatcttgaataaatatatcactcatgcatgacatatagtggcgcctgagaaatctttccttatatatatatatattttagatatatcgtttaagaattcattttctacactaaaagggcgccccgttatgttacaatggtaccagctgcacttctagtaacaaagacaattgactatttgttgttc

SEQ ID NO: 13918 - protein, 593 aa, Zea mays subsp. mays
  peptide (1)..(593): Ceres Seq. ID no. 13622796
MRALVVVSFASACLLLLLQLAGASHVVYNYKDLEAEAAAATDQVPPSIVNPLLRTGYHFQPPKNWINDPNAPMYYKGWYHFFYQYNPKGAVWGNIVWAHSVSRDLINWVALEPALRPSIPGDRYGCWSGSATVLPDGGGPVIMYTGVDHPDINYQVQNVAYPKNVSDPLLREWVKPSHNPVIVPEGGINATQFRDPTTAWRGPGPEQWRLLVGSAAGSSPPRGVAYVYRSRDFRRWRRVRRPLHSAPTGMWECPDFYPVSKGGAPRAGLETSVPPGPRVKHVLKNSLDLRRYDYYTVGTYHPRAERYVPDDPAGDEHRLRYDYGNFYASKTFYDPAKRRRILWGWANESDTAADDVAKGWAGIQAIPRTVWLDPSGKQLLQWPIEEVEALRAKSVTLRNRVIKAGHHVEVTGIQTAQADVEVSFEVSPAALAGAETLDPALAYDAERLCGVKRADVRGGVGPFGLWVLASANRKERTAVFFRVFKPAAGDKPVVLMCTDPTKSSLNPNLYRPTFAGFVDTDISNGKISLRSLIDRSVVESFGAGGKTCILSRVYPSLAIGKDARLYVFNNGRAHVKVSRLTAWEMKKPVMNGA

SEQ ID NO: 13919 - protein, 521 aa, Zea mays subsp. mays
  peptide (1)..(521): Ceres Seq. ID no. 13622797
MYYKGWYHFFYQYNPKGAVWGNIVWAHSVSRDLINWVALEPALRPSIPGDRYGCWSGSATVLPDGGGPVIMYTGVDHPDINYQVQNVAYPKNVSDPLLREWVKPSHNPVIVPEGGINATQFRDPTTAWRGPGPEQWRLLVGSAAGSSPPRGVAYVYRSRDFRRWRRVRRPLHSAPTGMWECPDFYPVSKGGAPRAGLETSVPPGPRVKHVLKNSLDLRRYDYYTVGTYHPRAERYVPDDPAGDEHRLRYDYGNFYASKTFYDPAKRRRILWGWANESDTAADDVAKGWAGIQAIPRTVWLDPSGKQLLQWPIEEVEALRAKSVTLRNRVIKAGHHVEVTGIQTAQADVEVSFEVSPAALAGAETLDPALAYDAERLCGVKRADVRGGVGPFGLWVLASANRKERTAVFFRVFKPAAGDKPVVLMCTDPTKSSLNPNLYRPTFAGFVDTDISNGKISLRSLIDRSVVESFGAGGKTCILSRVYPSLAIGKDARLYVFNNGRAHVKVSRLTAWEMKKPVMNGA

SEQ ID NO: 13920 - protein, 451 aa, Zea mays subsp. mays
  peptide (1)..(451): Ceres Seq. ID no. 13622798
MYTGVDHPDINYQVQNVAYPKNVSDPLLREWVKPSHNPVIVPEGGINATQFRDPTTAWRGPGPEQWRLLVGSAAGSSPPRGVAYVYRSRDFRRWRRVRRPLHSAPTGMWECPDFYPVSKGGAPRAGLETSVPPGPRVKHVLKNSLDLRRYDYYTVGTYHPRAERYVPDDPAGDEHRLRYDYGNFYASKTFYDPAKRRRILWGWANESDTAADDVAKGWAGIQAIPRTVWLDPSGKQLLQWPIEEVEALRAKSVTLRNRVIKAGHHVEVTGIQTAQADVEVSFEVSPAALAGAETLDPALAYDAERLCGVKRADVRGGVGPFGLWVLASANRKERTAVFFRVFKPAAGDKPVVLMCTDPTKSSLNPNLYRPTFAGFVDTDISNGKISLRSLIDRSVVESFGAGGKTCILSRVYPSLAIGKDARLYVFNNGRAHVKVSRLTAWEMKKPVMNGA

SEQ ID NO: 13921 - DNA, 1239 bp, Zea mays subsp. mays
  misc_feature (1)..(1239): Ceres Seq. ID no. 12379187
  misc_feature (1)..(1239): Ortholog of  Ceres SEQ ID NO 13594341 as cited in SEQ ID NO 57917
  misc_feature (1)..(1239): Ortholog of  Ceres SEQ ID NO 13656441 as cited in SEQ ID NO 65703
acgagccttacgacatcagcaacaaaccaaacaaaaggacacttcgtgagagaacacgtcggtggctcggtgtcagcagcgagccagcgacggagccccaccagacaccgcagtaccgcaccgcactgcccatggacgcacgcctcccggcgcgcccaccccgcccgcgtgcgcgtgcccctgtccgcctcccgtttgccgcctccaccgcaacgcggcgcgcggggtggtggtgccctcgcgatcctcgtgtcgatcccagcggcaggggtgcctgtgcctttgcttctcctggccgttgcccgcgcctcgcggtcgcgcacctgaaccggagccccgcgtcaaatctagggttgcatccgcgccgccccctcctcccgagactcccagcggctggaaccagaacgagggtgacaggcgacgaaagctgcgagggacgcccctcgtcgaatgcactggcgaccgttccgtcgaggagcagccggagcacgcaggagttgagggaaaagcttggaaaatgtcatccaccgtgccgaagtcatcaaatatcttctggcacgattgtccagttggcaagactgatcgccagaacgtactcaagcagaaaggctgtgttgtctggattacaggccttagtggttcaggtaaaagtaccttggcatgtacattaggccgtgagctccacacaagagggaagcttgcatatgtccttgacggtgataacttaagacatggtctgaacaaggatcttggcttcaaagctgaagaccgtgctgaaaatataaggagagttgtagcaaagttatttgcagatgcgggccttgtatgtattgcaagtttgatatctccacataggagagaccgtgaatcttgccgtgcattgttgtctgatagtagcttcattgaagttttcttgaacatgtccttggaattatgtgaagcaagagatccaaagggcctctataagcttgctcgtgcaggaaaaataaagggttttacaggaatagatgacccttatgaagcaccactgaattgtgagattgagatcaaagaggtagatggtgtatgccctccgcctgctgagatggcagggcaagttgttacttaccttgaggagaaaggcttcctgcacgagtaggctgaatccaagcaacatctggggaagatttcagtaagactagcgcagaataagtcaaaggcgctggcagttacggtatagcagttgcatagattggcctc

SEQ ID NO: 13922 - protein, 222 aa, Zea mays subsp. mays
  peptide (1)..(222): Ceres Seq. ID no. 12379188
EPYDISNKPNKRTLRERTRRWLGVSSEPATEPHQTPQYRTALPMDARLPARPPRPRARAPVRLPFAASTATRRAGWWCPRDPRVDPSGRGACAFASPGRCPRLAVAHLNRSPASNLGLHPRRPLLPRLPAAGTRTRVTGDESCEGRPSSNALATVPSRSSRSTQELREKLGKCHPPCRSHQISSGTIVQLARLIARTYSSRKAVLSGLQALVVQVKVPWHVH

SEQ ID NO: 13923 - protein, 206 aa, Zea mays subsp. mays
  peptide (1)..(206): Ceres Seq. ID no. 12379189
MSSTVPKSSNIFWHDCPVGKTDRQNVLKQKGCVVWITGLSGSGKSTLACTLGRELHTRGKLAYVLDGDNLRHGLNKDLGFKAEDRAENIRRVVAKLFADAGLVCIASLISPHRRDRESCRALLSDSSFIEVFLNMSLELCEARDPKGLYKLARAGKIKGFTGIDDPYEAPLNCEIEIKEVDGVCPPPAEMAGQVVTYLEEKGFLHE

SEQ ID NO: 13924 - protein, 179 aa, Zea mays subsp. mays
  peptide (1)..(179): Ceres Seq. ID no. 12379190
MDARLPARPPRPRARAPVRLPFAASTATRRAGWWCPRDPRVDPSGRGACAFASPGRCPRLAVAHLNRSPASNLGLHPRRPLLPRLPAAGTRTRVTGDESCEGRPSSNALATVPSRSSRSTQELREKLGKCHPPCRSHQISSGTIVQLARLIARTYSSRKAVLSGLQALVVQVKVPWHVH

SEQ ID NO: 13925 - DNA, 2059 bp, Zea mays subsp. mays
  misc_feature (1)..(2059): Ceres Seq. ID no. 12450527
  misc_feature (1)..(2059): Ortholog of  Ceres SEQ ID NO 12612090 as cited in SEQ ID NO 58429
aaaaaagttaaaccctagtatctccccgcgtcgccgcacacatcgcccgttcgcacgcgccgtccccctggaggatcgagccaccctcctcacctggaatggaggacggcctggaggagccgccgcccgcggggagcgcggccgccaacgccagctccacctccggcggcggcagcggcgggagcaaggggtccccgtgcgaggagtgtggggagcagccgtggaagtaccggtgccccgggtgcggccgcctcacctgcagcctcccctgcgtgcaggcccacaagcgccgtaccgcctgcacgggcaagcgcccacgcacggaccccgtcccgctcgcccgattcgacgacaaccagctcatatccgattacaacttgctggaggaggtgaagcaggcccacgattccgcgcacaggctcatcggcggcttcggccgcaactacgggggacggggatcaggcggcgcccagctgcccagatggctgttctacctcagcaaggcggcgcaccgccgtggtgtcaagctctgctttctccccaggggcatggccaggagagagcagaatcgatcgcaacacaattacaggaaggattgcatattctggacacttgagtggaaattcaattcaactgatgttgtcctaactgatcatgggatagatgagcacacaaccttgctctctctattggaaaaacatcttattcctggcccttggaaagatcagcttacacaatatcggaacaccaaattacatgatctgaaactgttcattcaaaagtgtgccaagcaatcagagtcaccgtaccgcctactcaatatagaagagccattgcgcccacagctgaggggtatacttgttgtggagtacccaactatcaatgtatttcttccgtcagacaattgtgactttgaaatggagaaaatggtgaacagacttcctaaagatggaaaaggccctggcagcatgactgacgagccacctgtagagggcagcaagtttcatgaggaggaaatagaggaaggcgaactttcacctgaaactgagattatagatctcaaggaccatggaacttcaaatgcctgcaaaatttctccagcagatgttacaagtgaatcaaagatagttaacaatgtcgattcttctgtgctctcataccccggttgtcaagctcaagcattacatggtcagccgaaaggactgaatcaatatagcaagatatcaccaaatggtacctctgggcctgcagaaactaaatcccgcatggaagtctgtcctctggatatggagaagacaagggaaagcgggttgtcctcagagggacgcgttgtagatctgaaggggtatggaatttcatatcctgtcagcactgcagaggcaggaggtgcagctctatcgaagatagacaccaaggcaacatatcccttagtaccatcttccaccagcattgtagtatctgatggcgcgacgggtcctcagctggaacacagtcagcaaaacaaacggacgccaagctcgactcctgaagcgctgaaaaggaaatcttgcatgaaagtttatccgctggacattgacgagggattgttccccgaggtacccgacttggcctttgagcaagagatgttggatacctacccagagctcttcgagaacatggatgtcgatgacttcttaagctgcgattttgcaatggtgaacagggacgaaccagtagatgcaacgtctgggttaccgagggacgacttggaggaaggggagattccaacattgtgaaggaagaacgtgatgcttcacaggatgttgcactcgagcggaagagtctgtgtcgtgcttttctaggacatgtcatgcgacgtaatggtagaacactcacatgtacctagcttgtatagctgcaacttgaaactatgcagcctcttttattctttatcgttttctttagtctcgctgttgtgttatgtagctctgccagagcagcaagaaattttggggttctaattttgtaagagatgatggctgtttggggatatggatgtcgaggatttctcaagctgtgc

SEQ ID NO: 13926 - protein, 558 aa, Zea mays subsp. mays
  peptide (1)..(558): Ceres Seq. ID no. 12450528
MEDGLEEPPPAGSAAANASSTSGGGSGGSKGSPCEECGEQPWKYRCPGCGRLTCSLPCVQAHKRRTACTGKRPRTDPVPLARFDDNQLISDYNLLEEVKQAHDSAHRLIGGFGRNYGGRGSGGAQLPRWLFYLSKAAHRRGVKLCFLPRGMARREQNRSQHNYRKDCIFWTLEWKFNSTDVVLTDHGIDEHTTLLSLLEKHLIPGPWKDQLTQYRNTKLHDLKLFIQKCAKQSESPYRLLNIEEPLRPQLRGILVVEYPTINVFLPSDNCDFEMEKMVNRLPKDGKGPGSMTDEPPVEGSKFHEEEIEEGELSPETEIIDLKDHGTSNACKISPADVTSESKIVNNVDSSVLSYPGCQAQALHGQPKGLNQYSKISPNGTSGPAETKSRMEVCPLDMEKTRESGLSSEGRVVDLKGYGISYPVSTAEAGGAALSKIDTKATYPLVPSSTSIVVSDGATGPQLEHSQQNKRTPSSTPEALKRKSCMKVYPLDIDEGLFPEVPDLAFEQEMLDTYPELFENMDVDDFLSCDFAMVNRDEPVDATSGLPRDDLEEGEIPTL

SEQ ID NO: 13927 - protein, 408 aa, Zea mays subsp. mays
  peptide (1)..(408): Ceres Seq. ID no. 12450529
MARREQNRSQHNYRKDCIFWTLEWKFNSTDVVLTDHGIDEHTTLLSLLEKHLIPGPWKDQLTQYRNTKLHDLKLFIQKCAKQSESPYRLLNIEEPLRPQLRGILVVEYPTINVFLPSDNCDFEMEKMVNRLPKDGKGPGSMTDEPPVEGSKFHEEEIEEGELSPETEIIDLKDHGTSNACKISPADVTSESKIVNNVDSSVLSYPGCQAQALHGQPKGLNQYSKISPNGTSGPAETKSRMEVCPLDMEKTRESGLSSEGRVVDLKGYGISYPVSTAEAGGAALSKIDTKATYPLVPSSTSIVVSDGATGPQLEHSQQNKRTPSSTPEALKRKSCMKVYPLDIDEGLFPEVPDLAFEQEMLDTYPELFENMDVDDFLSCDFAMVNRDEPVDATSGLPRDDLEEGEIPTL

SEQ ID NO: 13928 - protein, 285 aa, Zea mays subsp. mays
  peptide (1)..(285): Ceres Seq. ID no. 12450530
MEKMVNRLPKDGKGPGSMTDEPPVEGSKFHEEEIEEGELSPETEIIDLKDHGTSNACKISPADVTSESKIVNNVDSSVLSYPGCQAQALHGQPKGLNQYSKISPNGTSGPAETKSRMEVCPLDMEKTRESGLSSEGRVVDLKGYGISYPVSTAEAGGAALSKIDTKATYPLVPSSTSIVVSDGATGPQLEHSQQNKRTPSSTPEALKRKSCMKVYPLDIDEGLFPEVPDLAFEQEMLDTYPELFENMDVDDFLSCDFAMVNRDEPVDATSGLPRDDLEEGEIPTL

SEQ ID NO: 13929 - DNA, 2160 bp, Zea mays subsp. mays
  misc_feature (1)..(2160): Ceres Seq. ID no. 12435948
  misc_feature (1)..(2160): Ortholog of  Ceres SEQ ID NO 15172274 as cited in SEQ ID NO 59703
atcctttccactactctcgtcagcttgctcagctcagctagctagctagctttcccctccctgctgcaatgcaagcttgcccaacccaataagctaagcaagcactcatcacacactctctacttgctagctagccgcccttagcttcggacgcgacatctatcatcggccaagaaacggagcagatcggtcggccgccgacatgggggatcacgctgagatgttgcatgccactccggccatatacaacggcgccggcgctgcccctcgtggtggctggtggagtacggccgtgcccgcgaccacgtgctcgacggagctggccggcttcaccacgtggtcgtccgccctggctgctagctacgacctggcggcggagggggcaaaggccaacaagagcgccaccaccgcctcgtcggagtcgcccgggaacaacagctccgtgaccttccaagaaccggccggcggcgtcggaaccgccgtggtgcagcagcctcttgctggttgcgctgactggacgcatccctatttgagcagcggcgctgctactttgcatgggtttatgcaagatggtcaccagcaggacatgagctcatcgacaactgagcagagccccatggccgcatcaagcctgataatgaacccttcatccaataacctagccctggccctgcaacaaggtcaccatcaccaagagccggaccaccagcagatgctgtccaacttcggcggctccgaggccgagctgctcctgtcgccgacgacctcaccctacgggttccagtcgtctctgctgagaagcttcatggagccgacagcggcggcggcgaagccggctttgccggggtaccggcagcagtatgaccagtaccagcagatgggcatgggccaggcgaggtttgcaccggccggcggagctgccagcagggaggcactccagttcaccaacgacgcgccgtcctggaacccttctgctgctgcggctgggttcggcgtgccgccggcgccggcgccggttgaccaagctagcagcagcgtacgttctgtgaaaccatcgccggcggcgcgtgctactgcaacccttgcattaaagactgcgttggaaggagtaggagagtctgctagctccatcatcaccaagaagaaggcaaacggagagctggcgccggccttcaagaaatcgaggctccagacgccgtcgccgttgccaacgttcaaggttaggaaggagaaggtaggggacagggtcactgcactccaacaactcgtcgccccttttggaaagacggatacagcatcggtgctccatgagaccatcgagtacatcaagttcctccacgaccaggtcggggtccttagtgctccatacttgaagaacaacggccatcaagtgccctacctgaagagatcaagtcctgacaggtccgaggacgacagcagccatgccggcgagagatcactcaagggccgggggctgtgcctggtcccgatatcgagcacgttcgcggtagccagcgaggtgcccgtcgatttcgggtggagtactgcatttgctgccagctttaggtagaagagaaggctgggaacgaagagcgcgccaaagctctgatcagaggcgtcgaacgagtatataactagctagctagccagctaccacagatcgatcgacctgccctgctgacgatattatatgcatatgtcgatgcgtttctgatctagtgagtctagcagtgtatggttatgcgtggttatctctctctcataactatagtacgtactaagcatgcatgcagcagctctggcaacgaaaaaggattgcagattgagcttgcattgcttgcttgctagctcgagatgaacctttggaatgagtcctgaagacttggattcattctccaggttcatctatccatcagggaataagctacttaagaggtggtcatctaataggtttgagaggacacacaacaagtctctactgatcgtcatcatcagcttctaactattacggttgttggttgttggattgcatcattgggtagttgtcgaaggatttgttaaatatgtgtaatgatttctagtttaatttagtatggatcaaagtgtgtagcaggtctctattgattgtactaccaaataaattaaagtgtcatctctttg

SEQ ID NO: 13930 - protein, 455 aa, Zea mays subsp. mays
  peptide (1)..(455): Ceres Seq. ID no. 12435949
MGDHAEMLHATPAIYNGAGAAPRGGWWSTAVPATTCSTELAGFTTWSSALAASYDLAAEGAKANKSATTASSESPGNNSSVTFQEPAGGVGTAVVQQPLAGCADWTHPYLSSGAATLHGFMQDGHQQDMSSSTTEQSPMAASSLIMNPSSNNLALALQQGHHHQEPDHQQMLSNFGGSEAELLLSPTTSPYGFQSSLLRSFMEPTAAAAKPALPGYRQQYDQYQQMGMGQARFAPAGGAASREALQFTNDAPSWNPSAAAAGFGVPPAPAPVDQASSSVRSVKPSPAARATATLALKTALEGVGESASSIITKKKANGELAPAFKKSRLQTPSPLPTFKVRKEKVGDRVTALQQLVAPFGKTDTASVLHETIEYIKFLHDQVGVLSAPYLKNNGHQVPYLKRSSPDRSEDDSSHAGERSLKGRGLCLVPISSTFAVASEVPVDFGWSTAFAASFR

SEQ ID NO: 13931 - protein, 449 aa, Zea mays subsp. mays
  peptide (1)..(449): Ceres Seq. ID no. 12435950
MLHATPAIYNGAGAAPRGGWWSTAVPATTCSTELAGFTTWSSALAASYDLAAEGAKANKSATTASSESPGNNSSVTFQEPAGGVGTAVVQQPLAGCADWTHPYLSSGAATLHGFMQDGHQQDMSSSTTEQSPMAASSLIMNPSSNNLALALQQGHHHQEPDHQQMLSNFGGSEAELLLSPTTSPYGFQSSLLRSFMEPTAAAAKPALPGYRQQYDQYQQMGMGQARFAPAGGAASREALQFTNDAPSWNPSAAAAGFGVPPAPAPVDQASSSVRSVKPSPAARATATLALKTALEGVGESASSIITKKKANGELAPAFKKSRLQTPSPLPTFKVRKEKVGDRVTALQQLVAPFGKTDTASVLHETIEYIKFLHDQVGVLSAPYLKNNGHQVPYLKRSSPDRSEDDSSHAGERSLKGRGLCLVPISSTFAVASEVPVDFGWSTAFAASFR

SEQ ID NO: 13932 - protein, 335 aa, Zea mays subsp. mays
  peptide (1)..(335): Ceres Seq. ID no. 12435951
MQDGHQQDMSSSTTEQSPMAASSLIMNPSSNNLALALQQGHHHQEPDHQQMLSNFGGSEAELLLSPTTSPYGFQSSLLRSFMEPTAAAAKPALPGYRQQYDQYQQMGMGQARFAPAGGAASREALQFTNDAPSWNPSAAAAGFGVPPAPAPVDQASSSVRSVKPSPAARATATLALKTALEGVGESASSIITKKKANGELAPAFKKSRLQTPSPLPTFKVRKEKVGDRVTALQQLVAPFGKTDTASVLHETIEYIKFLHDQVGVLSAPYLKNNGHQVPYLKRSSPDRSEDDSSHAGERSLKGRGLCLVPISSTFAVASEVPVDFGWSTAFAASFR

SEQ ID NO: 13933 - DNA, 1943 bp, Zea mays subsp. mays; identical to SEQ ID NO: 4442
  misc_feature (1)..(1943): Ceres Seq. ID no. 12387936
  misc_feature (1)..(1943): Ortholog of  Ceres SEQ ID NO 15225553 as cited in SEQ ID NO 51170

SEQ ID NO: 13934 - protein, 576 aa, Zea mays subsp. mays; identical to SEQ ID NO: 4443
  peptide (1)..(576): Ceres Seq. ID no. 12387937

SEQ ID NO: 13935 - protein, 509 aa, Zea mays subsp. mays; identical to SEQ ID NO: 4444
  peptide (1)..(509): Ceres Seq. ID no. 12387938

SEQ ID NO: 13936 - protein, 486 aa, Zea mays subsp. mays; identical to SEQ ID NO: 4445
  peptide (1)..(486): Ceres Seq. ID no. 12387939

SEQ ID NO: 13937 - DNA, 413 bp, Zea mays subsp. mays
  misc_feature (1)..(413): Ceres Seq. ID no. 11023056
  misc_feature (1)..(413): Ortholog of  Ceres SEQ ID NO 14304167 as cited in SEQ ID NO 56367
attcgcccacacgagcctacccaaagagcccagagcccgggaggttacttcgctgcctgatgagtccccggcaccggaggtcttgctaccggctggcggcttcttcttccgttcctccccaagtcctcttcccggaggaatcatgatcgtctgcgtcgccgttgtcggccaccagaacaatctgtacctgcagagcttcacggaggcggacgacgccctcaagctccaccacatcgtccactgctctctcgacgtcatcgacgagcgagtgagcaatcctaagaggagtgcacctacattgaatgagacatttttgggtcttctatacccaactgagaactacaaagtgtatggctatttgacaaacacaaaggtcaaatttatcatggtcacgactgatcttgatgtcaaag

SEQ ID NO: 13938 - protein, 137 aa, Zea mays subsp. mays
  peptide (1)..(137): Ceres Seq. ID no. 11023057
FAHTSLPKEPRAREVTSLPDESPAPEVLLPAGGFFFRSSPSPLPGGIMIVCVAVVGHQNNLYLQSFTEADDALKLHHIVHCSLDVIDERVSNPKRSAPTLNETFLGLLYPTENYKVYGYLTNTKVKFIMVTTDLDVK

SEQ ID NO: 13939 - protein, 90 aa, Zea mays subsp. mays
  peptide (1)..(90): Ceres Seq. ID no. 11023058
MIVCVAVVGHQNNLYLQSFTEADDALKLHHIVHCSLDVIDERVSNPKRSAPTLNETFLGLLYPTENYKVYGYLTNTKVKFIMVTTDLDVK

SEQ ID NO: 13940 - DNA, 1017 bp, Zea mays subsp. mays
  misc_feature (1)..(1017): Ceres Seq. ID no. 12382656
  misc_feature (1)..(1017): Ortholog of  Ceres SEQ ID NO 13595414 as cited in SEQ ID NO 56539
  misc_feature (1)..(1017): Ortholog of  Ceres SEQ ID NO 14314396 as cited in SEQ ID NO 60048
atccatccatccatagatccctcacctcactcactcgtgaagaaccagagaacccacccaccctccttcatctcctacatccacatctatccaagaaggtccgttctctcctccccgctcccctcagcaataatctccgcacggcaacctcgctcctccgttttggttttcctctgtgtgccatgggcgacgccgtggagcacctcaagagcgggttccagaagttcaagaccgaggtgtatgacaagaagccggagctgttcgagcctctcaaggccggtcaggcccccaagtacatggttttcgcctgctccgactcccgcgtgtgcccgtcggtgaccctgggcctgcagcccggcgaggccttcaccgtgcgcaacatcgccgccatggtcccggcctacgacaagaccaagtacaccggcatcgggtccgccatcgagtacgccgtgtgcgccctcaaggtggaggtcctcgtggtcatcggccacagctgctgcggtggcatccgggcgctgctctccctccaggacggtgcacccgacaacttccacttcgtcgagaactgggtcaagatcggcttccctgccaaggtcaaggtgaagaaagagcacgcctccgtgcccttcgatgaccagtgctccatcctggagaaggaggccgtgaacgtgtccctggagaacctcaagacctaccccttngtccaggaagggctggccaaggggaccctcaagctggtcggcgcccactacgacttcgtgtccgggaacttcctcgtatgggaaacttagccacacccgccgctcagcgcgcggcttngtcgtcacaactcctatatcttcataaatatatatatccnctacctatatatacctaccgatatgtgaatgcgaggagtactattacctgcatgttttcagcagtatgcagctacgtacatatatatgtaccggatcgcctaacgacgtgaatgtaataagcaataatattttctaccgcttttttttatttctttcc

SEQ ID NO: 13941 - protein, 262 aa, Zea mays subsp. mays
  peptide (1)..(262): Ceres Seq. ID no. 12382657
  misc_feature (233)..(233): Xaa is any aa, unknown or other
PSIHRSLTSLTREEPENPPTLLHLLHPHLSKKVRSLLPAPLSNNLRTATSLLRFGFPLCAMGDAVEHLKSGFQKFKTEVYDKKPELFEPLKAGQAPKYMVFACSDSRVCPSVTLGLQPGEAFTVRNIAAMVPAYDKTKYTGIGSAIEYAVCALKVEVLVVIGHSCCGGIRALLSLQDGAPDNFHFVENWVKIGFPAKVKVKKEHASVPFDDQCSILEKEAVNVSLENLKTYPXVQEGLAKGTLKLVGAHYDFVSGNFLVWET

SEQ ID NO: 13942 - protein, 202 aa, Zea mays subsp. mays
  peptide (1)..(202): Ceres Seq. ID no. 12382658
  misc_feature (173)..(173): Xaa is any aa, unknown or other
MGDAVEHLKSGFQKFKTEVYDKKPELFEPLKAGQAPKYMVFACSDSRVCPSVTLGLQPGEAFTVRNIAAMVPAYDKTKYTGIGSAIEYAVCALKVEVLVVIGHSCCGGIRALLSLQDGAPDNFHFVENWVKIGFPAKVKVKKEHASVPFDDQCSILEKEAVNVSLENLKTYPXVQEGLAKGTLKLVGAHYDFVSGNFLVWET

SEQ ID NO: 13943 - protein, 164 aa, Zea mays subsp. mays
  peptide (1)..(164): Ceres Seq. ID no. 12382659
  misc_feature (135)..(135): Xaa is any aa, unknown or other
MVFACSDSRVCPSVTLGLQPGEAFTVRNIAAMVPAYDKTKYTGIGSAIEYAVCALKVEVLVVIGHSCCGGIRALLSLQDGAPDNFHFVENWVKIGFPAKVKVKKEHASVPFDDQCSILEKEAVNVSLENLKTYPXVQEGLAKGTLKLVGAHYDFVSGNFLVWET

SEQ ID NO: 13944 - DNA, 1476 bp, Zea mays subsp. mays
  misc_feature (1)..(1476): Ceres Seq. ID no. 15180020
  misc_feature (1)..(1476): Ortholog of  Ceres SEQ ID NO 14308225 as cited in SEQ ID NO 59062
  misc_feature (1)..(1476): Ortholog of  Ceres SEQ ID NO 15176615 as cited in SEQ ID NO 0
gcgcaaaaaaacaaaccatcctcgattcgaccggaggggaaggagacgcgccgggagaagggggaagagacgcggcgaccatgtctccgatctgggtgttcgggtacggctcgctgatctggaacccaggcttcgcctacgacgaccgcgtcgtcggctttgtcagggactaccgccgcgtcttctaccaagggagcacggaccacaggggcacgccgcagttccccgggaggaccgtcacgctcgagcaccagcccgaagcgacttgcgtaggccctttctcatgtccaccctcctactctgtcaatgtaactgctaaggacagactgattactaggacacgcaaaccaaatgaattagtaaattcatggttgatgacatgtcactcccactacgtcatgttatcatgtagtacatcttttttacttatcgttttggatagcctggtaatcctcttcgcagtccatgcgattgattttgcgagctaatctgtctattttacatctttcagtggggagttgcttacagaataaaggaggaagataaggagatagctttggaggtatgtttattgcaagccaggcagatgcagatatgttttgttcactagtactgatcgcgcacaaatatcccatgatgatactcagattgtttgatgattgggatattgctgatgttacttgtcattatggagatttagagattggtcgatgtaccaaaactcatatgttctttcctacaaattgattatatctagatactatgacgatttaagtcatgaatgggcttatgaaatttcggtatatatatcaacttatatgtgtttatcgcgatggtatacgtagcagcaaatctctgcacattctgatactccgttgcttacagctttatattgcttctactggcatttatcttcagatttaaatttgcagtatcttgaggtcagggagaagcaatatgatgagaaggtttaccttgacttgtatactgtaagatacgagggctggatctatttccctttggataatgttcgatatgtaactattacggagtattaagttgtaataactttcaggattcatcgcccaaagtaccagctgtcgaaaatgtgatggtatacttcgccaccagtaacaaggagaacaatcaaaactatcttggtcctgcacctctggaagaaatgaccaggcaaatttaccttgctcaaggcccatctggacctaacaaagagtatgtgttcaaactcgaggacgcgttacacaaattaggagttgtagaccaacatgtccaagaactggcaaatgctctgcgtgagtattctgacaccgagttatctaagtgaaagatcacatttaccccttgtttggagggtaaggatttataaataaagttagaattcattcatgcatgtcccaacatggatatattcttgtaagctgcgttttgagtgactacattacgattatattcctgtac

SEQ ID NO: 13945 - protein, 161 aa, Zea mays subsp. mays
  peptide (1)..(161): Ceres Seq. ID no. 15180021
AKKQTILDSTGGEGDAPGEGGRDAATMSPIWVFGYGSLIWNPGFAYDDRVVGFVRDYRRVFYQGSTDHRGTPQFPGRTVTLEHQPEATCVGPFSCPPSYSVNVTAKDRLITRTRKPNELVNSWLMTCHSHYVMLSCSTSFLLIVLDSLVILFAVHAIDFAS

SEQ ID NO: 13946 - protein, 135 aa, Zea mays subsp. mays
  peptide (1)..(135): Ceres Seq. ID no. 15180022
MSPIWVFGYGSLIWNPGFAYDDRVVGFVRDYRRVFYQGSTDHRGTPQFPGRTVTLEHQPEATCVGPFSCPPSYSVNVTAKDRLITRTRKPNELVNSWLMTCHSHYVMLSCSTSFLLIVLDSLVILFAVHAIDFAS

SEQ ID NO: 13947 - protein, 105 aa, Zea mays subsp. mays
  peptide (1)..(105): Ceres Seq. ID no. 15180023
RKKTNHPRFDRRGRRRAGRRGKRRGDHVSDLGVRVRLADLEPRLRLRRPRRRLCQGLPPRLLPREHGPQGHAAVPREDRHARAPARSDLRRPFLMSTLLLCQCNC

SEQ ID NO: 13948 - DNA, 592 bp, Zea mays subsp. mays; identical to SEQ ID NO: 11605
  misc_feature (1)..(592): Ceres Seq. ID no. 12566495
  misc_feature (1)..(592): Ortholog of  Ceres SEQ ID NO 14315684 as cited in SEQ ID NO 53131
  misc_feature (1)..(592): Ortholog of  Ceres SEQ ID NO 13583037 as cited in SEQ ID NO 67953

SEQ ID NO: 13949 - protein, 156 aa, Zea mays subsp. mays; identical to SEQ ID NO: 11606
  peptide (1)..(156): Ceres Seq. ID no. 12566496

SEQ ID NO: 13950 - protein, 131 aa, Zea mays subsp. mays; identical to SEQ ID NO: 11607
  peptide (1)..(131): Ceres Seq. ID no. 12566497

SEQ ID NO: 13951 - protein, 123 aa, Zea mays subsp. mays; identical to SEQ ID NO: 11608
  peptide (1)..(123): Ceres Seq. ID no. 12566498

SEQ ID NO: 13952 - DNA, 1885 bp, Zea mays subsp. mays
  misc_feature (1)..(1885): Ceres Seq. ID no. 12435283
  misc_feature (1)..(1885): Ortholog of  Ceres SEQ ID NO 13596935 as cited in SEQ ID NO 63031
  misc_feature (1)..(1885): Ortholog of  Ceres SEQ ID NO 13597407 as cited in SEQ ID NO 64106
  misc_feature (1)..(1885): Ortholog of  Ceres SEQ ID NO 15180690 as cited in SEQ ID NO 0
actgccagtgctcggtgcccgtgcccgcgcgcgctagcctagctgctcctgcctggttcgccgtagcccgtagcccgtagcacaacaacaacaaaaaaaatctccgcggcgcggggggaggtggtctgttcaccttggggagcagcggcgggccgtcggccgagaaatgcccggtggcgccttcctcctcaacggcagcggcggcggcatggcggactacggcggcggcctcaccgtccccgtcgtcgtgacctgcctcatcggcggcctccggcggcctcatcttcggctacgacattggcatctcaggaggtgtgtcggagatggaggatttcctgaacaagttcttccccgggttgctcaagaggacggcgcgcgccaacaaggacgtgtactgcatttacaacaaccaggcgctgacggccttcacgtcgtcgctgtacgcgttcggcatggtggggacgctgctggcgagccgcgtgacccggcggctggggcggcaggccgtcatgctgatcggcggcggcctgttcttggccggcgccctcgtcaacgccgccgcggccaacatcgccatgctcatcgtcgggaggatgctgctcggcctggggctcggcttctccggccaggccacgccggtgtacctcgccgaggtgtcgcccccgcgctggcgcggcggcttcatctcggccttccccctcttcatcagcgtcgggtacctggtggccaacctcatcaactacggcacctcgcggatcccgggctggggctggcgcctctcgctcggcctcgcctccgtcccggccgccgtcatggtggtcggcgccgcgttcatcccggacacccccagcagcctcgtcctgcgcgggaagcacgacgacgcccgcgccgcgctccagcgggtgcgcggcaagggcgtggacatcggccccgagttcgcggacatcctcgccgcggcggagaacgaccgccggaacgaggagggcgcgttccgccggatcctgcgccgggagtaccggccctacctggtgatggccgtggcgttcccggtgttcctcaacctcacaggggtggccgtcaccgccttcttctcgccgatactgttccggaccgtcggcttcgagagcgacgccgcgctcatgggcgccgtcatcctgggcctcatgaacatcggcggcatcctcgcgtcgggcttcgccatggaccgctacggccggaagctgctcttcatgatcggtggcgcgctcatgttcacgtgccaggtggcgatggcgagcataatcggatcacacctcggcaacgggagcaagatgcccaaggggtacgcggtgacggtgctggtggtggcgctgatcttctcggcgagcttcagctggtcgtggggcgcgctgtactggaccatccccggcgagatataccccgtggaggtgcggtcggcggggcagggcgcggccgtggcgctcaacctggggctcaacttcttgcaggcgcagttcttcctggccatgctgtgctgcttcaagtacggcaccttcctcttctacgcgtcgtggctggttgtcatgaccgccttcgccgtggcgttcgtgccggagaccaagggcgtgccgctcgagtccatggctcacgtcttcgcgcgccactggtactggggcaggttcgtcaaggaccaccagaagttgggcgaagagtccacctagctaagctaataattcggaatcagcgaacgacgtaccctactaccagtagcagattattgataagggagtcaaacacatattgcgtgtgtgtgtcttttaaagtgttcgtttagaatggcttgagaagctcatccgtgtagtaaatttggagacttcgaaatataataaatatgttcgtagttggc

SEQ ID NO: 13953 - protein, 548 aa, Zea mays subsp. mays
  peptide (1)..(548): Ceres Seq. ID no. 12435284
MPGGAFLLNGSGGGMADYGGGLTVPVVVTCLIGGLRRPHLRLRHWHLRRCVGDGGFPEQVLPRVAQEDGARQQGRVLHLQQPGADGLHVVAVRVRHGGDAAGEPRDPAAGAAGRHADRRRPVLGRRPRQRRRGQHRHAHRREDAARPGARLLRPGHAGVPRRGVAPALARRLHLGLPPLHQRRVPGGQPHQLRHLADPGLGLAPLARPRLRPGRRHGGRRRVHPGHPQQPRPAREARRRPRRAPAGARQGRGHRPRVRGHPRRGGERPPERGGRVPPDPAPGVPALPGDGRGVPGVPQPHRGGRHRLLLADTVPDRRLRERRRAHGRRHPGPHEHRRHPRVGLRHGPLRPEAALHDRWRAHVHVPGGDGEHNRITPRQREQDAQGVRGDGAGGGADLLGELQLVVGRAVLDHPRRDIPRGGAVGGAGRGRGAQPGAQLLAGAVLPGHAVLLQVRHLPLLRVVAGCHDRLRRGVRAGDQGRAARVHGSRLRAPLVLGQVRQGPPEVGRRVHLAKLIIRNQRTTYPTTSSRLLIRESNTYCVCVSFKVFV

SEQ ID NO: 13954 - protein, 534 aa, Zea mays subsp. mays
  peptide (1)..(534): Ceres Seq. ID no. 12435285
MADYGGGLTVPVVVTCLIGGLRRPHLRLRHWHLRRCVGDGGFPEQVLPRVAQEDGARQQGRVLHLQQPGADGLHVVAVRVRHGGDAAGEPRDPAAGAAGRHADRRRPVLGRRPRQRRRGQHRHAHRREDAARPGARLLRPGHAGVPRRGVAPALARRLHLGLPPLHQRRVPGGQPHQLRHLADPGLGLAPLARPRLRPGRRHGGRRRVHPGHPQQPRPAREARRRPRRAPAGARQGRGHRPRVRGHPRRGGERPPERGGRVPPDPAPGVPALPGDGRGVPGVPQPHRGGRHRLLLADTVPDRRLRERRRAHGRRHPGPHEHRRHPRVGLRHGPLRPEAALHDRWRAHVHVPGGDGEHNRITPRQREQDAQGVRGDGAGGGADLLGELQLVVGRAVLDHPRRDIPRGGAVGGAGRGRGAQPGAQLLAGAVLPGHAVLLQVRHLPLLRVVAGCHDRLRRGVRAGDQGRAARVHGSRLRAPLVLGQVRQGPPEVGRRVHLAKLIIRNQRTTYPTTSSRLLIRESNTYCVCVSFKVFV

SEQ ID NO: 13955 - protein, 458 aa, Zea mays subsp. mays
  peptide (1)..(458): Ceres Seq. ID no. 12435286
MEDFLNKFFPGLLKRTARANKDVYCIYNNQALTAFTSSLYAFGMVGTLLASRVTRRLGRQAVMLIGGGLFLAGALVNAAAANIAMLIVGRMLLGLGLGFSGQATPVYLAEVSPPRWRGGFISAFPLFISVGYLVANLINYGTSRIPGWGWRLSLGLASVPAAVMVVGAAFIPDTPSSLVLRGKHDDARAALQRVRGKGVDIGPEFADILAAAENDRRNEEGAFRRILRREYRPYLVMAVAFPVFLNLTGVAVTAFFSPILFRTVGFESDAALMGAVILGLMNIGGILASGFAMDRYGRKLLFMIGGALMFTCQVAMASIIGSHLGNGSKMPKGYAVTVLVVALIFSASFSWSWGALYWTIPGEIYPVEVRSAGQGAAVALNLGLNFLQAQFFLAMLCCFKYGTFLFYASWLVVMTAFAVAFVPETKGVPLESMAHVFARHWYWGRFVKDHQKLGEEST

SEQ ID NO: 13956 - DNA, 903 bp, Zea mays subsp. mays
  misc_feature (1)..(903): Ceres Seq. ID no. 12443307
  misc_feature (1)..(903): Ortholog of  Ceres SEQ ID NO 13599506 as cited in SEQ ID NO 334
gcaccgctcaacgtctcaacctgagaagctagctagagctagctagctccgggcgcccgcagcatggccacgaacagccaccgcattattgcgcccggcctcctgctggtcgcggccacgacgctagtcgtcgtcgtcgtcgcgcagctcgcggcgccggctgccgcctgcccctactgcccgacgccgacgccgccccctccgccaccgcccccgcccccggtggtgaacccgccgccgtcgtccacgccgtgccctccgcctccctactcgccgtccacgccgacgggcaagtgccccgtggacacgctgaagctgctggcgtgcgtggacgcgctcaacggcctcgtgcacgccgtcgtcgggaccaacgccagcgacacctgctgcccgctgctgtccggcgtggccgacctcgacgccgcgctctgcctctgcaccaccatcaaggccaaggcgctcagcgtcagcctcgtgctccccgtcgccatctccgtgctcgtcaacgagtgcggcaagcacgtgccctccagcttccagtgcccgtaataactatattagggcgcgtacttactgatcgatcatcatctgcatatgtactgctactctactgtatatatatgatgtatcgtcactaaactatatacatcatatatgtacacgtacggtcaagttatatatacatccatatataacacaaacatatacataagcatgcatgtgcagcttcatatgcataagctctgccggcttgtgatatacatggagctgcgggggttgtgcatttttttgtaaccatgtaccagtattattgtatcataaaccagtgtgagagttgtggccttggtggggtcgatcgcttgtagtagtcattaaggaaacttatgaataaagtgcgtctgt

SEQ ID NO: 13957 - protein, 161 aa, Zea mays subsp. mays
  peptide (1)..(161): Ceres Seq. ID no. 12443308
MATNSHRIIAPGLLLVAATTLVVVVVAQLAAPAAACPYCPTPTPPPPPPPPPPVVNPPPSSTPCPPPPYSPSTPTGKCPVDTLKLLACVDALNGLVHAVVGTNASDTCCPLLSGVADLDAALCLCTTIKAKALSVSLVLPVAISVLVNECGKHVPSSFQCP

SEQ ID NO: 13958 - DNA, 2487 bp, Zea mays subsp. mays
  misc_feature (1)..(2487): Ceres Seq. ID no. 12435918
  misc_feature (1)..(2487): Ortholog of  Ceres SEQ ID NO 13654290 as cited in SEQ ID NO 62197
  misc_feature (1)..(2487): Ortholog of  Ceres SEQ ID NO 14301924 as cited in SEQ ID NO 67731
agaagatggaatcttctagagaatggtgaaaaatggaatttagaggtatataaagagaatccctccggttaatcattgatcacccaagccagtggagccttggcctcgaacagaatagaaccaaccaatcgcgcgggcgcacacagtcggcttccaccaaccacgttgccagcaggcagcggcagcctccacttgctccatgtctccatccaaccctcttccgccgccgggcgagacgcgcgtcggctgctcgttgccctcaccagtcacccctcaggccatgggcgggggccccgctcgtcatgtggccatgcgcgcccttcgcgctcgcttcctctcgcggcagcgggagggaggaccagcggcagcgtcgacctggtggtggtgcgcttcgggttcggcgaagggcgacatggagagcacgctcaaggggatacgcggcagcgatgcgccgtgcgttctggacctggacgacgcggccaccgtggcgggcggcgtcgaggacacctacggcgaggatcgcgccaccgaggagcagctcgtcacgccctggaccgtctccgtcgccagcggttacaatctgcttagggatccccgttacaacaagggacttgcgttcacagagagggaacgtgagacgcactacctccgtggccttctgccaccagctattgtatcccaggagctccaggaaagaaagatcatgaataatattcgacaataccagttgcctttgcagcgctacatggcactcatggatctccaggaagggaacgagaggcttttctacaagttgctcattgacaacgtcgaggagttacttccaatcgtgtacactccaaccgttggcgaggcctgccaaaagtatggatccatatttagtcgccctcagggtctttatatcagtttgaaggagaagggaaagatccttgaggtgttgaagaactggccagagaggagcattcaggttatagttgttactgatggtgaacgtattttggggcttggagatctcggatgccaggggatggggattcctgttggtaaactttccctttacactgccctgggaggagttcgtccatctgcttgcttgccgatcacattggatgttggtacaaataacgaggagctgcttaatgacgaattttacattggcttgagacaaagaagagccactggccaggagtacactgattttctgcaagaatttatgagtgctgtgaaacaaaactatggggagaaagtgcttattcagtttgaggattttgccaaccataatgcttttgatcttcttgcaagatatggcaccactcaccttgtattcaatgatgatattcagggaacagcttctgtggttcttgctgggcttattgcagcacaaacattacttggtggttcattggcagatcacacttaccttttccttggtgctggagaggctgggacaggtatcgctgaacttatagctcttgagatctcacgtcagacgaaagctcctatagaggagtgccgcaagaaaatctggcttgttgattcaaagggcttgattgtcagtacacgaaaggagtcccttcaacacttcaagaaaccatgggctcatgagcataaaccactcagcaacctcttagatgctgttaatgctatcaaaccaacagtgttgattggcacatccgggaaggggcaaactttcacaaaagacgttgttgaagcaatctcctcatttaacgagagaccaatcattcttgccctatcgaacccaacatcacaatctgaatgcacagctgagcaagcttacacatggagcaagggacaagcagtgtttgcgactgggagtccatttgatcctgtggagtacaatggcaagatacatgttcccggacaggcaaacaatgcctatatcttcccagggtttggcctcggcgtggtgatgtctggagctatccgcgttcatgatgacatgcttctggcagcatcggaggctctggcccagcaggtcacagaagaaaattttgagaaggggctgatttatcctcccttctcaaacataaggaagatctctgcccacattgcagccagcgttgcagcaaaggcatatgaacttggtttggcaagtaggcgccctcggccaaaggacctggtgaaatatgcagagagctgcatgtacagccccatctaccgcaactaccgttgaattcggatcaactccagttatgtgcaaatcagcagcagccttgcgtcaactgcaagatttcctaagaatataactcgtttcagtctttcatactgtaataccctaagccctctagcaatagctgtttcacgtccttttctgcccctacatattccgcagcgtttatctcttgcgatgtcatgtaaatcagctccggttaggcttttggatgctagtcagtcatggtgctgctgccgtccttccggttccggacaaggataaatttggaataaagtttgagtcgacgattcctc

SEQ ID NO: 13959 - protein, 664 aa, Zea mays subsp. mays
  peptide (1)..(664): Ceres Seq. ID no. 12435919
MSPSNPLPPPGETRVGCSLPSPVTPQAMGGGPARHVAMRALRARFLSRQREGGPAAASTWWWCASGSAKGDMESTLKGIRGSDAPCVLDLDDAATVAGGVEDTYGEDRATEEQLVTPWTVSVASGYNLLRDPRYNKGLAFTERERETHYLRGLLPPAIVSQELQERKIMNNIRQYQLPLQRYMALMDLQEGNERLFYKLLIDNVEELLPIVYTPTVGEACQKYGSIFSRPQGLYISLKEKGKILEVLKNWPERSIQVIVVTDGERILGLGDLGCQGMGIPVGKLSLYTALGGVRPSACLPITLDVGTNNEELLNDEFYIGLRQRRATGQEYTDFLQEFMSAVKQNYGEKVLIQFEDFANHNAFDLLARYGTTHLVFNDDIQGTASVVLAGLIAAQTLLGGSLADHTYLFLGAGEAGTGIAELIALEISRQTKAPIEECRKKIWLVDSKGLIVSTRKESLQHFKKPWAHEHKPLSNLLDAVNAIKPTVLIGTSGKGQTFTKDVVEAISSFNERPIILALSNPTSQSECTAEQAYTWSKGQAVFATGSPFDPVEYNGKIHVPGQANNAYIFPGFGLGVVMSGAIRVHDDMLLAASEALAQQVTEENFEKGLIYPPFSNIRKISAHIAASVAAKAYELGLASRRPRPKDLVKYAESCMYSPIYRNYR

SEQ ID NO: 13960 - protein, 637 aa, Zea mays subsp. mays
  peptide (1)..(637): Ceres Seq. ID no. 12435920
MGGGPARHVAMRALRARFLSRQREGGPAAASTWWWCASGSAKGDMESTLKGIRGSDAPCVLDLDDAATVAGGVEDTYGEDRATEEQLVTPWTVSVASGYNLLRDPRYNKGLAFTERERETHYLRGLLPPAIVSQELQERKIMNNIRQYQLPLQRYMALMDLQEGNERLFYKLLIDNVEELLPIVYTPTVGEACQKYGSIFSRPQGLYISLKEKGKILEVLKNWPERSIQVIVVTDGERILGLGDLGCQGMGIPVGKLSLYTALGGVRPSACLPITLDVGTNNEELLNDEFYIGLRQRRATGQEYTDFLQEFMSAVKQNYGEKVLIQFEDFANHNAFDLLARYGTTHLVFNDDIQGTASVVLAGLIAAQTLLGGSLADHTYLFLGAGEAGTGIAELIALEISRQTKAPIEECRKKIWLVDSKGLIVSTRKESLQHFKKPWAHEHKPLSNLLDAVNAIKPTVLIGTSGKGQTFTKDVVEAISSFNERPIILALSNPTSQSECTAEQAYTWSKGQAVFATGSPFDPVEYNGKIHVPGQANNAYIFPGFGLGVVMSGAIRVHDDMLLAASEALAQQVTEENFEKGLIYPPFSNIRKISAHIAASVAAKAYELGLASRRPRPKDLVKYAESCMYSPIYRNYR

SEQ ID NO: 13961 - protein, 627 aa, Zea mays subsp. mays
  peptide (1)..(627): Ceres Seq. ID no. 12435921
MRALRARFLSRQREGGPAAASTWWWCASGSAKGDMESTLKGIRGSDAPCVLDLDDAATVAGGVEDTYGEDRATEEQLVTPWTVSVASGYNLLRDPRYNKGLAFTERERETHYLRGLLPPAIVSQELQERKIMNNIRQYQLPLQRYMALMDLQEGNERLFYKLLIDNVEELLPIVYTPTVGEACQKYGSIFSRPQGLYISLKEKGKILEVLKNWPERSIQVIVVTDGERILGLGDLGCQGMGIPVGKLSLYTALGGVRPSACLPITLDVGTNNEELLNDEFYIGLRQRRATGQEYTDFLQEFMSAVKQNYGEKVLIQFEDFANHNAFDLLARYGTTHLVFNDDIQGTASVVLAGLIAAQTLLGGSLADHTYLFLGAGEAGTGIAELIALEISRQTKAPIEECRKKIWLVDSKGLIVSTRKESLQHFKKPWAHEHKPLSNLLDAVNAIKPTVLIGTSGKGQTFTKDVVEAISSFNERPIILALSNPTSQSECTAEQAYTWSKGQAVFATGSPFDPVEYNGKIHVPGQANNAYIFPGFGLGVVMSGAIRVHDDMLLAASEALAQQVTEENFEKGLIYPPFSNIRKISAHIAASVAAKAYELGLASRRPRPKDLVKYAESCMYSPIYRNYR

SEQ ID NO: 13962 - DNA, 474 bp, Zea mays subsp. mays
  misc_feature (1)..(474): Ceres Seq. ID no. 4615028
  misc_feature (1)..(474): Ortholog of  Ceres SEQ ID NO 14306032 as cited in SEQ ID NO 0
atcagaaccgatccttacagagagacacccccagcgcgcgaggtatctacatcgatcatcaccagcgagccagccggccgaacgagcagcaccgatggcggcgtacatgcgcgtgacgcaccgcgacgagaaaggcaagaaggtgacggakaagatgccggtcccggagacgcggcgcccggacacggccaagcacttcgagcgcaagctggaggagcagggcctacaccgcttcgagcggcacccggcgaacgcgccccggggcgtgggcatcggcgccccgccgcccaagtccgggcgcggcggcmagtacacgtgggagggccccggcggcctcgtcgaggaccagctcgacccggcgccgcccgccatcgacccmaacgaccccaactacgaggaggcggaggakggaggggcggcggacgaggacgacgaggcggccagggaggtggtcgtcggggaggtggaggtcgc

SEQ ID NO: 13963 - protein, 158 aa, Zea mays subsp. mays
  peptide (1)..(158): Ceres Seq. ID no. 4615029
  misc_feature (51)..(51): Xaa is any aa, unknown or other
  misc_feature (103)..(103): Xaa is any aa, unknown or other
  misc_feature (127)..(127): Xaa is any aa, unknown or other
  misc_feature (137)..(137): Xaa is any aa, unknown or other
IRTDPYRETPPAREVSTSIITSEPAGRTSSTDGGVHARDAPRRERQEGDGXDAGPGDAAPGHGQALRAQAGGAGPTPLRAAPGERAPGRGHRRPAAQVRARRXVHVGGPRRPRRGPARPGAARHRPXRPQLRGGGGXRGGGRGRRGGQGGGRRGGGGR

SEQ ID NO: 13964 - protein, 157 aa, Zea mays subsp. mays
  peptide (1)..(157): Ceres Seq. ID no. 4615030
  misc_feature (50)..(50): Xaa is any aa, unknown or other
  misc_feature (103)..(103): Xaa is any aa, unknown or other
  misc_feature (126)..(126): Xaa is any aa, unknown or other
  misc_feature (136)..(136): Xaa is any aa, unknown or other
SEPILTERHPQRARYLHRSSPASQPAERAAPMAAYMRVTHRDEKGKKVTXKMPVPETRRPDTAKHFERKLEEQGLHRFERHPANAPRGVGIGAPPPKSGRGGXYTWEGPGGLVEDQLDPAPPAIDXNDPNYEEAEXGGAADEDDEAAREVVVGEVEV

SEQ ID NO: 13965 - protein, 126 aa, Zea mays subsp. mays
  peptide (1)..(126): Ceres Seq. ID no. 4615031
  misc_feature (19)..(19): Xaa is any aa, unknown or other
  misc_feature (72)..(72): Xaa is any aa, unknown or other
  misc_feature (95)..(95): Xaa is any aa, unknown or other
  misc_feature (105)..(105): Xaa is any aa, unknown or other
MAAYMRVTHRDEKGKKVTXKMPVPETRRPDTAKHFERKLEEQGLHRFERHPANAPRGVGIGAPPPKSGRGGXYTWEGPGGLVEDQLDPAPPAIDXNDPNYEEAEXGGAADEDDEAAREVVVGEVEV

SEQ ID NO: 13966 - DNA, 1100 bp, Zea mays subsp. mays
  misc_feature (1)..(1100): Ceres Seq. ID no. 13494902
  misc_feature (1)..(1100): Ortholog of  Ceres SEQ ID NO 14307312 as cited in SEQ ID NO 54745
  misc_feature (1)..(1100): Ortholog of  Ceres SEQ ID NO 14314194 as cited in SEQ ID NO 57366
  misc_feature (1)..(1100): Ortholog of  Ceres SEQ ID NO 13655305 as cited in SEQ ID NO 63328
ccccaaacgcctccctattaatctccccgcgttccccttccctcgcgccgccgctctcccctcccaaagctcgccccgctcccagctagggtttcctcttcccatccacagccgccgagcgccgccgacgaggacagcgccgccacgatgttggagttgcgtctggtgcaggggagcctcctcaagaaggtcttggaggcgatccgcgagctggtcacggacgccaacttcgactgctccgggaccgggttctcgctgcaggccatggactcgagccacgtcgcgctcgtcgcgctgctccttcgcgccgagggcttcgagcactaccgctgcgaccgcaacctctccatgggcatgaacctcaacaacatggccaagatgctccgctgcgccggcaacgaggacatcatcaccatcaaggccgacgacggctccgacaccgtcactttcatgttcgagtcgcccaagcaagataagatcgcggatttcgagatgaaactgatggacattgatagcgagcacctcggaatcccggattccgagtaccaggccatcgtccgcatgccttctgctgagtttatgaggatctgcaaagatcttagcagcatcggagacacagtcgtcatctcggtgactaaggagggcgtgaagttctccacatctggagaaattgggagtgcaaacattgtctgcaggcagaaccaaactattgacaagccagaagaggctaccattatagagatgcaggagccggtttccctgacctttgccctgcggtacatgaactcctttaccaaggcgtcttcactgtctgagcaagtcactatcagcctgtcgtccgagcttccagtggtggtcgagtacaagatcgctgagatgggttacattagattttacctggcccccaagatcgacgatgacgaggagatgaagccctgatggcctgtgacgacataatgctcgtgttgcctgctcttccttccagccgttgtttgcttagctactctttgcaagcgaagggatgtgatgtgtatctcttaggctagactgcttcacgtagttttctgtgactgcttcatgaatccatggattactgattt

SEQ ID NO: 13967 - protein, 263 aa, Zea mays subsp. mays
  peptide (1)..(263): Ceres Seq. ID no. 13494903
MLELRLVQGSLLKKVLEAIRELVTDANFDCSGTGFSLQAMDSSHVALVALLLRAEGFEHYRCDRNLSMGMNLNNMAKMLRCAGNEDIITIKADDGSDTVTFMFESPKQDKIADFEMKLMDIDSEHLGIPDSEYQAIVRMPSAEFMRICKDLSSIGDTVVISVTKEGVKFSTSGEIGSANIVCRQNQTIDKPEEATIIEMQEPVSLTFALRYMNSFTKASSLSEQVTISLSSELPVVVEYKIAEMGYIRFYLAPKIDDDEEMKP

SEQ ID NO: 13968 - protein, 224 aa, Zea mays subsp. mays
  peptide (1)..(224): Ceres Seq. ID no. 13494904
MDSSHVALVALLLRAEGFEHYRCDRNLSMGMNLNNMAKMLRCAGNEDIITIKADDGSDTVTFMFESPKQDKIADFEMKLMDIDSEHLGIPDSEYQAIVRMPSAEFMRICKDLSSIGDTVVISVTKEGVKFSTSGEIGSANIVCRQNQTIDKPEEATIIEMQEPVSLTFALRYMNSFTKASSLSEQVTISLSSELPVVVEYKIAEMGYIRFYLAPKIDDDEEMKP

SEQ ID NO: 13969 - protein, 196 aa, Zea mays subsp. mays
  peptide (1)..(196): Ceres Seq. ID no. 13494905
MGMNLNNMAKMLRCAGNEDIITIKADDGSDTVTFMFESPKQDKIADFEMKLMDIDSEHLGIPDSEYQAIVRMPSAEFMRICKDLSSIGDTVVISVTKEGVKFSTSGEIGSANIVCRQNQTIDKPEEATIIEMQEPVSLTFALRYMNSFTKASSLSEQVTISLSSELPVVVEYKIAEMGYIRFYLAPKIDDDEEMKP

SEQ ID NO: 13970 - DNA, 478 bp, Zea mays subsp. mays
  misc_feature (1)..(478): Ceres Seq. ID no. 4615295
  misc_feature (1)..(478): Ortholog of  Ceres SEQ ID NO 13595072 as cited in SEQ ID NO 55971
aacagccatcacacgcacgcatacacagcacagagtgaggtaagcatccgaaaaaagctgtgatctgatcgacatggccgccgccaccatggctctcacctcccgcgcgctcgtcggcaagccggcgaccagcaccagggacgtcttcggcgaggggcgcatcaccatgcgtaagactgctggcaagcccaagccagcggcgtccggcagcccctggtacggggccgaccgcgtcctgtacctgggcccgctgtccggccaccccccaagctacctgaccggcgagttccccggcgactacggctgggacaccgcggggctgtccgccgacccggagactttcgccaagaaccgcgagctggaggtgatccactgccgctgggccatgctgggcgcgctcgggtgcgtgttcccggagctgctcgcycgcaacggcgtcaagttcggcgaggccgtgtggttcaaggccgggtcccag

SEQ ID NO: 13971 - protein, 135 aa, Zea mays subsp. mays
  peptide (1)..(135): Ceres Seq. ID no. 4615296
  misc_feature (118)..(118): Xaa is any aa, unknown or other
MAAATMALTSRALVGKPATSTRDVFGEGRITMRKTAGKPKPAASGSPWYGADRVLYLGPLSGHPPSYLTGEFPGDYGWDTAGLSADPETFAKNRELEVIHCRWAMLGALGCVFPELLXRNGVKFGEAVWFKAGSQ

SEQ ID NO: 13972 - protein, 130 aa, Zea mays subsp. mays
  peptide (1)..(130): Ceres Seq. ID no. 4615297
  misc_feature (113)..(113): Xaa is any aa, unknown or other
MALTSRALVGKPATSTRDVFGEGRITMRKTAGKPKPAASGSPWYGADRVLYLGPLSGHPPSYLTGEFPGDYGWDTAGLSADPETFAKNRELEVIHCRWAMLGALGCVFPELLXRNGVKFGEAVWFKAGSQ

SEQ ID NO: 13973 - protein, 104 aa, Zea mays subsp. mays
  peptide (1)..(104): Ceres Seq. ID no. 4615298
  misc_feature (87)..(87): Xaa is any aa, unknown or other
MRKTAGKPKPAASGSPWYGADRVLYLGPLSGHPPSYLTGEFPGDYGWDTAGLSADPETFAKNRELEVIHCRWAMLGALGCVFPELLXRNGVKFGEAVWFKAGSQ

SEQ ID NO: 13974 - DNA, 1606 bp, Zea mays subsp. mays
  misc_feature (1)..(1606): Ceres Seq. ID no. 12450558
  misc_feature (1)..(1606): Ortholog of  Ceres SEQ ID NO 13600617 as cited in SEQ ID NO 0
atcgctgcgtccaccttctgtagtccagttgtagccgcttgccgatggcgcggccggcggcgaaggcgcgggtgccgaagcacttggtggcgctcgccgtcgtcgccatcctcggcctcgtactcgtcgctgactacctctgggcttcgtcctccgcgtcgtcctcggccgtctggtcctccaggcttaatctccacaccggacccgccggttcgacgccgcccgtcgcgaagaagattaaggaggacaagaaatctgtaggttcgactggcataaatgcaacttttgcggacttgccagctccagaactgaaatgggaggagatggctgaagcacctgtggcccgtttggatggcgctgctatacagattaagaatctcttatatgtatttgctgggtatggcaccattaaccatgtgcattctcatgttgatatatacaatttctcggataatacatggggtggaagatttgacatgcccgaagacatggcacattcacatttggggatggttactgatggaagattcatctatgtggtaactggacagtatggtccacaatgtaggggaccaacaactcgaaattttgtattggacacagaaacaaaagaatggcgtggcatgccaccattgccagttcctagatatgctccagcaacacaactttggagaggcagacttcatgtgatgggtggcagcaaggaggataggcatgaacctgcgcttgaacactggagtctcgcggtaaaggatgggaaagcattggagaaagagtggaggagcgagaaaccaataccgcgtggaggtcctcatagggcttgtgtagttgcaaatgataaactccttgttattggtggtcaagaaggtgatttcatggccaagcctgggtctcctatatttaaatgtgttagaagaagtgaggttgtgtatagtaatgtttatatgcttgatgatggaacgacttggaaggaacttccacctatgccaaaaccagattcacatatagaatttgcttgggtgaatgtcaacaattctcttgttattgctggaggaacgacagataagcacccaataactaaaaagatggtgttggttggtgaagtatttcggttcaatctgggtacgctggaatggagtgtgattgggcggttacctttccgaatcaagaccacattggtaggatactgggatggctggctgtatttcacttctgggcaacgagacaaaggaccaaaagacccgtctcctaaaaaggttgttgggtgcatgtggagaactaaattgcacttgtgatttcctttaaaagaactaagccgttctttggttttatggtttacaaaactgtttcaatcccctcatgggcgagttctttcttggttatatatcgtaggtgaaatgggtggcgttggggactgtctgccattgccaccggtgtgttgtatgtttattcttttagttaggatcaccaacttttgcaccattttgtacagagagaatcgatctgtccaggtgctgtcgcaatcttgtaagttgtagcgtgtaccttttttttattgagctcttacactcatcttctaaaattaatcacaacttcaacttgagcc

SEQ ID NO: 13975 - protein, 416 aa, Zea mays subsp. mays
  peptide (1)..(416): Ceres Seq. ID no. 12450559
MARPAAKARVPKHLVALAVVAILGLVLVADYLWASSSASSSAVWSSRLNLHTGPAGSTPPVAKKIKEDKKSVGSTGINATFADLPAPELKWEEMAEAPVARLDGAAIQIKNLLYVFAGYGTINHVHSHVDIYNFSDNTWGGRFDMPEDMAHSHLGMVTDGRFIYVVTGQYGPQCRGPTTRNFVLDTETKEWRGMPPLPVPRYAPATQLWRGRLHVMGGSKEDRHEPALEHWSLAVKDGKALEKEWRSEKPIPRGGPHRACVVANDKLLVIGGQEGDFMAKPGSPIFKCVRRSEVVYSNVYMLDDGTTWKELPPMPKPDSHIEFAWVNVNNSLVIAGGTTDKHPITKKMVLVGEVFRFNLGTLEWSVIGRLPFRIKTTLVGYWDGWLYFTSGQRDKGPKDPSPKKVVGCMWRTKLHL

SEQ ID NO: 13976 - protein, 323 aa, Zea mays subsp. mays
  peptide (1)..(323): Ceres Seq. ID no. 12450560
MAEAPVARLDGAAIQIKNLLYVFAGYGTINHVHSHVDIYNFSDNTWGGRFDMPEDMAHSHLGMVTDGRFIYVVTGQYGPQCRGPTTRNFVLDTETKEWRGMPPLPVPRYAPATQLWRGRLHVMGGSKEDRHEPALEHWSLAVKDGKALEKEWRSEKPIPRGGPHRACVVANDKLLVIGGQEGDFMAKPGSPIFKCVRRSEVVYSNVYMLDDGTTWKELPPMPKPDSHIEFAWVNVNNSLVIAGGTTDKHPITKKMVLVGEVFRFNLGTLEWSVIGRLPFRIKTTLVGYWDGWLYFTSGQRDKGPKDPSPKKVVGCMWRTKLHL

SEQ ID NO: 13977 - protein, 272 aa, Zea mays subsp. mays
  peptide (1)..(272): Ceres Seq. ID no. 12450561
MPEDMAHSHLGMVTDGRFIYVVTGQYGPQCRGPTTRNFVLDTETKEWRGMPPLPVPRYAPATQLWRGRLHVMGGSKEDRHEPALEHWSLAVKDGKALEKEWRSEKPIPRGGPHRACVVANDKLLVIGGQEGDFMAKPGSPIFKCVRRSEVVYSNVYMLDDGTTWKELPPMPKPDSHIEFAWVNVNNSLVIAGGTTDKHPITKKMVLVGEVFRFNLGTLEWSVIGRLPFRIKTTLVGYWDGWLYFTSGQRDKGPKDPSPKKVVGCMWRTKLHL

SEQ ID NO: 13978 - DNA, 815 bp, Zea mays subsp. mays
  misc_feature (1)..(815): Ceres Seq. ID no. 12435907
  misc_feature (1)..(815): Ortholog of  Ceres SEQ ID NO 14311407 as cited in SEQ ID NO 54067
  misc_feature (1)..(815): Ortholog of  Ceres SEQ ID NO 15226556 as cited in SEQ ID NO 67908
acttttctttttaacgactgagagcctcgaatcctcctattattatgcaatagagtttttctgactgctccacgcgctgttccccttggaaatttcgaccgctttctcgatcgccacctacacgtctgtggttgcagtgaaaactagaagggaagaacagcctcctaatggataggaacaacgaactggaagaggtggtcccaaatgactcggaccctcttattgggagggataacagggagtcagagtcatcagtagagatgtcaccgccacagccagcaactgtgaacctgctggagattgaggatgaagagaccgacggctcttctgctgcgtgttgccgcatttgccttgaggctgagtctgagataggtgatgagctaatatcaccttgcatgtgcaagggaactcagcagtttgttcaccgttcttgtcttgaccactggcgatntgttaaggaaggatttgcattttcacactgcacaacttgcaaagctcagtttcatcttcgagtggaaacctgggaggataactcatggcgtaaaatgaagttcaggatctttgttgcaagggatgttctactcgtatttcttgctgtacagcttactattgctatcatcggtgcgattgcatactttttagacngggatggaagtttccggaacagttttagcgatggttgggaccgcttcttgtcaaagcacccaatacccttctactattgcataggtgttgtgattttctttgtgctgcttggattcttcgggctgatagtacactgctcatccttcnacgacaaccaggatccatgcagc

SEQ ID NO: 13979 - protein, 216 aa, Zea mays subsp. mays
  peptide (1)..(216): Ceres Seq. ID no. 12435908
  misc_feature (95)..(95): Xaa is any aa, unknown or other
  misc_feature (160)..(160): Xaa is any aa, unknown or other
  misc_feature (209)..(209): Xaa is any aa, unknown or other
MDRNNELEEVVPNDSDPLIGRDNRESESSVEMSPPQPATVNLLEIEDEETDGSSAACCRICLEAESEIGDELISPCMCKGTQQFVHRSCLDHWRXVKEGFAFSHCTTCKAQFHLRVETWEDNSWRKMKFRIFVARDVLLVFLAVQLTIAIIGAIAYFLDXDGSFRNSFSDGWDRFLSKHPIPFYYCIGVVIFFVLLGFFGLIVHCSSFXDNQDPCS

SEQ ID NO: 13980 - protein, 185 aa, Zea mays subsp. mays
  peptide (1)..(185): Ceres Seq. ID no. 12435909
  misc_feature (64)..(64): Xaa is any aa, unknown or other
  misc_feature (129)..(129): Xaa is any aa, unknown or other
  misc_feature (178)..(178): Xaa is any aa, unknown or other
MSPPQPATVNLLEIEDEETDGSSAACCRICLEAESEIGDELISPCMCKGTQQFVHRSCLDHWRXVKEGFAFSHCTTCKAQFHLRVETWEDNSWRKMKFRIFVARDVLLVFLAVQLTIAIIGAIAYFLDXDGSFRNSFSDGWDRFLSKHPIPFYYCIGVVIFFVLLGFFGLIVHCSSFXDNQDPCS

SEQ ID NO: 13981 - protein, 140 aa, Zea mays subsp. mays
  peptide (1)..(140): Ceres Seq. ID no. 12435910
  misc_feature (19)..(19): Xaa is any aa, unknown or other
  misc_feature (84)..(84): Xaa is any aa, unknown or other
  misc_feature (133)..(133): Xaa is any aa, unknown or other
MCKGTQQFVHRSCLDHWRXVKEGFAFSHCTTCKAQFHLRVETWEDNSWRKMKFRIFVARDVLLVFLAVQLTIAIIGAIAYFLDXDGSFRNSFSDGWDRFLSKHPIPFYYCIGVVIFFVLLGFFGLIVHCSSFXDNQDPCS

SEQ ID NO: 13982 - DNA, 1521 bp, Zea mays subsp. mays; identical to SEQ ID NO: 4155
  misc_feature (1)..(1521): Ceres Seq. ID no. 13495297
  misc_feature (1)..(1521): Ortholog of  Ceres SEQ ID NO 12617253 as cited in SEQ ID NO 64065

SEQ ID NO: 13983 - protein, 374 aa, Zea mays subsp. mays; identical to SEQ ID NO: 4156
  peptide (1)..(374): Ceres Seq. ID no. 13495298

SEQ ID NO: 13984 - protein, 373 aa, Zea mays subsp. mays; identical to SEQ ID NO: 4157
  peptide (1)..(373): Ceres Seq. ID no. 13495299

SEQ ID NO: 13985 - protein, 312 aa, Zea mays subsp. mays; identical to SEQ ID NO: 4158
  peptide (1)..(312): Ceres Seq. ID no. 13495300

SEQ ID NO: 13986 - DNA, 1041 bp, Zea mays subsp. mays; identical to SEQ ID NO: 5616
  misc_feature (1)..(1041): Ceres Seq. ID no. 13498730
  misc_feature (1)..(1041): Ortholog of  Ceres SEQ ID NO 14304408 as cited in SEQ ID NO 58051
  misc_feature (1)..(1041): Ortholog of  Ceres SEQ ID NO 14314759 as cited in SEQ ID NO 59915
  misc_feature (1)..(1041): Ortholog of  Ceres SEQ ID NO 13661769 as cited in SEQ ID NO 61435
  misc_feature (1)..(1041): Ortholog of  Ceres SEQ ID NO 13600585 as cited in SEQ ID NO 0

SEQ ID NO: 13987 - protein, 252 aa, Zea mays subsp. mays; identical to SEQ ID NO: 5617
  peptide (1)..(252): Ceres Seq. ID no. 13498731

SEQ ID NO: 13988 - protein, 220 aa, Zea mays subsp. mays; identical to SEQ ID NO: 5618
  peptide (1)..(220): Ceres Seq. ID no. 13498732

SEQ ID NO: 13989 - protein, 172 aa, Zea mays subsp. mays; identical to SEQ ID NO: 5619
  peptide (1)..(172): Ceres Seq. ID no. 13498733

SEQ ID NO: 13990 - DNA, 1144 bp, Zea mays subsp. mays
  misc_feature (1)..(1144): Ceres Seq. ID no. 13598993
  misc_feature (1)..(1144): Ortholog of  Ceres SEQ ID NO 14315410 as cited in SEQ ID NO 57189
gtagcgcaactccgcaagcaaatcctcctatctccaagcctccaatctgtgaacggtgaaccccaatcgaatgacgccgacggcgagcctcctcctcccggctcccccattcgtctctatctccgatgtgcgccgcctccagctccccccgcgcggcggccaccggcctcgcccctgctggaagggcttggagtgcggctccgtacagacgcggatggtctcttctttcgttgggagcagaacacgccgcagaaacgttatatgtgcttccctgttcggagttggagctcccgaagcactggtcattggagtagtcgccttgttggtgttcggccccaagggtctagcagaggtagccaggaatttggggaagactttgcgtgctttccaaccaaccattagagagatacaggatgtatcaagggagttcaggagcactcttgaacgagaaatcggaattgatgaggtttcccagtcgacgaattatacacccacgaccatgaataacaaccaacaacctgctgccgactcaaatatcaagcctgcacctgcaccttacaccagcgatgaacttgtgaaagtaactgaagaacaaattgctgcatcagctgctgcagcttggaacccgcaacaacctgcatcgtcgcaacagcaagaagtgtacactactccgagtgaggacgctcctacatcaggaggaagcgatggtcctgctgctccagctcttgctgcgagtgactcggatccaaagcaagtgaatctggacaaggcggaaacacagagatgactccgcttaacagcttgacactggatgggatgagcagcactgaacacgtcaggacgagcagtcttattttaattttgtaggcgatggacttcagattaaagccagttatttggactgctgcagctataatctatagagacataacactgtaaaaatagtagaatccgttttagattaaagccaaacgagatgagagcgttttctgtgtttactaggcttgttctgtagcagcatgcatgggcaggttcatacaaaaaggctatgtgtatgcgtaacataaccacgagtttatatggattaaatatatttagccacgttgaaaaaccggttcagttaataaaataatgtcagttggtt

SEQ ID NO: 13991 - protein, 238 aa, Zea mays subsp. mays
  peptide (1)..(238): Ceres Seq. ID no. 13598994
MTPTASLLLPAPPFVSISDVRRLQLPPRGGHRPRPCWKGLECGSVQTRMVSSFVGSRTRRRNVICASLFGVGAPEALVIGVVALLVFGPKGLAEVARNLGKTLRAFQPTIREIQDVSREFRSTLEREIGIDEVSQSTNYTPTTMNNNQQPAADSNIKPAPAPYTSDELVKVTEEQIAASAAAAWNPQQPASSQQQEVYTTPSEDAPTSGGSDGPAAPALAASDSDPKQVNLDKAETQR

SEQ ID NO: 13992 - protein, 190 aa, Zea mays subsp. mays
  peptide (1)..(190): Ceres Seq. ID no. 13598995
MVSSFVGSRTRRRNVICASLFGVGAPEALVIGVVALLVFGPKGLAEVARNLGKTLRAFQPTIREIQDVSREFRSTLEREIGIDEVSQSTNYTPTTMNNNQQPAADSNIKPAPAPYTSDELVKVTEEQIAASAAAAWNPQQPASSQQQEVYTTPSEDAPTSGGSDGPAAPALAASDSDPKQVNLDKAETQR

SEQ ID NO: 13993 - protein, 133 aa, Zea mays subsp. mays
  peptide (1)..(133): Ceres Seq. ID no. 13598996
VAQLRKQILLSPSLQSVNGEPQSNDADGEPPPPGSPIRLYLRCAPPPAPPARRPPASPLLEGLGVRLRTDADGLFFRWEQNTPQKRYMCFPVRSWSSRSTGHWSSRLVGVRPQGSSRGSQEFGEDFACFPTNH

SEQ ID NO: 13994 - DNA, 486 bp, Zea mays subsp. mays
  misc_feature (1)..(486): Ceres Seq. ID no. 4615923
  misc_feature (1)..(486): Ortholog of  Ceres SEQ ID NO 15177119 as cited in SEQ ID NO 51196
actcgtcactcacgaacgcacgaattcaccaaccaaactccactgtctccaactctccatcgcgtctgctacgcctctcctgcaggacgaccaatggcttccaggaagttcttcgtgggtggcaactggaaatgcaacggtactggcgaggacgtgaagaagatcgtcaccgtgctcaaccaagccgaggtgccctctgaagacgtcgtcgaggtggtggtgagtccgccgttcgtttttctgcagcaggtcaaggggctgctgcggctggacttcgccgtcgcagcgcagaactgctgggtgcgcaagggcggcgccttcaccggcgagatcagtgctgagatgctggtaaacctgcaggttccctgggtcattttggggcattctgagcgcagagctctgttgggtgaatccagtgattttgttgctgataaagttgcatatgcactcactcaaggtctcaaggtaattgcttgcattggtgag

SEQ ID NO: 13995 - protein, 162 aa, Zea mays subsp. mays
  peptide (1)..(162): Ceres Seq. ID no. 4615924
TRHSRTHEFTNQTPLSPTLHRVCYASPAGRPMASRKFFVGGNWKCNGTGEDVKKIVTVLNQAEVPSEDVVEVVVSPPFVFLQQVKGLLRLDFAVAAQNCWVRKGGAFTGEISAEMLVNLQVPWVILGHSERRALLGESSDFVADKVAYALTQGLKVIACIGE

SEQ ID NO: 13996 - protein, 131 aa, Zea mays subsp. mays
  peptide (1)..(131): Ceres Seq. ID no. 4615925
MASRKFFVGGNWKCNGTGEDVKKIVTVLNQAEVPSEDVVEVVVSPPFVFLQQVKGLLRLDFAVAAQNCWVRKGGAFTGEISAEMLVNLQVPWVILGHSERRALLGESSDFVADKVAYALTQGLKVIACIGE

SEQ ID NO: 13997 - DNA, 713 bp, Zea mays subsp. mays
  misc_feature (1)..(713): Ceres Seq. ID no. 12483013
  misc_feature (1)..(713): Ortholog of  Ceres SEQ ID NO 13598416 as cited in SEQ ID NO 63371
cactattggtgttgtctattattcccctattcaattcttttttcttaggaatacctatggtcagcatgctcctttatgtctggagccgagagaatccaaatgctcagataaatatatacggcctcgtccaattgaggtccttttatcttccatgggctatgctcttattggatgtgatatttgggtcatcattaatgcctggacttctgggtatcatggttggacatctctactacttctttgcagtgttgcaccctcttgccaccgggaagaactacctcaagactcctaaatgggnttacataagattgtttctcgattcagggataggcatgcaagcaaactcacccgtccgtccaccagccaatggcaacagcgggtctggtgtgtttagaggaagaagctataggctcaatcaatagattcacccacctcgtaatgtgatccatggtcggagtggcaatgtagaagcaaagaccagaacgcatagtagggtcaatcaaaattaagggttacccgtcagagattttcttaaaaaacctggacggacggaatggagaaccctttcatttgctcatttagttgctaacaatgttcatcgtccatgtttacacatgaatataattctgtaatgacaatttgtgtacacttatgctggacttattgtcgcctctttttagctaggataagaacaaaagatgatgagtttgccc

SEQ ID NO: 13998 - protein, 139 aa, Zea mays subsp. mays
  peptide (1)..(139): Ceres Seq. ID no. 12483014
  misc_feature (99)..(99): Xaa is any aa, unknown or other
LLVLSIIPLFNSFFLGIPMVSMLLYVWSRENPNAQINIYGLVQLRSFYLPWAMLLLDVIFGSSLMPGLLGIMVGHLYYFFAVLHPLATGKNYLKTPKWXYIRLFLDSGIGMQANSPVRPPANGNSGSGVFRGRSYRLNQ

SEQ ID NO: 13999 - protein, 121 aa, Zea mays subsp. mays
  peptide (1)..(121): Ceres Seq. ID no. 12483015
  misc_feature (81)..(81): Xaa is any aa, unknown or other
MVSMLLYVWSRENPNAQINIYGLVQLRSFYLPWAMLLLDVIFGSSLMPGLLGIMVGHLYYFFAVLHPLATGKNYLKTPKWXYIRLFLDSGIGMQANSPVRPPANGNSGSGVFRGRSYRLNQ

SEQ ID NO: 14000 - protein, 118 aa, Zea mays subsp. mays
  peptide (1)..(118): Ceres Seq. ID no. 12483016
  misc_feature (78)..(78): Xaa is any aa, unknown or other
MLLYVWSRENPNAQINIYGLVQLRSFYLPWAMLLLDVIFGSSLMPGLLGIMVGHLYYFFAVLHPLATGKNYLKTPKWXYIRLFLDSGIGMQANSPVRPPANGNSGSGVFRGRSYRLNQ

SEQ ID NO: 14001 - DNA, 445 bp, Zea mays subsp. mays
  misc_feature (1)..(445): Ceres Seq. ID no. 3008311
  misc_feature (1)..(445): Ortholog of  Ceres SEQ ID NO 14308723 as cited in SEQ ID NO 58758
ctgggccacaagcttcgtgcttataacttacaggatgatgggcgtgatactgtggaagctaatgaggaacttggtcttcctgtggactcacgggaatatgggattggcgcacagatattgcgggatctaggagtccgttcaatgaagctgatgactaataaccctgcgaaatatagtggtctcaagggctatggattgagcattgcgggcagggtgcccttgattacgccaattaccagtgagaaccgtaggtacctggagactaaaagaacaaagatgggacatgtatatgggttggccaatgcgcaggccaacctagcaaatggcagccagagcacagaagagaatcattaggcccccaagcatgtttccattattattccagcaatccagcttggtgacacaaaagagtgatatgattcttcgtttggggagttcctgaaat

SEQ ID NO: 14002 - protein, 117 aa, Zea mays subsp. mays
  peptide (1)..(117): Ceres Seq. ID no. 3008312
LGHKLRAYNLQDDGRDTVEANEELGLPVDSREYGIGAQILRDLGVRSMKLMTNNPAKYSGLKGYGLSIAGRVPLITPITSENRRYLETKRTKMGHVYGLANAQANLANGSQSTEENH

SEQ ID NO: 14003 - protein, 70 aa, Zea mays subsp. mays
  peptide (1)..(70): Ceres Seq. ID no. 3008313
MKLMTNNPAKYSGLKGYGLSIAGRVPLITPITSENRRYLETKRTKMGHVYGLANAQANLANGSQSTEENH

SEQ ID NO: 14004 - protein, 67 aa, Zea mays subsp. mays
  peptide (1)..(67): Ceres Seq. ID no. 3008314
MTNNPAKYSGLKGYGLSIAGRVPLITPITSENRRYLETKRTKMGHVYGLANAQANLANGSQSTEENH

SEQ ID NO: 14005 - DNA, 1441 bp, Zea mays subsp. mays
  misc_feature (1)..(1441): Ceres Seq. ID no. 13587836
  misc_feature (1)..(1441): Ortholog of  Ceres SEQ ID NO 14310524 as cited in SEQ ID NO 58840
  misc_feature (1)..(1441): Ortholog of  Ceres SEQ ID NO 15169541 as cited in SEQ ID NO 67500
accatccactgcgatacttcagacagctcttcttgcgttgcctactaagctctctctctctctctttctctcttgtgttcttgccttctgcctactacgagtgatggccagcctcactgacctcgtcaacctcgacctgagtgactgcacagacaggatcatcgccgagtacatctgggttggaggatccggcatagacctcaggagcaaagcaaggacggtgaaaggccccatcaccgatccgagccagctgccaaaatggaactacgacggctccagcaccgggcaggctcccggagaggacagcgaagtcatcctctaccctcaagtcattttcaaggacccgttcaggaagtgtaacaacatccttgtgatgtgtgactgctacacgccacaaggcgagccaatccccagtaacaagaggtacaaagctgccacggttttcagccaccccgatgttgcagctgaggtgccatggtacggtattgagcaggagtacactctccttcagaaggatgtgagctggccccttggctggcctgttggtggataccctggtccccagggaccatactactgtgctgccggtgccgataaggcctttgggcgcgacgtggttgacgcccactacaaagcctgcctctacgccggcatcaacatcagcggcatcaacggcgaagtcatgcctggacagtgggagttccaagtcgggccgtccgttgggatctctgccggcgacgagatatgggtcgcccgctacattctcgagaggatcactgagatggccggaatcgttctctccctcgacccgaagccgatcaagggtgactggaacggcgccggcgctcacaccaactacagcaccaagtcgatgagggaggccggtggctacgaggtgatcaaggaggcgatcgagaagctggggaagaggcacagggagcacatcgccgcgtacgacgggggcaacgagcgccgcctcacgggccgccacgagaccgccgacatcaacaccttcaaatggggcgtggcgaaccgcggcggctccatccgcgtcggccgcgacaccgagaaggagggcaagggatatttcgaggaccgcaggccggcttccaacatggacccctacgtcgtcaccggcatgatcgccgacaccaccatcctgtggaagggaaactgataaaaccactgttcttctcctgcacgcatgcatccgccccgtgctgtcactttttgttttttcaaatttcgattcccgtcctaaagtttgttaccacttattattacggtctccagtgtactgctcggaaagtccgaataaaaacggctctaatgattttgttttttttaaaaaaaaatttgccttcgccataggtgtacgattggctgcgcttcccgtttattgggtactagtacaattgatatgaatcaattgccattaacg

SEQ ID NO: 14006 - protein, 391 aa, Zea mays subsp. mays
  peptide (1)..(391): Ceres Seq. ID no. 13587837
PSTAILQTALLALPTKLSLSLFLSCVLAFCLLRVMASLTDLVNLDLSDCTDRIIAEYIWVGGSGIDLRSKARTVKGPITDPSQLPKWNYDGSSTGQAPGEDSEVILYPQVIFKDPFRKCNNILVMCDCYTPQGEPIPSNKRYKAATVFSHPDVAAEVPWYGIEQEYTLLQKDVSWPLGWPVGGYPGPQGPYYCAAGADKAFGRDVVDAHYKACLYAGINISGINGEVMPGQWEFQVGPSVGISAGDEIWVARYILERITEMAGIVLSLDPKPIKGDWNGAGAHTNYSTKSMREAGGYEVIKEAIEKLGKRHREHIAAYDGGNERRLTGRHETADINTFKWGVANRGGSIRVGRDTEKEGKGYFEDRRPASNMDPYVVTGMIADTTILWKGN

SEQ ID NO: 14007 - protein, 357 aa, Zea mays subsp. mays
  peptide (1)..(357): Ceres Seq. ID no. 13587838
MASLTDLVNLDLSDCTDRIIAEYIWVGGSGIDLRSKARTVKGPITDPSQLPKWNYDGSSTGQAPGEDSEVILYPQVIFKDPFRKCNNILVMCDCYTPQGEPIPSNKRYKAATVFSHPDVAAEVPWYGIEQEYTLLQKDVSWPLGWPVGGYPGPQGPYYCAAGADKAFGRDVVDAHYKACLYAGINISGINGEVMPGQWEFQVGPSVGISAGDEIWVARYILERITEMAGIVLSLDPKPIKGDWNGAGAHTNYSTKSMREAGGYEVIKEAIEKLGKRHREHIAAYDGGNERRLTGRHETADINTFKWGVANRGGSIRVGRDTEKEGKGYFEDRRPASNMDPYVVTGMIADTTILWKGN

SEQ ID NO: 14008 - protein, 267 aa, Zea mays subsp. mays
  peptide (1)..(267): Ceres Seq. ID no. 13587839
MCDCYTPQGEPIPSNKRYKAATVFSHPDVAAEVPWYGIEQEYTLLQKDVSWPLGWPVGGYPGPQGPYYCAAGADKAFGRDVVDAHYKACLYAGINISGINGEVMPGQWEFQVGPSVGISAGDEIWVARYILERITEMAGIVLSLDPKPIKGDWNGAGAHTNYSTKSMREAGGYEVIKEAIEKLGKRHREHIAAYDGGNERRLTGRHETADINTFKWGVANRGGSIRVGRDTEKEGKGYFEDRRPASNMDPYVVTGMIADTTILWKGN

SEQ ID NO: 14009 - DNA, 2424 bp, Zea mays subsp. mays
  misc_feature (1)..(2424): Ceres Seq. ID no. 12465500
  misc_feature (1)..(2424): Ortholog of  Ceres SEQ ID NO 13598023 as cited in SEQ ID NO 66487
caccaaaatgtaagaacacacgcccggcgctgtggacgcctacgctactagtcagtactcggtagtcacccccaaagctccgcctccgcacctcttcccactcgcccggccgcggctatggcggccaccacgtccacgacgccggccgtctccttctccctcccctcgcccccgcaccgccaaggggccccgcgccgccgcgcgcctttcctcctccgtgccgcctccaccgcggcgcccccctcccccgacctctccatccagctctcgccccgcgcgtccccgcccgcgtcgacaaacggcgccgccaccgcgcttggacgccccgtggccgcctccttcgcccgtgaccgcgccgaagacctgcaggccgaggcccgcgccatggcccgcgccgccggcgccacagtctacagccccgagctcctcgcctcccgttacggttcccgccccttcaaggtggcgctccgggcagcggaggtgctgtccaagctgacgtcgttcggggtgaaggtcctgctggacgagcggagaggggagtcgtcctcggagaggagacgcgccagagcggtggagttgcgcagcatcctcaccagactgggcccaaccttcgtcaaaattgggcagggtctgtccacacgccccgacctctgcccggtcgagtacctcgaggagctcgccgagctgcaggattcacttcccacatttccggatgaggatgcatttgcatgtattgagagagagcttggcttcacgcttgattcaatctactcgtcaatttcaccttcccccattgcagccgctagtttaggtcaagtttataaagcacagttgaaatactctgggaagctggtagctgtgaaggtgcagagacctggtatcgaggatgctattgggcttgatttttatctacttagaggactcgggtttcttataaataagtatgttgacattgtaaccagcgatgttgttgcccttatggatgaatttgcacggagagttttccaagagcttaattatgttcaggaaggccaaaatgcaagaaggtttaaaaaactatatgccgataagcaagatatcttagtgcctgatatattttgggattacacaagtgctaaggttctaacaatggagtggattgagggtgtaaaattaaaccaacaagcagctattgaaagtcaaggattgaaggttctggatttggtcaacattggtatccagtgtagcttgaggcagcttctggagtatggttactttcatgctgaccctcatcctggtaatatattggcaacacctgaggggaagctggcttttcttgattttggcatgatgagtgaaacaccagaggatgcgagggtagccattataggacatgttgtccacttagtcaacagggactatgaagcaatggctcgtgattattatgcactagatttcttgggaccggatgtagatgtttccccgattgtgcctgctctcaagaatttctttgatgatgcactaaatgcaacagtgagtgagctgaacttcaagacaatagttgatggcctaggtgctgttctctatcagtacccgttcaatgtaccggcatactatgcattgatactacgatcgctcactgtactggaaggtttagcactctatgctgaccctgattttaaggtgcttgctgcatcgtatccttactttgcgaaaaggctactcactgatcccaatccatacctcagagacgctttagttgagcttctattcaaggatggaagattcagatggaataggcttgaaaatcttcttgttcaagggcgccaagatagagagtttgcagccaaagatgcattacagcctgttctaaagcttctcctgggtcctgatggggaggaattgcgtgtgttggttgtgaaagaggcagttcgtgtaacagaagccatcactattggaacactgatcgattcatacaatgcatctccagcgtttttgaagccattaatttccagtggcaatccagccggacccttcaagtttagtgaggctgaacaagaacagatgttggagctccgagaccaggttttcagagtatggggtcttttgagatcctcaaataactttgatccgagccttttgcaaccaatcgttcaggtgctacaagaaccagaggcccgcgtcttgggttctcgtgtcgcaggtggtgtaacacagcgccttgcggcacgtctgctgcaacagcttctcaggatcccttctcctggatcttcgtaacagattatatagagatgggctcgtatgaagcatgtaaattgacacgatacttttgacaggaaactgaggtgccatttgattcaagaaatgtaaatatagatatgggctcgtatgaagcatgtaaattgacacgatacttttcacaggaaacaggatttcatttgattc

SEQ ID NO: 14010 - protein, 712 aa, Zea mays subsp. mays
  peptide (1)..(712): Ceres Seq. ID no. 12465501
MAATTSTTPAVSFSLPSPPHRQGAPRRRAPFLLRAASTAAPPSPDLSIQLSPRASPPASTNGAATALGRPVAASFARDRAEDLQAEARAMARAAGATVYSPELLASRYGSRPFKVALRAAEVLSKLTSFGVKVLLDERRGESSSERRRARAVELRSILTRLGPTFVKIGQGLSTRPDLCPVEYLEELAELQDSLPTFPDEDAFACIERELGFTLDSIYSSISPSPIAAASLGQVYKAQLKYSGKLVAVKVQRPGIEDAIGLDFYLLRGLGFLINKYVDIVTSDVVALMDEFARRVFQELNYVQEGQNARRFKKLYADKQDILVPDIFWDYTSAKVLTMEWIEGVKLNQQAAIESQGLKVLDLVNIGIQCSLRQLLEYGYFHADPHPGNILATPEGKLAFLDFGMMSETPEDARVAIIGHVVHLVNRDYEAMARDYYALDFLGPDVDVSPIVPALKNFFDDALNATVSELNFKTIVDGLGAVLYQYPFNVPAYYALILRSLTVLEGLALYADPDFKVLAASYPYFAKRLLTDPNPYLRDALVELLFKDGRFRWNRLENLLVQGRQDREFAAKDALQPVLKLLLGPDGEELRVLVVKEAVRVTEAITIGTLIDSYNASPAFLKPLISSGNPAGPFKFSEAEQEQMLELRDQVFRVWGLLRSSNNFDPSLLQPIVQVLQEPEARVLGSRVAGGVTQRLAARLLQQLLRIPSPGSS

SEQ ID NO: 14011 - protein, 623 aa, Zea mays subsp. mays
  peptide (1)..(623): Ceres Seq. ID no. 12465502
MARAAGATVYSPELLASRYGSRPFKVALRAAEVLSKLTSFGVKVLLDERRGESSSERRRARAVELRSILTRLGPTFVKIGQGLSTRPDLCPVEYLEELAELQDSLPTFPDEDAFACIERELGFTLDSIYSSISPSPIAAASLGQVYKAQLKYSGKLVAVKVQRPGIEDAIGLDFYLLRGLGFLINKYVDIVTSDVVALMDEFARRVFQELNYVQEGQNARRFKKLYADKQDILVPDIFWDYTSAKVLTMEWIEGVKLNQQAAIESQGLKVLDLVNIGIQCSLRQLLEYGYFHADPHPGNILATPEGKLAFLDFGMMSETPEDARVAIIGHVVHLVNRDYEAMARDYYALDFLGPDVDVSPIVPALKNFFDDALNATVSELNFKTIVDGLGAVLYQYPFNVPAYYALILRSLTVLEGLALYADPDFKVLAASYPYFAKRLLTDPNPYLRDALVELLFKDGRFRWNRLENLLVQGRQDREFAAKDALQPVLKLLLGPDGEELRVLVVKEAVRVTEAITIGTLIDSYNASPAFLKPLISSGNPAGPFKFSEAEQEQMLELRDQVFRVWGLLRSSNNFDPSLLQPIVQVLQEPEARVLGSRVAGGVTQRLAARLLQQLLRIPSPGSS

SEQ ID NO: 14012 - protein, 425 aa, Zea mays subsp. mays
  peptide (1)..(425): Ceres Seq. ID no. 12465503
MDEFARRVFQELNYVQEGQNARRFKKLYADKQDILVPDIFWDYTSAKVLTMEWIEGVKLNQQAAIESQGLKVLDLVNIGIQCSLRQLLEYGYFHADPHPGNILATPEGKLAFLDFGMMSETPEDARVAIIGHVVHLVNRDYEAMARDYYALDFLGPDVDVSPIVPALKNFFDDALNATVSELNFKTIVDGLGAVLYQYPFNVPAYYALILRSLTVLEGLALYADPDFKVLAASYPYFAKRLLTDPNPYLRDALVELLFKDGRFRWNRLENLLVQGRQDREFAAKDALQPVLKLLLGPDGEELRVLVVKEAVRVTEAITIGTLIDSYNASPAFLKPLISSGNPAGPFKFSEAEQEQMLELRDQVFRVWGLLRSSNNFDPSLLQPIVQVLQEPEARVLGSRVAGGVTQRLAARLLQQLLRIPSPGSS

SEQ ID NO: 14013 - DNA, 1141 bp, Zea mays subsp. mays
  misc_feature (1)..(1141): Ceres Seq. ID no. 12436346
  misc_feature (1)..(1141): Ortholog of  Ceres SEQ ID NO 12562983 as cited in SEQ ID NO 53309
  misc_feature (1)..(1141): Ortholog of  Ceres SEQ ID NO 14309224 as cited in SEQ ID NO 0
caactgaaggtgccggactagtagctccgtgtcaccaaccagagccagagccatgggggccagcctgagcctggtgccggtgctcgactacttcgcccgccgcgagtgcctgcgcgccggcctccaccagaacgccgtcacgctcccgtaccccgacggcggcggcggggcgacctgcaccgtccagtactgggctccgcagggggagcctgagctcccgccgctcctgctggtccacggcttcgggccccgggccgactggcagtggcgctgccaggtggggccgctctcgcgccacttccacgtcatcatccccgacctcctgggcttcggcggcagcgcgtacccgtccgagacggcgccgccgccgacggaggcgacgcaggccgcggtgctggcggcgctgctgggcgcgctgcccgggatggagcgccggcgcgtggccgtggcgggcaccagctacggcgggttcgtggcgtactggctggcccgcgaggcggggcccgccagggtcggccccgtggtgatcgccagctccgacctgctcaagacggctgccgacgacagggcgttcctgaagcgcgccggcgaagggtggggcggcgtggacgagatcctcctccccgccgagcccgccgcgctgcggaagctcctggagctggcctcctgccgcccgccgccgcggctggtgacgccggacttcctgctccgtgacttcatccagaaactcttcacgcagaacagggagcggcttgtccatctgctgaaggggattacggtcgggacagagaagttccaagtgacgccaatatctcaggaagtgctgattgtatggggagaccacgaccagctgttcccggtggagaaggcgtttgcggttcagagggctctgaacgggaccgctaggctggaggtgataccgaagacaggccacgctcctcagctggaggatccggctcgcttcaacaaggtcatgctggacttcttgctggcttctcacaagcctgacccctcggttagtggtagcgcgcaataatttaccaaggtgcattggcgattggtcagtggtagccgactcgattgtttgtaataagatcgctggacaggttcagttcattccattaaatcaatggtaaatttc

SEQ ID NO: 14014 - protein, 327 aa, Zea mays subsp. mays
  peptide (1)..(327): Ceres Seq. ID no. 12436347
MGASLSLVPVLDYFARRECLRAGLHQNAVTLPYPDGGGGATCTVQYWAPQGEPELPPLLLVHGFGPRADWQWRCQVGPLSRHFHVIIPDLLGFGGSAYPSETAPPPTEATQAAVLAALLGALPGMERRRVAVAGTSYGGFVAYWLAREAGPARVGPVVIASSDLLKTAADDRAFLKRAGEGWGGVDEILLPAEPAALRKLLELASCRPPPRLVTPDFLLRDFIQKLFTQNRERLVHLLKGITVGTEKFQVTPISQEVLIVWGDHDQLFPVEKAFAVQRALNGTARLEVIPKTGHAPQLEDPARFNKVMLDFLLASHKPDPSVSGSAQ

SEQ ID NO: 14015 - protein, 203 aa, Zea mays subsp. mays
  peptide (1)..(203): Ceres Seq. ID no. 12436348
MERRRVAVAGTSYGGFVAYWLAREAGPARVGPVVIASSDLLKTAADDRAFLKRAGEGWGGVDEILLPAEPAALRKLLELASCRPPPRLVTPDFLLRDFIQKLFTQNRERLVHLLKGITVGTEKFQVTPISQEVLIVWGDHDQLFPVEKAFAVQRALNGTARLEVIPKTGHAPQLEDPARFNKVMLDFLLASHKPDPSVSGSAQ

SEQ ID NO: 14016 - DNA, 1802 bp, Zea mays subsp. mays
  misc_feature (1)..(1802): Ceres Seq. ID no. 12484069
  misc_feature (1)..(1802): Ortholog of  Ceres SEQ ID NO 13655992 as cited in SEQ ID NO 65504
  misc_feature (1)..(1802): Ortholog of  Ceres SEQ ID NO 13587581 as cited in SEQ ID NO 0
aacaacactcgcctgccctgccctctcatctcgcttcgcttccattccatcgcgccagtcgccagactcaccagggagacagggagagtagggggaaatatcaattagaaacaacgaggaactagcaaagaaagaaggataactcccataagaaaaatcgccaaatacgccattcatcttctccgcccgggtttcagaacgtgcggcagtttagccaggatggtggcgatcgagaaccagaaccagagccaggccgcggtggcggtggcggcggaggcggtgccggcgccggcgtcgcggatccccagggaggcgcggcgcctgctgcacgagctggcggcggcgtgggcggacgtggccgactgccgcgcgctggaggtcgtgccgctcaagggggccatgaccaacgaggtctaccaggcgcgctggctcactgcaggccctgccggccagaaggaggagcccagggcggagagggaggtgaggaaggtgctcgtgcggatttacggcgacggcgtcgacctcttcttcgaccgcgaggacgaggtgcgcaccttcgagtgcatgtcacgccatggccagggtccccgcctcctcggccgcttcccgaacggccgcgtcgaggagttcatccacgcaaggacattgtcagctgccgaccttcgcgatcctgaaatttcagctctggtggcttccaagctgagggagttccacaaccttgacatgcctggtcccaaatctgtgctcatttgggacagacttaggaactggctcagaactgccaagagcttgtgtccacctgaagaagccaaggaatttcggttggacagtctggagaaccagattactgcattggagaacgagtgttcaggtgattaccagtggattggtttctgtcacaatgatcttcagtatggcaatatcatgattgatgaagagaccaacgtgctgaccatcattgattatgagtatgcaagcttcaacccagttgcatatgacattgctaaccatttctgtgagatggcagcagactatcattcatcaaagcctcatatactggactacagcagatatccagatgttgatgagcagaagcgttttgttaagacctacctgaacatttctggtgaggaacctgatgcggaagttgtagagaacctgctccaaagcattgagaagcacacgctctccagccatctagtatggggcctctggggaataatttcggaccatgttaacgacattgacttcgactacaaggagtatgcgaggcagagattcgagcagtactggcacaagtctgcgatcttaacatcttgaacatgtgtataaacacccgtacgtggtctcaggaactccctgagggcctgtggctgcacacacgaaattgtgcagtgccactgacacatagataagctgtgaaagaagaaatactgacgacgacgacgaataatcccgttttgggctcgggaggttatttctccgcaactcgatgagcttcaggcttcagcttcaggaaggaaggaaggagctatggggatttggctgcccgcttatgctgtaccaatgcaattaaaagataaagatccggtccggtgttgcgtgtgctatgtttagttttggctagcaccgccgagagccgtggtcctgttgtggtgtttctagtttctgtatgcttgatgttgttagtgtgctggataatttggttttgtgcttggggagtccttagctttgggacaacgcatacattgtatactgggtagatgtataaacataaaacagctatgggaatttggttctct

SEQ ID NO: 14017 - protein, 366 aa, Zea mays subsp. mays
  peptide (1)..(366): Ceres Seq. ID no. 12484070
MVAIENQNQSQAAVAVAAEAVPAPASRIPREARRLLHELAAAWADVADCRALEVVPLKGAMTNEVYQARWLTAGPAGQKEEPRAEREVRKVLVRIYGDGVDLFFDREDEVRTFECMSRHGQGPRLLGRFPNGRVEEFIHARTLSAADLRDPEISALVASKLREFHNLDMPGPKSVLIWDRLRNWLRTAKSLCPPEEAKEFRLDSLENQITALENECSGDYQWIGFCHNDLQYGNIMIDEETNVLTIIDYEYASFNPVAYDIANHFCEMAADYHSSKPHILDYSRYPDVDEQKRFVKTYLNISGEEPDAEVVENLLQSIEKHTLSSHLVWGLWGIISDHVNDIDFDYKEYARQRFEQYWHKSAILTS

SEQ ID NO: 14018 - protein, 306 aa, Zea mays subsp. mays
  peptide (1)..(306): Ceres Seq. ID no. 12484071
MTNEVYQARWLTAGPAGQKEEPRAEREVRKVLVRIYGDGVDLFFDREDEVRTFECMSRHGQGPRLLGRFPNGRVEEFIHARTLSAADLRDPEISALVASKLREFHNLDMPGPKSVLIWDRLRNWLRTAKSLCPPEEAKEFRLDSLENQITALENECSGDYQWIGFCHNDLQYGNIMIDEETNVLTIIDYEYASFNPVAYDIANHFCEMAADYHSSKPHILDYSRYPDVDEQKRFVKTYLNISGEEPDAEVVENLLQSIEKHTLSSHLVWGLWGIISDHVNDIDFDYKEYARQRFEQYWHKSAILTS

SEQ ID NO: 14019 - protein, 251 aa, Zea mays subsp. mays
  peptide (1)..(251): Ceres Seq. ID no. 12484072
MSRHGQGPRLLGRFPNGRVEEFIHARTLSAADLRDPEISALVASKLREFHNLDMPGPKSVLIWDRLRNWLRTAKSLCPPEEAKEFRLDSLENQITALENECSGDYQWIGFCHNDLQYGNIMIDEETNVLTIIDYEYASFNPVAYDIANHFCEMAADYHSSKPHILDYSRYPDVDEQKRFVKTYLNISGEEPDAEVVENLLQSIEKHTLSSHLVWGLWGIISDHVNDIDFDYKEYARQRFEQYWHKSAILTS

SEQ ID NO: 14020 - DNA, 494 bp, Zea mays subsp. mays
  misc_feature (1)..(494): Ceres Seq. ID no. 3008609
  misc_feature (1)..(494): Ortholog of  Ceres SEQ ID NO 15225236 as cited in SEQ ID NO 66266
aactacccccacgctggctcgccaccgccgccgcagcaggcgtgggaatctgggcagcgccccgcggagaagaggaggcagcgcgctctccgtccgccatggcgggctcttccgaccccgacaagctcatgagcaaagccgacaaactaacaaaattgagttttacaagatggaatgctgattggaaaagcgctacctccttgtatgagcaagctgcaattgcgtataggttcagaaaggataatgagaaagcaaaagatgcttttgagaaggcctcaaaaggacaggaaatgatctcctcaccatgggacgctgctaagcatatggaatctgctgctgctttagcaaaggagcttgggcgctggaatgaagtatctgatttctatcacagagcttcagaattataccgtgaatgtggaaggccacaacctgcatctgatgctctagcaaagggtgccagtgcattggcggcgacnaggcagccacctacttgt

SEQ ID NO: 14021 - protein, 164 aa, Zea mays subsp. mays
  peptide (1)..(164): Ceres Seq. ID no. 3008610
  misc_feature (158)..(158): Xaa is any aa, unknown or other
LPPRWLATAAAAGVGIWAAPRGEEEAARSPSAMAGSSDPDKLMSKADKLTKLSFTRWNADWKSATSLYEQAAIAYRFRKDNEKAKDAFEKASKGQEMISSPWDAAKHMESAAALAKELGRWNEVSDFYHRASELYRECGRPQPASDALAKGASALAAXRQPPTC

SEQ ID NO: 14022 - protein, 132 aa, Zea mays subsp. mays
  peptide (1)..(132): Ceres Seq. ID no. 3008611
  misc_feature (126)..(126): Xaa is any aa, unknown or other
MAGSSDPDKLMSKADKLTKLSFTRWNADWKSATSLYEQAAIAYRFRKDNEKAKDAFEKASKGQEMISSPWDAAKHMESAAALAKELGRWNEVSDFYHRASELYRECGRPQPASDALAKGASALAAXRQPPTC

SEQ ID NO: 14023 - protein, 122 aa, Zea mays subsp. mays
  peptide (1)..(122): Ceres Seq. ID no. 3008612
  misc_feature (116)..(116): Xaa is any aa, unknown or other
MSKADKLTKLSFTRWNADWKSATSLYEQAAIAYRFRKDNEKAKDAFEKASKGQEMISSPWDAAKHMESAAALAKELGRWNEVSDFYHRASELYRECGRPQPASDALAKGASALAAXRQPPTC

SEQ ID NO: 14024 - DNA, 424 bp, Zea mays subsp. mays
  misc_feature (1)..(424): Ceres Seq. ID no. 4616227
  misc_feature (1)..(424): Ortholog of  Ceres SEQ ID NO 13582624 as cited in SEQ ID NO 56287
aaaatcacctcacaacaagctgccccgcagcaacgaacacgaaccttggcagaacgaagctgaagtagttcgttgtgaacccagtatggcaaacgcgccgaggatcctggccctcggcctgctgctagcgctcctgtgcgctgccgccggcccggccgccgcgcagaactgcggctgccagcctaacttctgctgcagcaagttcggctactgcggcacgaccgacgactactgcggcgacgggtgccagtcgggcccgtgccgctcgggcggcggcggcggcggcggcggaggcggaggcagtggcggtgcgaacgtggctaacgtggtcagcgacgcgttcttcaacggcatcaagaaccaggccgggagcgggtgcgagggcaagaacttctacacccggagcgcgttcctgagcgccgtc

SEQ ID NO: 14025 - protein, 141 aa, Zea mays subsp. mays
  peptide (1)..(141): Ceres Seq. ID no. 4616228
KSPHNKLPRSNEHEPWQNEAEVVRCEPSMANAPRILALGLLLALLCAAAGPAAAQNCGCQPNFCCSKFGYCGTTDDYCGDGCQSGPCRSGGGGGGGGGGGSGGANVANVVSDAFFNGIKNQAGSGCEGKNFYTRSAFLSAV

SEQ ID NO: 14026 - protein, 113 aa, Zea mays subsp. mays
  peptide (1)..(113): Ceres Seq. ID no. 4616229
MANAPRILALGLLLALLCAAAGPAAAQNCGCQPNFCCSKFGYCGTTDDYCGDGCQSGPCRSGGGGGGGGGGGSGGANVANVVSDAFFNGIKNQAGSGCEGKNFYTRSAFLSAV

SEQ ID NO: 14027 - DNA, 2566 bp, Zea mays subsp. mays
  misc_feature (1)..(2566): Ceres Seq. ID no. 12450470
  misc_feature (1)..(2566): Ortholog of  Ceres SEQ ID NO 15176095 as cited in SEQ ID NO 59699
acctctgtccatccatcacagcttcgagactcgtcctccatgggttctggcggcgtcagatggaaggctctgccgctgtgcctagctctcgtggctctgcaagcatgcctccctgctcgcggggcagctcccaagacttacatcgttcagatggccgcgtctgagatgccgagctcgttcgatttccaccacgaatggtacgcatccactgtgaaatccgtgagctctgtgcagctggaaggagacgcggacgaccattacgccgcgaggatcgtctacaactacgagacggcgttccacggcttcgcggcgaagctggacgaggacgaggccgagcggatggccgaggcggacggcgtggtggccgtgctcccggagacggtcctgcagctgcacaccaccaggagcccggacttcctgggcatcagcccggagatcagcgacagcatatggtccgccggcctggccgaccacgacgtcgtcgtcggcgtgctcgacaccggcatctggcccgagagccccagctttagcgacaagggcctcggccctgtcccggccaggtggaagggcctgtgccagaccggccgcggcttcaccgtagccagctgcaaccgcaagatcatcggcgcgcgcatcttctacaacggctacgaggcctcgtcgggccccatcaacgagacggccgagctcaaatctccgcgggaccaggacggccacggcacgcacaccgcggccaccgccgcgggcgcgcccgtgccggacgccagcctcttcggctacgccagcggcgtcgcccgtggcatggcgccccgcgcccgcgtcgcggcgtacaaggtgtgctggacggggggctgcttcagctccgacatcctggcggccgtcgaccgcgccgtggcggacggcgtcgacgtgctctccatctcgctcggcggcggctcgtccccctacttccgcgacagcctggccatcgcgtcgttcggtgccatgcagatgggcgtgttcgtcgcctgctcgggcggcaacggcggcccggaccccataagcctcaccaacctgtcgccgtggataaccacggtgggcgcgagcaccatggaccgggacttcccggccacggtgacgctcggcaatggcgcaaacctcaccggggtttcgctctacaaaggccggcgaggtctttcgtccaaggagcagtacccgttagtctacatgggcggcaactcgagcatccctgaccccaggtccctgtgcctggaggggacactccagccccacgaggtcgctggaaagattgtgatctgcgaccgcggcattagtcctcgggtgcagaagggtcaggttgtcaagaacgccggtgccgcgggcatgatactcgccaacacaccggcaaacggcgaggagcttgtcgccgacagccacctcctgccagcagtggccgttgggcagtctgaaggcattgccgccaagaagtacagcaaaaccgccccgaaaccaacggccacgctcagcttcgacgggacgaagctcgggatccgcccatcgccagtcgtagccgcgttctcgtcccggggaccaaacttcctgaccctggagatcctcaagccggatgtcatcgcgcccggcgtgaacatcttggcggcatggagcggcgacgccagcccgtcgagcttgtccagcgaccgccggcgggtcggcttcaacatcctgtcggggacgtccatgtcgtgcccgcacgtcgccggcgtggctgcgctgatcaaggccagccacccggactggagccccgcgaagatcaagtccgcgctgatgaccaccgcgtacgtccacgacaacacgtaccggtcgctgaaggacgcggccaccggcaaggcgtccacgccgttcgatcacggagctgggcacatacacccgctgcgtgccctcaaccctggcctggtctacgacatcggccaggacgactacctggagttcctctgcgtggagaacctgacgccgttgcagctcaggtccttcaccaagaactcgagcaagacatgcaagcacaccttcagctcgccgggtgacttgaattattcggccatctccgcggtcttcgcggagcagccatctgctgcgcttacggtgcgtcgcaccgtgacgaacgtcggcccgccgtcttcgacttaccatgtcaaggttacagagttcaaaggcgcagacattgtcgtcgaaccaagcaccctgcacttcacaagttcgaaccagaagctaacctacaaggtgacgatgacaaccaaggctgcccagaagacaccggagttcggagcgctgtcttggagcgacggcgtccacatcgtccggagcccccttgtcctcacatggctgccaccgatgtgagcttcgtttatttaccgtgcgtttagagcaagcaatggagcaggaacctctgggcctgggtaatcaagccagagatccgttgtgtcgcagcggcagcggcagcggcagaacaggttcactaaccaacggaaaaatactgtcaaagctccacatgagaaccgcctttattcttcaatgtattcatgcttattcc

SEQ ID NO: 14028 - protein, 790 aa, Zea mays subsp. mays
  peptide (1)..(790): Ceres Seq. ID no. 12450471
TSVHPSQLRDSSSMGSGGVRWKALPLCLALVALQACLPARGAAPKTYIVQMAASEMPSSFDFHHEWYASTVKSVSSVQLEGDADDHYAARIVYNYETAFHGFAAKLDEDEAERMAEADGVVAVLPETVLQLHTTRSPDFLGISPEISDSIWSAGLADHDVVVGVLDTGIWPESPSFSDKGLGPVPARWKGLCQTGRGFTVASCNRKIIGARIFYNGYEASSGPINETAELKSPRDQDGHGTHTAATAAGAPVPDASLFGYASGVARGMAPRARVAAYKVCWTGGCFSSDILAAVDRAVADGVDVLSISLGGGSSPYFRDSLAIASFGAMQMGVFVACSGGNGGPDPISLTNLSPWITTVGASTMDRDFPATVTLGNGANLTGVSLYKGRRGLSSKEQYPLVYMGGNSSIPDPRSLCLEGTLQPHEVAGKIVICDRGISPRVQKGQVVKNAGAAGMILANTPANGEELVADSHLLPAVAVGQSEGIAAKKYSKTAPKPTATLSFDGTKLGIRPSPVVAAFSSRGPNFLTLEILKPDVIAPGVNILAAWSGDASPSSLSSDRRRVGFNILSGTSMSCPHVAGVAALIKASHPDWSPAKIKSALMTTAYVHDNTYRSLKDAATGKASTPFDHGAGHIHPLRALNPGLVYDIGQDDYLEFLCVENLTPLQLRSFTKNSSKTCKHTFSSPGDLNYSAISAVFAEQPSAALTVRRTVTNVGPPSSTYHVKVTEFKGADIVVEPSTLHFTSSNQKLTYKVTMTTKAAQKTPEFGALSWSDGVHIVRSPLVLTWLPPM

SEQ ID NO: 14029 - protein, 777 aa, Zea mays subsp. mays
  peptide (1)..(777): Ceres Seq. ID no. 12450472
MGSGGVRWKALPLCLALVALQACLPARGAAPKTYIVQMAASEMPSSFDFHHEWYASTVKSVSSVQLEGDADDHYAARIVYNYETAFHGFAAKLDEDEAERMAEADGVVAVLPETVLQLHTTRSPDFLGISPEISDSIWSAGLADHDVVVGVLDTGIWPESPSFSDKGLGPVPARWKGLCQTGRGFTVASCNRKIIGARIFYNGYEASSGPINETAELKSPRDQDGHGTHTAATAAGAPVPDASLFGYASGVARGMAPRARVAAYKVCWTGGCFSSDILAAVDRAVADGVDVLSISLGGGSSPYFRDSLAIASFGAMQMGVFVACSGGNGGPDPISLTNLSPWITTVGASTMDRDFPATVTLGNGANLTGVSLYKGRRGLSSKEQYPLVYMGGNSSIPDPRSLCLEGTLQPHEVAGKIVICDRGISPRVQKGQVVKNAGAAGMILANTPANGEELVADSHLLPAVAVGQSEGIAAKKYSKTAPKPTATLSFDGTKLGIRPSPVVAAFSSRGPNFLTLEILKPDVIAPGVNILAAWSGDASPSSLSSDRRRVGFNILSGTSMSCPHVAGVAALIKASHPDWSPAKIKSALMTTAYVHDNTYRSLKDAATGKASTPFDHGAGHIHPLRALNPGLVYDIGQDDYLEFLCVENLTPLQLRSFTKNSSKTCKHTFSSPGDLNYSAISAVFAEQPSAALTVRRTVTNVGPPSSTYHVKVTEFKGADIVVEPSTLHFTSSNQKLTYKVTMTTKAAQKTPEFGALSWSDGVHIVRSPLVLTWLPPM

SEQ ID NO: 14030 - protein, 740 aa, Zea mays subsp. mays
  peptide (1)..(740): Ceres Seq. ID no. 12450473
MAASEMPSSFDFHHEWYASTVKSVSSVQLEGDADDHYAARIVYNYETAFHGFAAKLDEDEAERMAEADGVVAVLPETVLQLHTTRSPDFLGISPEISDSIWSAGLADHDVVVGVLDTGIWPESPSFSDKGLGPVPARWKGLCQTGRGFTVASCNRKIIGARIFYNGYEASSGPINETAELKSPRDQDGHGTHTAATAAGAPVPDASLFGYASGVARGMAPRARVAAYKVCWTGGCFSSDILAAVDRAVADGVDVLSISLGGGSSPYFRDSLAIASFGAMQMGVFVACSGGNGGPDPISLTNLSPWITTVGASTMDRDFPATVTLGNGANLTGVSLYKGRRGLSSKEQYPLVYMGGNSSIPDPRSLCLEGTLQPHEVAGKIVICDRGISPRVQKGQVVKNAGAAGMILANTPANGEELVADSHLLPAVAVGQSEGIAAKKYSKTAPKPTATLSFDGTKLGIRPSPVVAAFSSRGPNFLTLEILKPDVIAPGVNILAAWSGDASPSSLSSDRRRVGFNILSGTSMSCPHVAGVAALIKASHPDWSPAKIKSALMTTAYVHDNTYRSLKDAATGKASTPFDHGAGHIHPLRALNPGLVYDIGQDDYLEFLCVENLTPLQLRSFTKNSSKTCKHTFSSPGDLNYSAISAVFAEQPSAALTVRRTVTNVGPPSSTYHVKVTEFKGADIVVEPSTLHFTSSNQKLTYKVTMTTKAAQKTPEFGALSWSDGVHIVRSPLVLTWLPPM

SEQ ID NO: 14031 - DNA, 1433 bp, Zea mays subsp. mays
  misc_feature (1)..(1433): Ceres Seq. ID no. 13494861
  misc_feature (1)..(1433): Ortholog of  Ceres SEQ ID NO 14302734 as cited in SEQ ID NO 66748
agggctcatctctctcttcctcttctcccgccgcccagcttctctcttctctcggcggcgccaccacggcgatcaagcgcgatacgggcgtaaccgaagaatcgacaatgggcggcgagaaggaaacctttgatacgtccgacctcaacgcctccctccccgcggccgctgcagccctcagcgccgaggaccgcgccggcctcgtcaatgcccttaaggataagctgcagagcctggcgggccagcacgccgatgtgttagagacgctgtcgcccaatgttaggaagcgggttgagtttttgagagagatccagagtcaacacgatgaaattgaggccaagttttttgaagaacgagctgcccttgaggcaaagtaccagaagctttatgaacctttatacacaaagaggtatggaattgtaaatggagaagtggaggtagatggtgtttgtgatgaaccggccagtgagaatactgttgagggaaaagaaccagacgctaaaggagttccagacttttggcttactgccatgaaaacaaacgaggttttgtctgaggagatacaagagcgcgatgaagccgctttgaaatatctaaaagatatcaagtggtctagaatcgaggatcctaagggtttcaagctggattttttctttgatacaaacccattcttcaagaattctgtcctgacaaaaacgtaccacatggttgatgaagatgacccaattttggagaaagctattggaactgaaatcgagtggtatcctgggaaaaacctaacacagaagattctaaaaaagaaacctaaaaaaggttcaaagaatacgaagcctatcactaaaaccgaggactgtgagagtttcttcaactttttcaatcccccgcaggtccctgaagatgatgatgacatcgatgaagacactgctgatgagctgcagagtcaaatggagcatgattatgacattgggaccaccataagggataagattatccctcacgcagtttcctggtttactggtgaggctgtgcaaggtgaggattttggtgagttgggcgatgatgatgaagatgatgatgatgaagacgatgacgaagatgatgaggatgaagaagaggatgatgatgaggaagaggatgatgaggaagaaagcaagccagcaaggaagtcaggatctggtcgcagacataaggcgccacagaaggtgtcgcagggaaatgcggaacaaccagcggagtgcaagcagcagtagaatggcctgttgatgttggttgatgcagtattttccattgagctgcctagaggttatgtgtgcgcaggccagatgttggtgttgatatctcaagtgtggtttttattagtaggcggtgagggtgttgtctggagcactttggtgctgcgttggtggatggatattggtttgcaacttgtctgc

SEQ ID NO: 14032 - protein, 415 aa, Zea mays subsp. mays
  peptide (1)..(415): Ceres Seq. ID no. 13494862
GSSLSSSSPAAQLLSSLGGATTAIKRDTGVTEESTMGGEKETFDTSDLNASLPAAAAALSAEDRAGLVNALKDKLQSLAGQHADVLETLSPNVRKRVEFLREIQSQHDEIEAKFFEERAALEAKYQKLYEPLYTKRYGIVNGEVEVDGVCDEPASENTVEGKEPDAKGVPDFWLTAMKTNEVLSEEIQERDEAALKYLKDIKWSRIEDPKGFKLDFFFDTNPFFKNSVLTKTYHMVDEDDPILEKAIGTEIEWYPGKNLTQKILKKKPKKGSKNTKPITKTEDCESFFNFFNPPQVPEDDDDIDEDTADELQSQMEHDYDIGTTIRDKIIPHAVSWFTGEAVQGEDFGELGDDDEDDDDEDDDEDDEDEEEDDDEEEDDEEESKPARKSGSGRRHKAPQKVSQGNAEQPAECKQQ

SEQ ID NO: 14033 - protein, 380 aa, Zea mays subsp. mays
  peptide (1)..(380): Ceres Seq. ID no. 13494863
MGGEKETFDTSDLNASLPAAAAALSAEDRAGLVNALKDKLQSLAGQHADVLETLSPNVRKRVEFLREIQSQHDEIEAKFFEERAALEAKYQKLYEPLYTKRYGIVNGEVEVDGVCDEPASENTVEGKEPDAKGVPDFWLTAMKTNEVLSEEIQERDEAALKYLKDIKWSRIEDPKGFKLDFFFDTNPFFKNSVLTKTYHMVDEDDPILEKAIGTEIEWYPGKNLTQKILKKKPKKGSKNTKPITKTEDCESFFNFFNPPQVPEDDDDIDEDTADELQSQMEHDYDIGTTIRDKIIPHAVSWFTGEAVQGEDFGELGDDDEDDDDEDDDEDDEDEEEDDDEEEDDEEESKPARKSGSGRRHKAPQKVSQGNAEQPAECKQQ

SEQ ID NO: 14034 - protein, 239 aa, Zea mays subsp. mays
  peptide (1)..(239): Ceres Seq. ID no. 13494864
MKTNEVLSEEIQERDEAALKYLKDIKWSRIEDPKGFKLDFFFDTNPFFKNSVLTKTYHMVDEDDPILEKAIGTEIEWYPGKNLTQKILKKKPKKGSKNTKPITKTEDCESFFNFFNPPQVPEDDDDIDEDTADELQSQMEHDYDIGTTIRDKIIPHAVSWFTGEAVQGEDFGELGDDDEDDDDEDDDEDDEDEEEDDDEEEDDEEESKPARKSGSGRRHKAPQKVSQGNAEQPAECKQQ

SEQ ID NO: 14035 - DNA, 998 bp, Zea mays subsp. mays
  misc_feature (1)..(998): Ceres Seq. ID no. 12420272
  misc_feature (1)..(998): Ortholog of  Ceres SEQ ID NO 15172862 as cited in SEQ ID NO 51943
  misc_feature (1)..(998): Ortholog of  Ceres SEQ ID NO 12784852 as cited in SEQ ID NO 61543
agcctctcttactctccgccgtcgccctgctcgcccgaagcagctgccggcaaaatggccccgaagagaggcggtagggcgccggtccccgccaagaagaaggcggtggtgacgaacccgctcttcgagaagaggccgaagcagtttgggatcggcggcgcccttccgcccaagaaggacctccaccgcttcgtcaagtggcccaaggtcgtgcgcatccagcgccagcgccgcatcctcaagcagcgcctcaaggtgcccccggcgctcaaccagttcacacgtaccctcgacaagaaccttgcaacaaacttgttcaagatgcttcttaagtaccgccccgaggacaaagctgccaagaaggagaggctcttgaagagggcccaggctgaaaacgaggggaaaactgttgagtcaaagaaaccaattgttgtgaagtacggccttaaccatgtgacttacctcatcgagcagagcaaggcccagctggttgtcatagctcatgatgttgatccgatcgagctggttgtgtggctcccggccctttgcaggaaaatggaggttccatactgcattgtcaagggaaaagcacgccttggatcgatcgttcacaagaagactgcatctgttctttgcttgaccaccgtcaagaacgaggacaagcttgagttcagcaaaatcttggaggctatcaaggctaacttcaacgacaagtttgatgaggtcaggaagaagtggggtggtggtatcatgggctccaaatcacaggcgaaaaccaggccagggaaaagctgcttgccaaggaagctgcccagcggatgacctaagtcttgccctgttaaattaaaattttcttgtacttgcgatcgtgtgcaatcccggtggttgtcagatctagtttttgagagttttgcttgagaaagaccgagtcaccgaccatgacagaaagacatcatgtaagaattcaagttttggttctgtaccatctagttcatgtg

SEQ ID NO: 14036 - protein, 273 aa, Zea mays subsp. mays
  peptide (1)..(273): Ceres Seq. ID no. 12420273
SLSYSPPSPCSPEAAAGKMAPKRGGRAPVPAKKKAVVTNPLFEKRPKQFGIGGALPPKKDLHRFVKWPKVVRIQRQRRILKQRLKVPPALNQFTRTLDKNLATNLFKMLLKYRPEDKAAKKERLLKRAQAENEGKTVESKKPIVVKYGLNHVTYLIEQSKAQLVVIAHDVDPIELVVWLPALCRKMEVPYCIVKGKARLGSIVHKKTASVLCLTTVKNEDKLEFSKILEAIKANFNDKFDEVRKKWGGGIMGSKSQAKTRPGKSCLPRKLPSG

SEQ ID NO: 14037 - protein, 255 aa, Zea mays subsp. mays
  peptide (1)..(255): Ceres Seq. ID no. 12420274
MAPKRGGRAPVPAKKKAVVTNPLFEKRPKQFGIGGALPPKKDLHRFVKWPKVVRIQRQRRILKQRLKVPPALNQFTRTLDKNLATNLFKMLLKYRPEDKAAKKERLLKRAQAENEGKTVESKKPIVVKYGLNHVTYLIEQSKAQLVVIAHDVDPIELVVWLPALCRKMEVPYCIVKGKARLGSIVHKKTASVLCLTTVKNEDKLEFSKILEAIKANFNDKFDEVRKKWGGGIMGSKSQAKTRPGKSCLPRKLPSG

SEQ ID NO: 14038 - protein, 166 aa, Zea mays subsp. mays
  peptide (1)..(166): Ceres Seq. ID no. 12420275
MLLKYRPEDKAAKKERLLKRAQAENEGKTVESKKPIVVKYGLNHVTYLIEQSKAQLVVIAHDVDPIELVVWLPALCRKMEVPYCIVKGKARLGSIVHKKTASVLCLTTVKNEDKLEFSKILEAIKANFNDKFDEVRKKWGGGIMGSKSQAKTRPGKSCLPRKLPSG

SEQ ID NO: 14039 - DNA, 855 bp, Zea mays subsp. mays
  misc_feature (1)..(855): Ceres Seq. ID no. 12420264
  misc_feature (1)..(855): Ortholog of  Ceres SEQ ID NO 13573778 as cited in SEQ ID NO 0
aatttctttattctacttgtacattctgaataatctcatgtatcttgcagctctgaatgatgcactaaagcaggagctggagaggcttaagcttgttactgggtgagatgaccaattccagtgagacatataacatgagatttcagcatattccatacaactcttccttctttccgctttcccagcaaaatgcatctccacaccctggtaccacccagttgccaccaccgttccacccaccccatcccaatgtgccaaaccaccagatgctgtcccacccaaacgctctcccagacataatgcagcaagagtctcttggacggctgcagggtttggacattggaaaggggccactggttgtcaagtcagagagcagctcgatctctgctagtgaaagcagcagcaccttctaacgaggcctaccaatgagaatctgccgtttcaatacgtcccattgttcataatagcctgacatccttgtgctgcttcctgctctgtaagcttatttgttatttaattcattcaattagttgaaattgttccttgtcgcactggcagatcgatccatgttgtagaatgatccaggaacccttctagtctgtttatgttttgggaccatttcatgtttatgtgttcggtattagggcatttggattttggagtgaaattctctgatgatacttttgttgtgttgagccatgttgactgcatgaatcctcttttgaacatactcactctgtaccaaattcgttttaggccaatggtggattcatgaaagacttgttgaatgtattttatgtgtctatattcatcctcactcatttgaatatagacaaaaactactcctttcgttcc

SEQ ID NO: 14040 - protein, 101 aa, Zea mays subsp. mays
  peptide (1)..(101): Ceres Seq. ID no. 12420265
MTNSSETYNMRFQHIPYNSSFFPLSQQNASPHPGTTQLPPPFHPPHPNVPNHQMLSHPNALPDIMQQESLGRLQGLDIGKGPLVVKSESSSISASESSSTF

SEQ ID NO: 14041 - protein, 92 aa, Zea mays subsp. mays
  peptide (1)..(92): Ceres Seq. ID no. 12420266
MRFQHIPYNSSFFPLSQQNASPHPGTTQLPPPFHPPHPNVPNHQMLSHPNALPDIMQQESLGRLQGLDIGKGPLVVKSESSSISASESSSTF

SEQ ID NO: 14042 - protein, 56 aa, Zea mays subsp. mays
  peptide (1)..(56): Ceres Seq. ID no. 12420267
MFWDHFMFMCSVLGHLDFGVKFSDDTFVVLSHVDCMNPLLNILTLYQIRFRPMVDS

SEQ ID NO: 14043 - DNA, 637 bp, Zea mays subsp. mays
  misc_feature (1)..(637): Ceres Seq. ID no. 12420260
  misc_feature (1)..(637): Ortholog of  Ceres SEQ ID NO 14307288 as cited in SEQ ID NO 54318
aaagatccagatttgacaacttttgtatgtgtttgtatcccggaatttctttcattgtatgaaacagagagatggtgcaagagttagcaaagtttgagattgattcgcacaacattattattaatcaagttatatttgatgaggaagttgtcgagtcaaaattgctaaaagcacggataaaaatgcaacagaaatacattgaccagttccatatgttatatgatgacttcaacatcaccaaacttcccttgctttcagaagaggtttgtggtgttcaagctctacaaaacttttcccaccgcttccttacaccatacaagtctgctcgtaaaaggggcaccatcgaggagctggaggagagaataactatactaaaatctgcattgcaagaagctgaggcagaattagataggattaggaaaggaaagcagtcagcgtgatccttttcccccataggttaaggtatgtaaagcctggcagaagctactaagaaaacagagttagagagacgctcaaatgtcattacactcttgttgatttcactaccatgtttcctcatcgaaatgtttagatttgtcatagctatcggaagagaagtgtttgattcacacgagatatatataggtccattcttttt

SEQ ID NO: 14044 - protein, 122 aa, Zea mays subsp. mays
  peptide (1)..(122): Ceres Seq. ID no. 12420261
MVQELAKFEIDSHNIIINQVIFDEEVVESKLLKARIKMQQKYIDQFHMLYDDFNITKLPLLSEEVCGVQALQNFSHRFLTPYKSARKRGTIEELEERITILKSALQEAEAELDRIRKGKQSA

SEQ ID NO: 14045 - protein, 85 aa, Zea mays subsp. mays
  peptide (1)..(85): Ceres Seq. ID no. 12420262
MQQKYIDQFHMLYDDFNITKLPLLSEEVCGVQALQNFSHRFLTPYKSARKRGTIEELEERITILKSALQEAEAELDRIRKGKQSA

SEQ ID NO: 14046 - protein, 75 aa, Zea mays subsp. mays
  peptide (1)..(75): Ceres Seq. ID no. 12420263
MLYDDFNITKLPLLSEEVCGVQALQNFSHRFLTPYKSARKRGTIEELEERITILKSALQEAEAELDRIRKGKQSA

SEQ ID NO: 14047 - DNA, 1063 bp, Zea mays subsp. mays
  misc_feature (1)..(1063): Ceres Seq. ID no. 12467899
  misc_feature (1)..(1063): Ortholog of  Ceres SEQ ID NO 14302458 as cited in SEQ ID NO 66127
gaagccctgcaacgatacgaatgatattccaacagtccagtcgtcggtgtccgtgagagatgtgggcacagagatgactccaatacctagccaggaaccttcaagaactggaactccactagggtcaaggacaccaactcgaagccctaactgttcagtaccgtcaacacctgtaggggggaggtcaatagcatctcctcctggagaagactgcacagacgatggcccatttttccacaggaaatgcggcgtacatgcaaatgaattgtcagatactgagacgaggcttaaaacaaggcaagaaatcgctgcgcttggcatacagctaggaaagatgaacattgctacgtgggccagcaaagaggagctagagctagtctctgcggcaccgagcatcgctgatttggagcgcatcaggaaggaatatgctgctcgtgctgcatcgtatgaggaggcagaaaatactaaacatacagcaagattcaaaaaagaagaggtgaagattgaagcttgggagggtcgtcaaagagcaaaaattgaatatgaaatgagaagaatagaggaatttgctgagagaatgagaagtgaggccatggaaaagatggccgaaaagctagagatgacgcgccgcatagccgaagagaaacgagcttcggccaacgccaaaatgaaccagcaagcagctatagcggttcagaaggccgagaagattcgccaaacgggacgagtcccaggatcgagtatcctacgctgcggtggctgcttctgtggaccgtagtagatcatacataggattcgacagctagtatgttggtctgggatatatagtggtgggaaacctgaactccaccctccaacaagtcagcattccttgattttagcatgaaaaaaggaatgtctctaaggtattcagatgcaaacgtgttcttgtttgtcatgtatgtaaattattccaatgattttaacttgggtcggtgtacaaggtaaccagctgttcgttggttaacgaagaagtcacgaatcgttcaaacattatgtttattattaaaaaaaaaaaaaaaaa

SEQ ID NO: 14048 - protein, 258 aa, Zea mays subsp. mays
  peptide (1)..(258): Ceres Seq. ID no. 12467900
KPCNDTNDIPTVQSSVSVRDVGTEMTPIPSQEPSRTGTPLGSRTPTRSPNCSVPSTPVGGRSIASPPGEDCTDDGPFFHRKCGVHANELSDTETRLKTRQEIAALGIQLGKMNIATWASKEELELVSAAPSIADLERIRKEYAARAASYEEAENTKHTARFKKEEVKIEAWEGRQRAKIEYEMRRIEEFAERMRSEAMEKMAEKLEMTRRIAEEKRASANAKMNQQAAIAVQKAEKIRQTGRVPGSSILRCGGCFCGP

SEQ ID NO: 14049 - protein, 234 aa, Zea mays subsp. mays
  peptide (1)..(234): Ceres Seq. ID no. 12467901
MTPIPSQEPSRTGTPLGSRTPTRSPNCSVPSTPVGGRSIASPPGEDCTDDGPFFHRKCGVHANELSDTETRLKTRQEIAALGIQLGKMNIATWASKEELELVSAAPSIADLERIRKEYAARAASYEEAENTKHTARFKKEEVKIEAWEGRQRAKIEYEMRRIEEFAERMRSEAMEKMAEKLEMTRRIAEEKRASANAKMNQQAAIAVQKAEKIRQTGRVPGSSILRCGGCFCGP

SEQ ID NO: 14050 - protein, 147 aa, Zea mays subsp. mays
  peptide (1)..(147): Ceres Seq. ID no. 12467902
MNIATWASKEELELVSAAPSIADLERIRKEYAARAASYEEAENTKHTARFKKEEVKIEAWEGRQRAKIEYEMRRIEEFAERMRSEAMEKMAEKLEMTRRIAEEKRASANAKMNQQAAIAVQKAEKIRQTGRVPGSSILRCGGCFCGP

SEQ ID NO: 14051 - DNA, 2238 bp, Zea mays subsp. mays
  misc_feature (1)..(2238): Ceres Seq. ID no. 12436409
  misc_feature (1)..(2238): Ortholog of  Ceres SEQ ID NO 13596319 as cited in SEQ ID NO 67933
aaaaataatcatacctggtatgctaaatcgaaacaggagggagtctgtagtagtccagttcacaagtagcggcagctagctgctgttggctgttgcccttctccgaaagaaaactactcgagctgaggcggagtagccaaggagaagtcaatgccgttctagcagtccagctttcacatggagcaggtcaaacaccttattacgcttgacgctttgcagcagcgatctcgatctgtggaggattgcatcaacctgacaatctctcgagttcttcacctcctctctcccaacggcatccattcagcccttggatgaccaggcatggccgtgggaggcccctcctggcccaatttgcagtgcctggtgcggcggaagccggcgaccgctggctgggccgaagacgctgacaggggaggtgtccagcgcctcgccaagacgctatctattccccacctcgtcgccatcggtgtcggctcgacgattggcgccggcatctatgtcctggttggaaccgtggctcgtgagcacaccgggccgggactgacgctctcctttctgatagccggcgtcgccgcggctctttcagcattgtgctatgccgagctctcctgccgtttcccttcggcagggagtgcctatcactactcctacatctgcattggggagagtgttgcttggctgattgggtgggccttgatccttgagtacaccattggggggtcatcagtggcacgtggcatgtcaccaaacttggctctatttttcggtggccaagataagttgccattctttctagcacaggtgcatgtcaaaggcctcgacaccccagttgatccatgtgctgctattcttgtcctgatagttactgcattactctgtctgggaattaaagagagctcatctgtggaaggcatcatcaccactgcaaatatcatagtgatgctctttgtcatctgcgctggtggatggctaggattcaggaatggctgggttggttataaagtgccagaaggttatttccctaatggtatcagcggagttctctctggatcagcaacccctcttcttcgcattcattggcttcgacacagttgctagtacggccgaggaggtgaagaatcctcgacgcgatcttccattgggtatgggcctgaccttatccctgtgttgcttcctatatatgatggtttctgctgttgtggtcggtttggtgccgtaccacgcgatggatccggacacccctatttnttctgtgtttgcgcgatatgggatgcagtgggccgagtatgttgtttccagtggagctgttcttgctcttgtggcatccttgataggtggtattcttccccagccaagaattataatggccatggctagagatggattgctcccgccactgttctcagatgttaatcgaaaaactcaagtgccaatcttgagcacagtcttaattggcacatgtgcttctgtcctggcctttttcatggatgtctcccaattggcagggatggtaagcgtgggaaccttattggcatttactgcggttgccatttctgttttagtagtaagatatgctcctccgtatgagatgccaatggaagtggcccttgcagtagcttcattctctgggcacttagagcatgatgagcaaaattcagaagatccttttagcaatgttcaagaagcgcttgatgtcagtgaggtagccagagaagtaaggcgacagaaagccattggaagcatagtgttgatatgcgttggagccatcatcttgatttctgcggtttctgtctcctttttgccattttatgtgcaaaggatcgcatgcactgtaggcgggctggcagtgttgggttcttctattgtgcttttgtgcattggacaagacaagaagttcttgggacaaactggaggtttcatgtgcccgttggtcccatttcttccagtctgttgcatcatggtcaacttatacctgcttatgaacgtcgggagtcacacgtggattcgtgtttccatatggctggtggctggggccctcatatacatcttctatggcatgaagcatagttcactggcaagcatggcctaccatcgcatatcacctttgtagttcaacgtttggctagaggtcttttgcattttgatagcagaaaatgagaacacgtggcggctacagaagctgtttctcaaaggtgtcgggggcgggggtttcttaggctatccgcaagcgttaacccc

SEQ ID NO: 14052 - protein, 375 aa, Zea mays subsp. mays
  peptide (1)..(375): Ceres Seq. ID no. 12436410
  misc_feature (89)..(89): Xaa is any aa, unknown or other
MAGLVIKCQKVISLMVSAEFSLDQQPLFFAFIGFDTVASTAEEVKNPRRDLPLGMGLTLSLCCFLYMMVSAVVVGLVPYHAMDPDTPIXSVFARYGMQWAEYVVSSGAVLALVASLIGGILPQPRIIMAMARDGLLPPLFSDVNRKTQVPILSTVLIGTCASVLAFFMDVSQLAGMVSVGTLLAFTAVAISVLVVRYAPPYEMPMEVALAVASFSGHLEHDEQNSEDPFSNVQEALDVSEVAREVRRQKAIGSIVLICVGAIILISAVSVSFLPFYVQRIACTVGGLAVLGSSIVLLCIGQDKKFLGQTGGFMCPLVPFLPVCCIMVNLYLLMNVGSHTWIRVSIWLVAGALIYIFYGMKHSSLASMAYHRISPL

SEQ ID NO: 14053 - protein, 361 aa, Zea mays subsp. mays
  peptide (1)..(361): Ceres Seq. ID no. 12436411
  misc_feature (75)..(75): Xaa is any aa, unknown or other
MVSAEFSLDQQPLFFAFIGFDTVASTAEEVKNPRRDLPLGMGLTLSLCCFLYMMVSAVVVGLVPYHAMDPDTPIXSVFARYGMQWAEYVVSSGAVLALVASLIGGILPQPRIIMAMARDGLLPPLFSDVNRKTQVPILSTVLIGTCASVLAFFMDVSQLAGMVSVGTLLAFTAVAISVLVVRYAPPYEMPMEVALAVASFSGHLEHDEQNSEDPFSNVQEALDVSEVAREVRRQKAIGSIVLICVGAIILISAVSVSFLPFYVQRIACTVGGLAVLGSSIVLLCIGQDKKFLGQTGGFMCPLVPFLPVCCIMVNLYLLMNVGSHTWIRVSIWLVAGALIYIFYGMKHSSLASMAYHRISPL

SEQ ID NO: 14054 - protein, 321 aa, Zea mays subsp. mays
  peptide (1)..(321): Ceres Seq. ID no. 12436412
  misc_feature (35)..(35): Xaa is any aa, unknown or other
MGLTLSLCCFLYMMVSAVVVGLVPYHAMDPDTPIXSVFARYGMQWAEYVVSSGAVLALVASLIGGILPQPRIIMAMARDGLLPPLFSDVNRKTQVPILSTVLIGTCASVLAFFMDVSQLAGMVSVGTLLAFTAVAISVLVVRYAPPYEMPMEVALAVASFSGHLEHDEQNSEDPFSNVQEALDVSEVAREVRRQKAIGSIVLICVGAIILISAVSVSFLPFYVQRIACTVGGLAVLGSSIVLLCIGQDKKFLGQTGGFMCPLVPFLPVCCIMVNLYLLMNVGSHTWIRVSIWLVAGALIYIFYGMKHSSLASMAYHRISPL

SEQ ID NO: 14055 - DNA, 2161 bp, Zea mays subsp. mays
  misc_feature (1)..(2161): Ceres Seq. ID no. 12435871
  misc_feature (1)..(2161): Ortholog of  Ceres SEQ ID NO 14314480 as cited in SEQ ID NO 52362
  misc_feature (1)..(2161): Ortholog of  Ceres SEQ ID NO 13593854 as cited in SEQ ID NO 53403
  misc_feature (1)..(2161): Ortholog of  Ceres SEQ ID NO 12581680 as cited in SEQ ID NO 55019
  misc_feature (1)..(2161): Ortholog of  Ceres SEQ ID NO 15172112 as cited in SEQ ID NO 59632
cttttattagggtttttttgtctccttagatttgcgcctgttctcacctgtgcgcatactagtctctgcatcagagagtagagacctcggagccgatcttcaacacgcagattgggcagagctgcctgccggagggagagtggagagagagagagagagagagagagagagagctcaaggggggcaaaaggagtttttttttatccagcttgttagcttgattctctttgatccgggagagcagccgccagtccaactaatcctagctattggtgtgccggggctttgattgttctccagatccgagccacctgctgggtggactccaggaatccgagcacgaagttgacaggggagttctcagggaaaagttgcgcaggggaggaaggaagagcctgaaagggcggtgcggagagaaagactataagagcgacctgggtcccttgaggatgccgtcaagaaaccgcgtggagaggagggcgatgagatgagggatgctggccgcggtgatggactatttcagctcctgctggggcccgcgatcgggtgacgggcacagggggaagggccccgacgccgccggccggcaggacggtctcctctggtacaaggacgccggtcagctcgtcactggggagttctccatggccgtggtgcaggccaaccagctgcttgaggaccagagccaagtggagtccggatcgctctccctggctgacccgggcccgcagggcaccttcgtcggcgtctatgatggccatggcggtcctgagacgtcccggttcatcaatgaccacctcttcaaccatctcagaaggtttgcaactgagcacaagtttatgtcagcggacgtgatccggaaagctttccaagcaactgaggagggctttctttctctagtcagcaaggaatggtctttgaagcctcagattgcttcagtgggctcctgctgccttgttggtgtaatctgtgctgggactctctatgttgcaaacctgggtgactcacgtgcagttcttggaaggcttgttaaggcaactggagaggtcgtggccatgcagttgtcatcggagcacaatgcatgctatgaggaagttagacaagaactgcagtcatcacatcctgacgatccacatattgtggttctcaaacacaatgtttggcgagtgaagggtctcatccagatctcaagatctattggagatgtatatctaaagaaaccagagtataacagagaaccacttcacagcaagtttcggcttcgagaaaccttccagaggccgatccttagttctgaacctcaaattactgaacatcgaatacagccaaatgatcaatttgttatatttgcttctgatggtctatgggagcacctcaccaataaggaagcagttgaccttgtccaaagtagtccacgcaatggaattgctcggagactagtgaaagcggcgatgcaagaagctgccaagaagagggagatgagatactcagacctcaagaagatcgaccgtggtgtgagaaggcatttcctcgacgatataacggtcgtcgtggtattccttgatttgaatgccatgagcaaagctagctggagcaaaagcccctcggtttctctccgagggggcggtgtcaccgtccctgccaagtccctcgcacctttctcagctccggcacggctgaacagcacctactgaagttgctaccactcttgaaaggaagaacacggtgcagatctgcagtggtgagagaaaaaaaaaacagcaatcaagtgtagcgttacacttacacctgctgtgctgttgctctttgcaaaactactgtctagactcctggtaattagtgtactgatagcgaggtaaaaaaaagttagattatttgttagcagcggcagtgatttgacatctaaggaacaacaacacggtgcccaccgattctgctatcctgatggctcgcggcagcctggctggtcggcacacgacacgaagtgaagctgttttactggcggcatctggctttgttttctcatgggacagtgatccacaagagtaagggatcagctcaatccaaagtcaatagatgttccttataaaaaatagaggtacagatgttcccatcggctatgtgtatttggggaaaaaatcaatataaggggtgtttggtg

SEQ ID NO: 14056 - protein, 399 aa, Zea mays subsp. mays
  peptide (1)..(399): Ceres Seq. ID no. 12435872
MLAAVMDYFSSCWGPRSGDGHRGKGPDAAGRQDGLLWYKDAGQLVTGEFSMAVVQANQLLEDQSQVESGSLSLADPGPQGTFVGVYDGHGGPETSRFINDHLFNHLRRFATEHKFMSADVIRKAFQATEEGFLSLVSKEWSLKPQIASVGSCCLVGVICAGTLYVANLGDSRAVLGRLVKATGEVVAMQLSSEHNACYEEVRQELQSSHPDDPHIVVLKHNVWRVKGLIQISRSIGDVYLKKPEYNREPLHSKFRLRETFQRPILSSEPQITEHRIQPNDQFVIFASDGLWEHLTNKEAVDLVQSSPRNGIARRLVKAAMQEAAKKREMRYSDLKKIDRGVRRHFLDDITVVVVFLDLNAMSKASWSKSPSVSLRGGGVTVPAKSLAPFSAPARLNSTY

SEQ ID NO: 14057 - protein, 394 aa, Zea mays subsp. mays
  peptide (1)..(394): Ceres Seq. ID no. 12435873
MDYFSSCWGPRSGDGHRGKGPDAAGRQDGLLWYKDAGQLVTGEFSMAVVQANQLLEDQSQVESGSLSLADPGPQGTFVGVYDGHGGPETSRFINDHLFNHLRRFATEHKFMSADVIRKAFQATEEGFLSLVSKEWSLKPQIASVGSCCLVGVICAGTLYVANLGDSRAVLGRLVKATGEVVAMQLSSEHNACYEEVRQELQSSHPDDPHIVVLKHNVWRVKGLIQISRSIGDVYLKKPEYNREPLHSKFRLRETFQRPILSSEPQITEHRIQPNDQFVIFASDGLWEHLTNKEAVDLVQSSPRNGIARRLVKAAMQEAAKKREMRYSDLKKIDRGVRRHFLDDITVVVVFLDLNAMSKASWSKSPSVSLRGGGVTVPAKSLAPFSAPARLNSTY

SEQ ID NO: 14058 - protein, 349 aa, Zea mays subsp. mays
  peptide (1)..(349): Ceres Seq. ID no. 12435874
MAVVQANQLLEDQSQVESGSLSLADPGPQGTFVGVYDGHGGPETSRFINDHLFNHLRRFATEHKFMSADVIRKAFQATEEGFLSLVSKEWSLKPQIASVGSCCLVGVICAGTLYVANLGDSRAVLGRLVKATGEVVAMQLSSEHNACYEEVRQELQSSHPDDPHIVVLKHNVWRVKGLIQISRSIGDVYLKKPEYNREPLHSKFRLRETFQRPILSSEPQITEHRIQPNDQFVIFASDGLWEHLTNKEAVDLVQSSPRNGIARRLVKAAMQEAAKKREMRYSDLKKIDRGVRRHFLDDITVVVVFLDLNAMSKASWSKSPSVSLRGGGVTVPAKSLAPFSAPARLNSTY

SEQ ID NO: 14059 - DNA, 450 bp, Zea mays subsp. mays
  misc_feature (1)..(450): Ceres Seq. ID no. 13635772
  misc_feature (1)..(450): Ortholog of  Ceres SEQ ID NO 13598714 as cited in SEQ ID NO 62656
gcttcatttaacgctgtcgctttcgctttcgcttccactcgcactccatgggtgcgcgggcgacgatgggatgttcgcccttgctgcccttccaagcgctctggctcacagcggccgttgtcgcggcgctcgcgctcgcggccggcgcgcagccgtcgccgtcgctgtcgccggggttctacgacgcgacgtgcccggggctgcagcccatcgtgcgccgcggcgtggcgcgcgccgtccgggcggagccgcgcatgggggcgtccctcctccgcctcttcttccacgactgcttcgtcaatggctgcgacgcctccgtcttgctggacgacgtgcccggtaacttcaccggggagaagaacgcggggcccaacgccaactcgctgcgcgggtacgaggtcatcgacgccatcaaggcccaggtggaggcgtcctgcaaggccaccgtct

SEQ ID NO: 14060 - protein, 150 aa, Zea mays subsp. mays
  peptide (1)..(150): Ceres Seq. ID no. 13635773
ASFNAVAFAFASTRTPWVRGRRWDVRPCCPSKRSGSQRPLSRRSRSRPARSRRRRCRRGSTTRRARGCSPSCAAAWRAPSGRSRAWGRPSSASSSTTASSMAATPPSCWTTCPVTSPGRRTRGPTPTRCAGTRSSTPSRPRWRRPARPPS

SEQ ID NO: 14061 - protein, 134 aa, Zea mays subsp. mays
  peptide (1)..(134): Ceres Seq. ID no. 13635774
MGARATMGCSPLLPFQALWLTAAVVAALALAAGAQPSPSLSPGFYDATCPGLQPIVRRGVARAVRAEPRMGASLLRLFFHDCFVNGCDASVLLDDVPGNFTGEKNAGPNANSLRGYEVIDAIKAQVEASCKATV

SEQ ID NO: 14062 - protein, 128 aa, Zea mays subsp. mays
  peptide (1)..(128): Ceres Seq. ID no. 13635775
MGCSPLLPFQALWLTAAVVAALALAAGAQPSPSLSPGFYDATCPGLQPIVRRGVARAVRAEPRMGASLLRLFFHDCFVNGCDASVLLDDVPGNFTGEKNAGPNANSLRGYEVIDAIKAQVEASCKATV

SEQ ID NO: 14063 - DNA, 1057 bp, Zea mays subsp. mays
  misc_feature (1)..(1057): Ceres Seq. ID no. 12435854
  misc_feature (1)..(1057): Ortholog of  Ceres SEQ ID NO 14308278 as cited in SEQ ID NO 55403
  misc_feature (1)..(1057): Ortholog of  Ceres SEQ ID NO 12618176 as cited in SEQ ID NO 64489
  misc_feature (1)..(1057): Ortholog of  Ceres SEQ ID NO 15179231 as cited in SEQ ID NO 0
aacgaagccacaagcagcgccgcgagccacagctagcaccaccaccttgcaccgcacccgcaccgagacgaacagatctatcgatcgatagctagatccatggctgccggcggcgacgacaccaccatcgcgcaggtccacagcggcatcgacagcagcaacaagacgctgctcaagagcgaggccctctacaagtacgtgctggacacgtcggtgctgccgcacgagccggagagcatgcgtgagctgcggctggtgaccgacaagcacgagtgggggttcatgcagtcgtccccggacgaggcgtcgctgctgcggatgctgatcaagctgagcggcgcgcggcggacgctggaggtgggcgtgttcacgggctactcgctgctggcgacggcgctggcgctgcccgccgacggcaaggtcatcgcattcgacgtgagccgcgagtactacgacatcggccgccccttcatcgagcgcgccggggtggcgggcaaggtggacttccgggagggcccggcgctggagcagctggacgagctcctcgccgacccggccaaccacggcgccttcgacttcgcgttcgtcgacgccgacaagcctaactacgtccggtaccacgagcagctgctccgcctggtgcgcgtcgggggtaccgtcgtgtacgacaacacgctgtgggccggtactgtggcgcttccccccgacgcgccgctcagcgacctcgaccgcaggttctccgccgccatcagggaactcaacgtccggctttctcaggatccccgcgtcgaggtctgccagctcgccatcgccgacggcgtcaccatctgccgccgcgtcgtctgatgtgatgatgatccgacgaccaagatcgtatatcattcgctcgtcgtctctgtcatctttcaactgcctgcccgctgccgtcgtcaactaataatgcatggttctgctggttctttttttttattttcttttgtgcttgcattgtgtgtgttgagttgaacatcccccgcgatgtactgcaacaactggnatgcaatgcaacatcatgcgt

SEQ ID NO: 14064 - protein, 248 aa, Zea mays subsp. mays
  peptide (1)..(248): Ceres Seq. ID no. 12435855
MAAGGDDTTIAQVHSGIDSSNKTLLKSEALYKYVLDTSVLPHEPESMRELRLVTDKHEWGFMQSSPDEASLLRMLIKLSGARRTLEVGVFTGYSLLATALALPADGKVIAFDVSREYYDIGRPFIERAGVAGKVDFREGPALEQLDELLADPANHGAFDFAFVDADKPNYVRYHEQLLRLVRVGGTVVYDNTLWAGTVALPPDAPLSDLDRRFSAAIRELNVRLSQDPRVEVCQLAIADGVTICRRVV

SEQ ID NO: 14065 - protein, 202 aa, Zea mays subsp. mays
  peptide (1)..(202): Ceres Seq. ID no. 12435856
MRELRLVTDKHEWGFMQSSPDEASLLRMLIKLSGARRTLEVGVFTGYSLLATALALPADGKVIAFDVSREYYDIGRPFIERAGVAGKVDFREGPALEQLDELLADPANHGAFDFAFVDADKPNYVRYHEQLLRLVRVGGTVVYDNTLWAGTVALPPDAPLSDLDRRFSAAIRELNVRLSQDPRVEVCQLAIADGVTICRRVV

SEQ ID NO: 14066 - protein, 187 aa, Zea mays subsp. mays
  peptide (1)..(187): Ceres Seq. ID no. 12435857
MQSSPDEASLLRMLIKLSGARRTLEVGVFTGYSLLATALALPADGKVIAFDVSREYYDIGRPFIERAGVAGKVDFREGPALEQLDELLADPANHGAFDFAFVDADKPNYVRYHEQLLRLVRVGGTVVYDNTLWAGTVALPPDAPLSDLDRRFSAAIRELNVRLSQDPRVEVCQLAIADGVTICRRVV

SEQ ID NO: 14067 - DNA, 999 bp, Zea mays subsp. mays
  misc_feature (1)..(999): Ceres Seq. ID no. 13624677
  misc_feature (1)..(999): Ortholog of  Ceres SEQ ID NO 13599132 as cited in SEQ ID NO 0
acccatcacacgacaaaatccctcaccctcgtgagtcctgacgtcctcgcccgtgctcgcagttggtagggttctagccatggcgtggagcgccgccgccgtctccaggttcgcagccgcctccccacccgcggctagaacccgaccaactgctgaaacacgtgcaattctggacctcagtgtccagtattggacaagtagagggtgggcatatgtcgatgtcaactatggaggaagcactggttatggaagagagtatcgggagagactattgaacaaatggggtattgttgatgttgatgattgctgcggctgtgcgagattcctggtggagagtgggaaagtagatgggcagcgcctttgtattactggtagatcagcaggtggatacactactttagcttcacttgcattcagagacacgttcaaggctggagcttctctctatggtgttggggacttgactctgttgagagcggagacgcacaaatttgagtctcattatatggacaatcttgtaggaaatgaaagagcttactacgagagatcaccaatcaactttgtcaaccagtttacttgtccagtcattttgtttcaagggttggaggataaggttgtgccaccagatcaggcacgcaaaatatacagtgccttgaaagagaaaggtttgcctgttgctttggttgaatatgaaggagagcagcatgggttccgtaaggcggagaacatcaagttcacctagatctctctgatctggtctgttctgccctccctccgtcatcgtcgactccccctgcgtccgttcctttggatctgaataagatggtggtgatctgagtggtggtcttagtttatcatgtatcgctcgcagtttaatttagcggtttaggtgtggatctgtgaaccccatggcgcctctgcttgattcgtgtttcacctgttatgttctgagattcatgataatgctatgagaactgaaattcccgtttcatgcttctc

SEQ ID NO: 14068 - protein, 220 aa, Zea mays subsp. mays
  peptide (1)..(220): Ceres Seq. ID no. 13624678
MAWSAAAVSRFAAASPPAARTRPTAETRAILDLSVQYWTSRGWAYVDVNYGGSTGYGREYRERLLNKWGIVDVDDCCGCARFLVESGKVDGQRLCITGRSAGGYTTLASLAFRDTFKAGASLYGVGDLTLLRAETHKFESHYMDNLVGNERAYYERSPINFVNQFTCPVILFQGLEDKVVPPDQARKIYSALKEKGLPVALVEYEGEQHGFRKAENIKFT

SEQ ID NO: 14069 - DNA, 446 bp, Zea mays subsp. mays
  misc_feature (1)..(446): Ceres Seq. ID no. 4614880
  misc_feature (1)..(446): Ortholog of  Ceres SEQ ID NO 13597269 as cited in SEQ ID NO 63932
acttttttcgtgcgttcgcgttcgacgcctcgctcggctggttccttccttccttccgctgtgttcccttctgtttctcgggcggagacgggaaggccgtgcgctcaaggatggcgcgcgagcagctggaggagtccatcgtggccgacggcaacggcaaggaggaagaggtcggggtcatgggcatcggcgccgcggacggcgccgacgaccagcacggcggcggcaagctcagcatgaagagcctgctgtggcacggcggctccgtctgggacgcgtggttcagctgcgcctccaaccaggtggcgcaggtgctcctgacgctgccgtactccttctcccagctggggatgctgtccggcgtgctgctgcagatcttctacggcttcctgggcagctggaccgcgtacctcatcagcgtcctctacgtcgagtaccgctcccgc

SEQ ID NO: 14070 - protein, 148 aa, Zea mays subsp. mays
  peptide (1)..(148): Ceres Seq. ID no. 4614881
LFSCVRVRRLARLVPSFLPLCSLLFLGRRREGRALKDGARAAGGVHRGRRQRQGGRGRGHGHRRRGRRRRPARRRQAQHEEPAVARRLRLGRVVQLRLQPGGAGAPDAAVLLLPAGDAVRRAAADLLRLPGQLDRVPHQRPLRRVPLP

SEQ ID NO: 14071 - protein, 148 aa, Zea mays subsp. mays
  peptide (1)..(148): Ceres Seq. ID no. 4614882
FFRAFAFDASLGWFLPSFRCVPFCFSGGDGKAVRSRMAREQLEESIVADGNGKEEEVGVMGIGAADGADDQHGGGKLSMKSLLWHGGSVWDAWFSCASNQVAQVLLTLPYSFSQLGMLSGVLLQIFYGFLGSWTAYLISVLYVEYRSR

SEQ ID NO: 14072 - protein, 112 aa, Zea mays subsp. mays
  peptide (1)..(112): Ceres Seq. ID no. 4614883
MAREQLEESIVADGNGKEEEVGVMGIGAADGADDQHGGGKLSMKSLLWHGGSVWDAWFSCASNQVAQVLLTLPYSFSQLGMLSGVLLQIFYGFLGSWTAYLISVLYVEYRSR

SEQ ID NO: 14073 - DNA, 1122 bp, Zea mays subsp. mays
  misc_feature (1)..(1122): Ceres Seq. ID no. 12781335
  misc_feature (1)..(1122): Ortholog of  Ceres SEQ ID NO 13654290 as cited in SEQ ID NO 62197
  misc_feature (1)..(1122): Ortholog of  Ceres SEQ ID NO 14301924 as cited in SEQ ID NO 67731
attcccctctccactagctccggtccgaagagggagggaggaccggaggaggacgcccgttgccactgccgcgccgctcccgcctccctctctccatccgccgagctcgagaagccaccatgatctccgcgcgcaccgccgcagcttcccccgcttccctgtggaagcagggaggacgaagcgagggcggcggcagctgcgacggatgtcggacttacaggaacactttgcggagggccgcagcagcgaaggtgcgtgccttgccgtcgagggcggtggaggcggtcaaaatgggctccgccgcggagatggagcaggaggaggcggaggtggccgcggccgcggccggcgtcgtcgtcgaggaccactacggcgaggacagcgccaccgaggagctgcccatcctgccctgggccttctccgtcgcaagcggttacaccctcttgagggatccacatcacaacaagggtcttgctttcatggagaaggagagggatgcacaccacttgcgggggctgcttcctcctgcagttgtgcctcaagaactccaaattaagaagatcatgcacaacctgcggcagtaccaggtccctttgcagcgctatatggccatgatggaccttcaggagaggaacgagaggcttttctacaagcttttaattgataacgtggaggagctgcttcctgtggtttatacaccaactgtaggtgaggcctgccagaagtatgggtccatctttcgacaaccacagggtctgtatgtcagcttgagggacaaggggaaggtcctagaagttctaaggaactggccacataggaacatttaagttatctgtgttactgatggtgagcgaatcttgggacttggagatttgggttctcagggaatgggaattcctgtaggcaaacttgctctatacactgctcttggaggagttcgtccatcagcttgtttgcctatcacaatcgatgttggcacaaataatgagaaactgcttaatgatgagttttacattggactccggcaaaaacgtgcaactggcgaggagtatcatgagcttatggaagagttcatggctgctgttaagcaaatctacggcgagaaagtcctcattcagtttg

SEQ ID NO: 14074 - protein, 235 aa, Zea mays subsp. mays
  peptide (1)..(235): Ceres Seq. ID no. 12781336
MISARTAAASPASLWKQGGRSEGGGSCDGCRTYRNTLRRAAAAKVRALPSRAVEAVKMGSAAEMEQEEAEVAAAAAGVVVEDHYGEDSATEELPILPWAFSVASGYTLLRDPHHNKGLAFMEKERDAHHLRGLLPPAVVPQELQIKKIMHNLRQYQVPLQRYMAMMDLQERNERLFYKLLIDNVEELLPVVYTPTVGEACQKYGSIFRQPQGLYVSLRDKGKVLEVLRNWPHRNI

SEQ ID NO: 14075 - protein, 184 aa, Zea mays subsp. mays
  peptide (1)..(184): Ceres Seq. ID no. 12781337
FPSPLAPVRRGREDRRRTPVATAAPLPPPSLHPPSSRSHHDLRAHRRSFPRFPVEAGRTKRGRRQLRRMSDLQEHFAEGRSSEGACLAVEGGGGGQNGLRRGDGAGGGGGGRGRGRRRRRGPLRRGQRHRGAAHPALGLLRRKRLHPLEGSTSQQGSCFHGEGEGCTPLAGAASSCSCASRTPN

SEQ ID NO: 14076 - protein, 178 aa, Zea mays subsp. mays
  peptide (1)..(178): Ceres Seq. ID no. 12781338
MGSAAEMEQEEAEVAAAAAGVVVEDHYGEDSATEELPILPWAFSVASGYTLLRDPHHNKGLAFMEKERDAHHLRGLLPPAVVPQELQIKKIMHNLRQYQVPLQRYMAMMDLQERNERLFYKLLIDNVEELLPVVYTPTVGEACQKYGSIFRQPQGLYVSLRDKGKVLEVLRNWPHRNI

SEQ ID NO: 14077 - DNA, 466 bp, Zea mays subsp. mays
  misc_feature (1)..(466): Ceres Seq. ID no. 4616532
  misc_feature (1)..(466): Ortholog of  Ceres SEQ ID NO 13594762 as cited in SEQ ID NO 51909
gcacgagactgctcggccgacgaaataataaagcgcgcgcgcgcacgcggagaggctcggagagctgagtgagatggcacaaaccatggcgtccatgaccggcctctcgcagggcgttctgcccagcaggcgcgccgccaacagggccaggacggccgccgtcgtcagggcgtccgccgaggcgcaggcgggccgccgcgccgtgctcgggctggtggccactggcatcgtcggcggcgccttgtcgcaggcggtgcacgccgagaccgtcaagaccatcaagatcggagccccgccgccgccctccggtggactccccgggactctgaactctgaccaggcgagggacttcgacctccccttgaaggagcggttctacctgcagccgctgccgccggcggangcggtggcgagggtgaagacgtcggcgcaggacatcatcaacctcaagccgctcatcgacaag

SEQ ID NO: 14078 - protein, 131 aa, Zea mays subsp. mays
  peptide (1)..(131): Ceres Seq. ID no. 4616533
  misc_feature (110)..(110): Xaa is any aa, unknown or other
MAQTMASMTGLSQGVLPSRRAANRARTAAVVRASAEAQAGRRAVLGLVATGIVGGALSQAVHAETVKTIKIGAPPPPSGGLPGTLNSDQARDFDLPLKERFYLQPLPPAXAVARVKTSAQDIINLKPLIDK

SEQ ID NO: 14079 - protein, 127 aa, Zea mays subsp. mays
  peptide (1)..(127): Ceres Seq. ID no. 4616534
  misc_feature (106)..(106): Xaa is any aa, unknown or other
MASMTGLSQGVLPSRRAANRARTAAVVRASAEAQAGRRAVLGLVATGIVGGALSQAVHAETVKTIKIGAPPPPSGGLPGTLNSDQARDFDLPLKERFYLQPLPPAXAVARVKTSAQDIINLKPLIDK

SEQ ID NO: 14080 - protein, 124 aa, Zea mays subsp. mays
  peptide (1)..(124): Ceres Seq. ID no. 4616535
  misc_feature (103)..(103): Xaa is any aa, unknown or other
MTGLSQGVLPSRRAANRARTAAVVRASAEAQAGRRAVLGLVATGIVGGALSQAVHAETVKTIKIGAPPPPSGGLPGTLNSDQARDFDLPLKERFYLQPLPPAXAVARVKTSAQDIINLKPLIDK

SEQ ID NO: 14081 - DNA, 1391 bp, Zea mays subsp. mays; identical to SEQ ID NO: 9852
  misc_feature (1)..(1391): Ceres Seq. ID no. 13504058
  misc_feature (1)..(1391): Ortholog of  Ceres SEQ ID NO 12781552 as cited in SEQ ID NO 51997
  misc_feature (1)..(1391): Ortholog of  Ceres SEQ ID NO 15176548 as cited in SEQ ID NO 53387
  misc_feature (1)..(1391): Ortholog of  Ceres SEQ ID NO 15169228 as cited in SEQ ID NO 55423
  misc_feature (1)..(1391): Ortholog of  Ceres SEQ ID NO 14312196 as cited in SEQ ID NO 56984
  misc_feature (1)..(1391): Ortholog of  Ceres SEQ ID NO 13597237 as cited in SEQ ID NO 64136
  misc_feature (1)..(1391): Ortholog of  Ceres SEQ ID NO 13598601 as cited in SEQ ID NO 69129

SEQ ID NO: 14082 - protein, 284 aa, Zea mays subsp. mays; identical to SEQ ID NO: 9853
  peptide (1)..(284): Ceres Seq. ID no. 13504059

SEQ ID NO: 14083 - protein, 237 aa, Zea mays subsp. mays; identical to SEQ ID NO: 9854
  peptide (1)..(237): Ceres Seq. ID no. 13504060

SEQ ID NO: 14084 - protein, 196 aa, Zea mays subsp. mays; identical to SEQ ID NO: 9855
  peptide (1)..(196): Ceres Seq. ID no. 13504061

SEQ ID NO: 14085 - DNA, 744 bp, Zea mays subsp. mays
  misc_feature (1)..(744): Ceres Seq. ID no. 12435845
  misc_feature (1)..(744): Ortholog of  Ceres SEQ ID NO 13594852 as cited in SEQ ID NO 51956
  misc_feature (1)..(744): Ortholog of  Ceres SEQ ID NO 14302093 as cited in SEQ ID NO 63594
cataccatccctcgaccggccacctctccccaattgcatcgcatccccaggacttgcgcccggtccagagacggcgataatgggggcttctgaggtgtggtcatcggtgccggcctggctggcgatcgccgtcggcttggcggccgtggtttcctcgtcggaggctcacgtcttctacgccggtggccgcgacggctgggtccttgaccccaccgagagctacaaccattgggccgggcgcagccggttccaagtgaacgacaccatcgtgttcacgcacgaggagggcgtcgactcggtgctgctggtgacggagcaggacttcgacacgtgcaacacgcgcaacccggtccggcggctccaggccgtcggcagcagcggcagttcggagcgttcggtgttcaagctcgaccggtccggcccgttcttcttcatcagcagcgacgaggaacggtgccaaaagggccagaagctgtacgtaatcgtgatggcggttcgccggtcgacgacgccggcggcaccggcaccggcacccgacgcggcgttcccgccggcgccttcaccggtacccgattcggcgttcccgccggcgccttcaccggtgtgggcctcggcgcccgacaacgcgcacgctccaccaccgacggcgggtgcgtcacgtctggacgacggagcgatcatcggctctgtgcttggggttataggagctttggtgctctgtaccgtgtactaatcagaaatcag

SEQ ID NO: 14086 - protein, 243 aa, Zea mays subsp. mays
  peptide (1)..(243): Ceres Seq. ID no. 12435846
IPSLDRPPLPNCIASPGLAPGPETAIMGASEVWSSVPAWLAIAVGLAAVVSSSEAHVFYAGGRDGWVLDPTESYNHWAGRSRFQVNDTIVFTHEEGVDSVLLVTEQDFDTCNTRNPVRRLQAVGSSGSSERSVFKLDRSGPFFFISSDEERCQKGQKLYVIVMAVRRSTTPAAPAPAPDAAFPPAPSPVPDSAFPPAPSPVWASAPDNAHAPPPTAGASRLDDGAIIGSVLGVIGALVLCTVY

SEQ ID NO: 14087 - protein, 217 aa, Zea mays subsp. mays
  peptide (1)..(217): Ceres Seq. ID no. 12435847
MGASEVWSSVPAWLAIAVGLAAVVSSSEAHVFYAGGRDGWVLDPTESYNHWAGRSRFQVNDTIVFTHEEGVDSVLLVTEQDFDTCNTRNPVRRLQAVGSSGSSERSVFKLDRSGPFFFISSDEERCQKGQKLYVIVMAVRRSTTPAAPAPAPDAAFPPAPSPVPDSAFPPAPSPVWASAPDNAHAPPPTAGASRLDDGAIIGSVLGVIGALVLCTVY

SEQ ID NO: 14088 - DNA, 1515 bp, Zea mays subsp. mays; identical to SEQ ID NO: 7352
  misc_feature (1)..(1515): Ceres Seq. ID no. 13498565
  misc_feature (1)..(1515): Ortholog of  Ceres SEQ ID NO 13598741 as cited in SEQ ID NO 62749
  misc_feature (1)..(1515): Ortholog of  Ceres SEQ ID NO 12587535 as cited in SEQ ID NO 64020
  misc_feature (1)..(1515): Ortholog of  Ceres SEQ ID NO 15176854 as cited in SEQ ID NO 64525
  misc_feature (1)..(1515): Ortholog of  Ceres SEQ ID NO 12586366 as cited in SEQ ID NO 68983
  misc_feature (1)..(1515): Ortholog of  Ceres SEQ ID NO 15178891 as cited in SEQ ID NO 0

SEQ ID NO: 14089 - protein, 390 aa, Zea mays subsp. mays; identical to SEQ ID NO: 7353
  peptide (1)..(390): Ceres Seq. ID no. 13498566

SEQ ID NO: 14090 - protein, 384 aa, Zea mays subsp. mays; identical to SEQ ID NO: 7354
  peptide (1)..(384): Ceres Seq. ID no. 13498567

SEQ ID NO: 14091 - protein, 366 aa, Zea mays subsp. mays; identical to SEQ ID NO: 7355
  peptide (1)..(366): Ceres Seq. ID no. 13498568

SEQ ID NO: 14092 - DNA, 1593 bp, Zea mays subsp. mays
  misc_feature (1)..(1593): Ceres Seq. ID no. 12435837
  misc_feature (1)..(1593): Ortholog of  Ceres SEQ ID NO 14310904 as cited in SEQ ID NO 53831
  misc_feature (1)..(1593): Ortholog of  Ceres SEQ ID NO 12616772 as cited in SEQ ID NO 64057
atttccgtccatttcccaggttctaaccggttcctcaaaccctaaaacctccaaaccccagcaatggcggattccccttcgttccgtcgctacccgctcgcctcctccgtcgacctcgtccgctggctcccttcctcctccatctccccttccggtcgcctcctcgccgccgccgtccacgatcccacctccggctccttcgcctccagcatccgccttctccccctctccgaccctgtctcccggctcgcctccgtcccgctcccgtcccgcgccacggcactccgctgctcccatgctgcgctcgccgctgccacctcctcgggctcgctccacttcgttccctcctcattcgactcggacgccgcagtgtccgtccccggcggcgcgggcttccatgtcggtcctgtccggggcctcgactgcggcggggaggagtgggtcacagcgggagaagacggaagagtgcatgtggtcggcggtgtagctgacgggagagtggtaacgaggaggatgtgggacgggaaaggaatgtcagggtatgaagctgccagatgggcttcgccggtggagtttgccacgggtggagccggatgtggtgttcagtggtgggatcggaggaaaggggacgccatcgtggcgcagtgtaacggcatctggggccgtggcatagttactggcatggtgcattccattgacattcatccatcaagaaagcatatctgcgtggtgggaggttcatcggggaccgtatttgcctgggatctgcggcagccacaggagctgataccaatctctgttctaggtcttaatgaaacagctgagcctgtgtgtgaaagtgaggtttgggaggttcttttcgacacttacactaagtcttccgatatcatctcatctgcatctgcaagaatattgccagtgatgatgtgttcagaggatgggatccttgcagttgtcgaacaagataagagaccccttgaattgcttgctgaatcttgtgccatcaactccttcgacatagatcctcagaacccctctgtaagtccttggcttcacctggtcaaatgaacagtttttcttatttgtagataatgttactactgttatcgatttgtgcaggatgttgtttgcgcattagaatgggaatcggtcggtgtcctaactcgtggtagagatgcaatgtcagaagaatgaaaattttcatcacccagggatctcaatcagatttttttccaaggtggatgaaactgctatcagaaagaatcttctgaattctgagggcttccatattcagtcaccattctaatgcccgtgaccatgggcaacggtagaaggaataaagcgtgcatgacgaatgccttttcctgtctttgcatactaaccaacactgtcttgtaccgttggaagttttactctgttgtcatgggtagttgcagattgcagaaaccttttctgggctagcttcaagatgtgtaattgctcttggatgccaactgctgacagtttgaaggagtggtcacaaacaattcaatccttttagctgggggctgatgaactgaagctataattagtttcataatgtttgcttgtggt

SEQ ID NO: 14093 - protein, 334 aa, Zea mays subsp. mays
  peptide (1)..(334): Ceres Seq. ID no. 12435838
MADSPSFRRYPLASSVDLVRWLPSSSISPSGRLLAAAVHDPTSGSFASSIRLLPLSDPVSRLASVPLPSRATALRCSHAALAAATSSGSLHFVPSSFDSDAAVSVPGGAGFHVGPVRGLDCGGEEWVTAGEDGRVHVVGGVADGRVVTRRMWDGKGMSGYEAARWASPVEFATGGAGCGVQWWDRRKGDAIVAQCNGIWGRGIVTGMVHSIDIHPSRKHICVVGGSSGTVFAWDLRQPQELIPISVLGLNETAEPVCESEVWEVLFDTYTKSSDIISSASARILPVMMCSEDGILAVVEQDKRPLELLAESCAINSFDIDPQNPSVSPWLHLVK

SEQ ID NO: 14094 - protein, 184 aa, Zea mays subsp. mays
  peptide (1)..(184): Ceres Seq. ID no. 12435839
MWDGKGMSGYEAARWASPVEFATGGAGCGVQWWDRRKGDAIVAQCNGIWGRGIVTGMVHSIDIHPSRKHICVVGGSSGTVFAWDLRQPQELIPISVLGLNETAEPVCESEVWEVLFDTYTKSSDIISSASARILPVMMCSEDGILAVVEQDKRPLELLAESCAINSFDIDPQNPSVSPWLHLVK

SEQ ID NO: 14095 - protein, 178 aa, Zea mays subsp. mays
  peptide (1)..(178): Ceres Seq. ID no. 12435840
MSGYEAARWASPVEFATGGAGCGVQWWDRRKGDAIVAQCNGIWGRGIVTGMVHSIDIHPSRKHICVVGGSSGTVFAWDLRQPQELIPISVLGLNETAEPVCESEVWEVLFDTYTKSSDIISSASARILPVMMCSEDGILAVVEQDKRPLELLAESCAINSFDIDPQNPSVSPWLHLVK

SEQ ID NO: 14096 - DNA, 1445 bp, Zea mays subsp. mays
  misc_feature (1)..(1445): Ceres Seq. ID no. 15178640
  misc_feature (1)..(1445): Ortholog of  Ceres SEQ ID NO 14308120 as cited in SEQ ID NO 58423
  misc_feature (1)..(1445): Ortholog of  Ceres SEQ ID NO 15177787 as cited in SEQ ID NO 59431
  misc_feature (1)..(1445): Ortholog of  Ceres SEQ ID NO 12617197 as cited in SEQ ID NO 63406
  misc_feature (1)..(1445): Ortholog of  Ceres SEQ ID NO 13597804 as cited in SEQ ID NO 64182
  misc_feature (1)..(1445): Ortholog of  Ceres SEQ ID NO 15179788 as cited in SEQ ID NO 64818
  misc_feature (1)..(1445): Ortholog of  Ceres SEQ ID NO 14302768 as cited in SEQ ID NO 64889
  misc_feature (1)..(1445): Ortholog of  Ceres SEQ ID NO 14301622 as cited in SEQ ID NO 65156
  misc_feature (1)..(1445): Ortholog of  Ceres SEQ ID NO 13598565 as cited in SEQ ID NO 65250
  misc_feature (1)..(1445): Ortholog of  Ceres SEQ ID NO 13598597 as cited in SEQ ID NO 65496
  misc_feature (1)..(1445): Ortholog of  Ceres SEQ ID NO 13596284 as cited in SEQ ID NO 68273
agagcagcagctaaagaagcaaagcaagtgtctgctcactcagtcctgcgcaagagctcgctctcggagaaaaaaacgcgggaggcgataatggagggaggtgccggtgcgagcgagaaagggaaggtgctggtcacgggggcgtcgggcttcgtcggctcctggctcgtcatgaagctcctccaggccggctacaccgtccgggcgaccgtgcgcgatcccgcgaacgttgggaagacgaagccattgatggaccttcccggagcaacggagcgcctgtccatatggaaagccgacctggcggaggaaggcagcttccacgacgccatcaggggctgcaccggcgtcttccacgtcgccacgcccatggacttcctgtccaaagaccctgagaatgaggtaatcaagccgacggtggaagggatgataagcatcatgcgggcatgcaaggaggccggcaccgtgcggcgcatcgtcttcacttcctccgccgggacggtcaacctggaggagcggcagaggcccgtctacgacgaggaaagctggaccgacgtcgacttctgccgtcgcgtcaagatgaccggatggatgtacttcgtgtctaaaaccctggcggagaaggcggccctggcgtacgcggcggagcacggcctggacctggtcaccatcatcccgacgctcgtggtcggcccgttcatcagcgcgtccatgccgcccagcctcatcaccgcgctggcgctcatcacggggaacgcgccccactactcgatcctcaagcaggtgcagctcatccacctcgacgacctctgcgacgccgagatcttcctcttcgagaacccggccgcggccgggcgctacgtctgctcctcgcacgacgtcaccatccacggcctcgccgccatgctcagggataggtaccccgagtacgacgtcccgcagaggttccccgggatccaggacgacctccagccggtgcgcttctcgtccaagaagctccaggacctcgggttcaccttcaggtacaagacgctggaggacatgttcgacgccgccatccggacttgccaggagaagggcctcatccccctcgccactgccgccggaggggacggctttgcctcggtgcgcgcacccggcgagacggaggcgacgattggcgcttaagcaacaatcacccggctctccccgtcgatgatgctatcagctatctatctcttcgactccgctgccaatacggaacttatttccatgttcaacgaattgttttatcccctggattacgtattgtttttatgttttatacccaaacaacgaatgtttctcagtattttactacagctagcccctatagtagagattctattatatgaataagctatctgtagaggctctggtgcaatatatatttcgagttatttggattactagcaaaaaaaaaaaaaaaa

SEQ ID NO: 14097 - protein, 387 aa, Zea mays subsp. mays
  peptide (1)..(387): Ceres Seq. ID no. 15178641
RAAAKEAKQVSAHSVLRKSSLSEKKTREAIMEGGAGASEKGKVLVTGASGFVGSWLVMKLLQAGYTVRATVRDPANVGKTKPLMDLPGATERLSIWKADLAEEGSFHDAIRGCTGVFHVATPMDFLSKDPENEVIKPTVEGMISIMRACKEAGTVRRIVFTSSAGTVNLEERQRPVYDEESWTDVDFCRRVKMTGWMYFVSKTLAEKAALAYAAEHGLDLVTIIPTLVVGPFISASMPPSLITALALITGNAPHYSILKQVQLIHLDDLCDAEIFLFENPAAAGRYVCSSHDVTIHGLAAMLRDRYPEYDVPQRFPGIQDDLQPVRFSSKKLQDLGFTFRYKTLEDMFDAAIRTCQEKGLIPLATAAGGDGFASVRAPGETEATIGA

SEQ ID NO: 14098 - protein, 357 aa, Zea mays subsp. mays
  peptide (1)..(357): Ceres Seq. ID no. 15178642
MEGGAGASEKGKVLVTGASGFVGSWLVMKLLQAGYTVRATVRDPANVGKTKPLMDLPGATERLSIWKADLAEEGSFHDAIRGCTGVFHVATPMDFLSKDPENEVIKPTVEGMISIMRACKEAGTVRRIVFTSSAGTVNLEERQRPVYDEESWTDVDFCRRVKMTGWMYFVSKTLAEKAALAYAAEHGLDLVTIIPTLVVGPFISASMPPSLITALALITGNAPHYSILKQVQLIHLDDLCDAEIFLFENPAAAGRYVCSSHDVTIHGLAAMLRDRYPEYDVPQRFPGIQDDLQPVRFSSKKLQDLGFTFRYKTLEDMFDAAIRTCQEKGLIPLATAAGGDGFASVRAPGETEATIGA

SEQ ID NO: 14099 - protein, 330 aa, Zea mays subsp. mays
  peptide (1)..(330): Ceres Seq. ID no. 15178643
MKLLQAGYTVRATVRDPANVGKTKPLMDLPGATERLSIWKADLAEEGSFHDAIRGCTGVFHVATPMDFLSKDPENEVIKPTVEGMISIMRACKEAGTVRRIVFTSSAGTVNLEERQRPVYDEESWTDVDFCRRVKMTGWMYFVSKTLAEKAALAYAAEHGLDLVTIIPTLVVGPFISASMPPSLITALALITGNAPHYSILKQVQLIHLDDLCDAEIFLFENPAAAGRYVCSSHDVTIHGLAAMLRDRYPEYDVPQRFPGIQDDLQPVRFSSKKLQDLGFTFRYKTLEDMFDAAIRTCQEKGLIPLATAAGGDGFASVRAPGETEATIGA

SEQ ID NO: 14100 - DNA, 1359 bp, Zea mays subsp. mays; identical to SEQ ID NO: 6407
  misc_feature (1)..(1359): Ceres Seq. ID no. 12408140
  misc_feature (1)..(1359): Ortholog of  Ceres SEQ ID NO 13594549 as cited in SEQ ID NO 51707
  misc_feature (1)..(1359): Ortholog of  Ceres SEQ ID NO 13595294 as cited in SEQ ID NO 55998
  misc_feature (1)..(1359): Ortholog of  Ceres SEQ ID NO 14302012 as cited in SEQ ID NO 56618
  misc_feature (1)..(1359): Ortholog of  Ceres SEQ ID NO 12598102 as cited in SEQ ID NO 61029
  misc_feature (1)..(1359): Ortholog of  Ceres SEQ ID NO 12625361 as cited in SEQ ID NO 62928
  misc_feature (1)..(1359): Ortholog of  Ceres SEQ ID NO 13599424 as cited in SEQ ID NO 0

SEQ ID NO: 14101 - protein, 246 aa, Zea mays subsp. mays; identical to SEQ ID NO: 6408
  peptide (1)..(246): Ceres Seq. ID no. 12408141

SEQ ID NO: 14102 - DNA, 1540 bp, Zea mays subsp. mays
  misc_feature (1)..(1540): Ceres Seq. ID no. 12435829
  misc_feature (1)..(1540): Ortholog of  Ceres SEQ ID NO 13596244 as cited in SEQ ID NO 69307
ggggacctcttctcatcgtcatctccgccgacggaagctgcgtgcgctcgtcgtctttatgctgttccatccaggcttcagttcacaaataaccgccgcactgctggctgctgttaccagcttccttgacgatcgaccagtccaaagctttcgtcatctctttgatcccacgcggcctcacccggctccggctccggctcagcaatcaattccccatacgaattactaatctctctgatttcctttcagctcatcggcatgccgcaggcagcagcagcagcagcagcagcagccgtgcacggcaaggaccccagcaccgtccgtccggccgcgctgcccctgaagctcctccgccctctcctcctcgtggcggtgctcggcacgggcttcctcgccgccgtggccctgctcgtcggcggccccgcctactcgtccgcgctcccgcgcccgccggtcgccctgccgcccgcgccgccgtcgggcggcgggaagcagcagccgctggagcggtgggcgcgggcgccggcgtcccgcgtggcacaacatgaccgacgacgagctgctgtgggcggcgtcgtggcgccccagcgtccggcgctacccgtaccgccggacgcccaaggtggccttcatgttcctgacccgcggcccgctgccgctggcgccgctgtgggagcgcttcttcgccggcgccgggggcggggacgccggcctcttctccgtctacgtgcacgccacgccggggtaccgccccgacttcgcgccggcgtccgccttctaccgccgccaagtgcccagccaggtggccgagtggggcgagccgagcatgttcgacgcggagcggcggctgctggcgaacgcgctgctggacccgggcaacgagcgcttcgtgctgctgtccgagtcgtgcgtgccgctgtacggcttcccggcggtgtacagctacctgacgcggtcgcgggagagcttcgtgggcgcgttcgacgacccgggcccgggaggccggggccggtaccagggcgggctggccccggaggtggtccgcgagcagttccgcaagggcgcagtggttcgagctggaccgcgccctcgccgtcgacgttgtcgccgacggccgctactaccccaagttccgggagcactgccggccgccgtgctacgcggacgagcactacctgccgacggcgctctccatcctggcccccgcgcggatcgccaaccgcagcgtcacgtgggtggactggtcccgcggcggcgcgcacccggccacgttcggggaggccgacgtcggcgaggcgttcctcaggcggctcacggcgcccgggaagggccagggcaactgcacctacaacggccagccggcgcaggtgtgcttcctgttcgcaaggaagctggcgcccggcacgctgcagccgctgctcaggctcgccccgaagctgctcggatacggctgactgtcactgtcactctgactgctcacctctgaatctgaatctgaatcttctccaaagtgacacaaagacacctctgaatctgattt

SEQ ID NO: 14103 - protein, 427 aa, Zea mays subsp. mays
  peptide (1)..(427): Ceres Seq. ID no. 12435830
MPQAAAAAAAAAVHGKDPSTVRPAALPLKLLRPLLLVAVLGTGFLAAVALLVGGPAYSSALPRPPVALPPAPPSGGGKQQPLERWARAPASRVAQHDRRRAAVGGVVAPQRPALPVPPDAQGGLHVPDPRPAAAGAAVGALLRRRRGRGRRPLLRLRARHAGVPPRLRAGVRLLPPPSAQPGGRVGRAEHVRRGAAAAGERAAGPGQRALRAAVRVVRAAVRLPGGVQLPDAVAGELRGRVRRPGPGRPGPVPGRAGPGGGPRAVPQGRSGSSWTAPSPSTLSPTAATTPSSGSTAGRRATRTSTTCRRRSPSWPPRGSPTAASRGWTGPAAARTRPRSGRPTSARRSSGGSRRPGRARATAPTTASRRRCASCSQGSWRPARCSRCSGSPRSCSDTADCHCHSDCSPLNLNLNLLQSDTKTPLNLI

SEQ ID NO: 14104 - protein, 313 aa, Zea mays subsp. mays
  peptide (1)..(313): Ceres Seq. ID no. 12435831
MTDDELLWAASWRPSVRRYPYRRTPKVAFMFLTRGPLPLAPLWERFFAGAGGGDAGLFSVYVHATPGYRPDFAPASAFYRRQVPSQVAEWGEPSMFDAERRLLANALLDPGNERFVLLSESCVPLYGFPAVYSYLTRSRESFVGAFDDPGPGGRGRYQGGLAPEVVREQFRKGAVVRAGPRPRRRRCRRRPLLPQVPGALPAAVLRGRALPADGALHPGPRADRQPQRHVGGLVPRRRAPGHVRGGRRRRGVPQAAHGAREGPGQLHLQRPAGAGVLPVRKEAGARHAAAAAQARPEAARIRLTVTVTLTAHL

SEQ ID NO: 14105 - protein, 284 aa, Zea mays subsp. mays
  peptide (1)..(284): Ceres Seq. ID no. 12435832
MFLTRGPLPLAPLWERFFAGAGGGDAGLFSVYVHATPGYRPDFAPASAFYRRQVPSQVAEWGEPSMFDAERRLLANALLDPGNERFVLLSESCVPLYGFPAVYSYLTRSRESFVGAFDDPGPGGRGRYQGGLAPEVVREQFRKGAVVRAGPRPRRRRCRRRPLLPQVPGALPAAVLRGRALPADGALHPGPRADRQPQRHVGGLVPRRRAPGHVRGGRRRRGVPQAAHGAREGPGQLHLQRPAGAGVLPVRKEAGARHAAAAAQARPEAARIRLTVTVTLTAHL

SEQ ID NO: 14106 - DNA, 1002 bp, Zea mays subsp. mays
  misc_feature (1)..(1002): Ceres Seq. ID no. 12454907
  misc_feature (1)..(1002): Ortholog of  Ceres SEQ ID NO 14309076 as cited in SEQ ID NO 0
atccgtccgtccatccaatgcgatggtgtcgttggcgcgccggccgctctccgccgccgtacctgcgggcaacctcctcggcatccatctcttccggtgccccgacgccgttggcatcgtcgccaagctctcggaatgcatcgcctcccgcggtggcaacatccacagcgtcgacgtcttcgtccccgacgacaaacccgtcttctactcccgcagtgagtttacctacaatccaaggctctggtctcgtcatgagctccacaaggatttcctcaatctctcccgctgcttcaatgcgcaaacctccaccgtacgagttcccgatcttgaccccaaatacaacatctccatcctcgcatcaaagcaggaccactgcttgttcgatttgctctatagatggcaagaaggcaggcttccagtacacatcaattgtgtcattagcaaccatgatagaccacaagataatcatgtacggcgttttctccagaggcatggaatcccataccactacttacccaccgcacctgccaacaaaagagagaaagagatcttggaattgatccagggtacagattttgttgtgctggcaagatacatgcagatactctcagaaaacttgttaaaagcatatggtaaagacattatcaatattcatcatggccttcttccctcatttaagggagggaatccttcaagacaggccttcagtgctggggtgaagttaatcggggcaactagccatttcgttactccagaacttgatgctgggccaatcattgaacagatggttgaacgagtctctcaccgagacacgttacagagttttgttgtcaagtctgagaaccttgagaagcagtgcttagcagaggctatcaagtcatattgcgagcttcgtgtcctaccatatgaactcaggaagactgtcgtgttctgatctgagctccctttattttctgtcttattgtacttttatatggattgataaaatgaatttttttagct

SEQ ID NO: 14107 - protein, 310 aa, Zea mays subsp. mays
  peptide (1)..(310): Ceres Seq. ID no. 12454908
SVRPSNAMVSLARRPLSAAVPAGNLLGIHLFRCPDAVGIVAKLSECIASRGGNIHSVDVFVPDDKPVFYSRSEFTYNPRLWSRHELHKDFLNLSRCFNAQTSTVRVPDLDPKYNISILASKQDHCLFDLLYRWQEGRLPVHINCVISNHDRPQDNHVRRFLQRHGIPYHYLPTAPANKREKEILELIQGTDFVVLARYMQILSENLLKAYGKDIINIHHGLLPSFKGGNPSRQAFSAGVKLIGATSHFVTPELDAGPIIEQMVERVSHRDTLQSFVVKSENLEKQCLAEAIKSYCELRVLPYELRKTVVF

SEQ ID NO: 14108 - protein, 303 aa, Zea mays subsp. mays
  peptide (1)..(303): Ceres Seq. ID no. 12454909
MVSLARRPLSAAVPAGNLLGIHLFRCPDAVGIVAKLSECIASRGGNIHSVDVFVPDDKPVFYSRSEFTYNPRLWSRHELHKDFLNLSRCFNAQTSTVRVPDLDPKYNISILASKQDHCLFDLLYRWQEGRLPVHINCVISNHDRPQDNHVRRFLQRHGIPYHYLPTAPANKREKEILELIQGTDFVVLARYMQILSENLLKAYGKDIINIHHGLLPSFKGGNPSRQAFSAGVKLIGATSHFVTPELDAGPIIEQMVERVSHRDTLQSFVVKSENLEKQCLAEAIKSYCELRVLPYELRKTVVF

SEQ ID NO: 14109 - protein, 185 aa, Zea mays subsp. mays
  peptide (1)..(185): Ceres Seq. ID no. 12454910
PSVHPMRWCRWRAGRSPPPYLRATSSASISSGAPTPLASSPSSRNASPPAVATSTASTSSSPTTNPSSTPAVSLPTIQGSGLVMSSTRISSISPAASMRKPPPYEFPILTPNTTSPSSHQSRTTACSICSIDGKKAGFQYTSIVSLATMIDHKIIMYGVFSRGMESHTTTYPPHLPTKERKRSWN

SEQ ID NO: 14110 - DNA, 2394 bp, Zea mays subsp. mays
  misc_feature (1)..(2394): Ceres Seq. ID no. 12567160
  misc_feature (1)..(2394): Ortholog of  Ceres SEQ ID NO 14313674 as cited in SEQ ID NO 59602
accacatcccacgccgagcgcgacgccagcagcaggctagctccgctgtccgctccgccgctcactagctagctgctggactgcgcctccctccatcgcgccggcgcgcgcgcctagctagcggagccgccttttcatggtccccgccgtggtcgggacgagatgcctcgcctcgcattcctccgccgctccctccccgcgaggcttctcgcgcgagcgtgtggtggtggtggtggagtccgggggagccctggccaggtggcgcgggacgaggaggccggaggcagcggcggaatgagcgggcggtcgtcggcgggtgggccgtccggcggggagtgctacgcgtgcacgcagcccggggtgccggcgttccactccacgacgtgcgaccaggtgcactcgccggactgggacgccgacgcggggtcctcgctcgtgccggtccaagggccaggcgcaggcggcggcggcgccgcggcancggcacgcggcgcggtggctgttggggcccgtgctggacccgcggagcaggcgcgtgcagcgctggaaccgctggatcctgctgggccgcgccgccgcgctggcggtggacccgctcttnttctacgcgctctccatcggccgcgccggccagccctgcctctacatggacgccgggctcgcctccgcggtcacggcgctgcggacctgcgccgacgtggcgcacctcgcgcacgtgctcctgcagctccgcctcgcctacgtctcccgcgagtccctcgtcgtcgggtgcggcaagctcgtgtgggacgcccgcgccgtcgccgcgcactacgcacgctccgtcaagggcctctgcttcgacctcttcgtcatcctccccatcccgcaggttatcttctggctggttataccaaagttaatcagggaggagcaggttaagcttatcatgacaatactgctgctcatgttcatagttcaatttctccccaaggtctaccatagtatacacatcatgaggaaaatgcagaagattgcgggtgggtgctggtatgttcttgcgatccagcgcatcgcttcctgcctccaggaagaatgcaagagaaacaacagttgcgatctaatatcgctagcttgttccaaggagatatgttttcaccctccgtggtcatcgaatgttaacggattcgcgtgcgatacgaacatgacctcctttagccaacaaaatgtgtctacttgcttgagtggaaaaggttccttcgcttatggaatctatttgggggctcttcctgttatatcgagcaattcgcttgctgtcaaaatactgtatcctatattttggggcctcatgacactcagtacttttggtaacgatcttgccccaacaagcaatggtattgaggtgatattcagcataatcaatgtcctcagtggccttatgctcttcacgttgctgatcggaaacatacaggtatttctgcacgcggtcctggcaaggaagcggaagatgcagctgcggttccgggnacatggaatggtggannaggcggaggcanctgccgtcccggctgaggcaaagggtgcgcaaatacnagcgcgaacgctgggccgccgtcncgggagacgaggagatggagatgatcaaggatctgcctgaagggctgagangggacatcaagcgctacctgtgccntgagctagttaagcaggttccnctgttccatggcatggacnacctgatcctggacaacatctgngaccggctgcggcctctggtgttgtccagcggggagaaggtgatccggnagggcgaccccgtgcagcgcatggtgttcatcctgcagggcaagctccggagcacgcagccgctgaccaaaggcgtggtggcgangtgcatgctgggcgcgggcagcttcctgggcgncgagctgctgtcgtggtgcctgcgccgccgccttcttggaccggctccccgcgtcgtcggccacgttcnagtgcgtggaccccgcgcaggcgttctgcctcggcgcgccggacctgcggttcatcaccgagcacttccggtacaacttcgccaacgagaagctcaagcgcacggcgcggtactactcgtccaactggcggacgtgggccgccgtcaacatccagctcgcgtggcgcaggtacagggcccggacgtcggcggacctggcggcgcaggccgcgcctccgttggtgggcgggcccgacgacggggaccggcggctcagacactacgcggccatgttcatgtcgctacggccgcatgaccacctagagtgagcaggagggaccatcctagctgtgccggccgcgtcatggtgactgtacagtgtgcactgtaatagtatattgctgccatcttttgcgtaagtgaattagtggttccgaattgtc

SEQ ID NO: 14111 - protein, 329 aa, Zea mays subsp. mays
  peptide (1)..(329): Ceres Seq. ID no. 12567161
  misc_feature (287)..(287): Xaa is any aa, unknown or other
  misc_feature (292)..(292): Xaa is any aa, unknown or other
  misc_feature (293)..(293): Xaa is any aa, unknown or other
  misc_feature (297)..(297): Xaa is any aa, unknown or other
  misc_feature (309)..(309): Xaa is any aa, unknown or other
  misc_feature (317)..(317): Xaa is any aa, unknown or other
MDAGLASAVTALRTCADVAHLAHVLLQLRLAYVSRESLVVGCGKLVWDARAVAAHYARSVKGLCFDLFVILPIPQVIFWLVIPKLIREEQVKLIMTILLLMFIVQFLPKVYHSIHIMRKMQKIAGGCWYVLAIQRIASCLQEECKRNNSCDLISLACSKEICFHPPWSSNVNGFACDTNMTSFSQQNVSTCLSGKGSFAYGIYLGALPVISSNSLAVKILYPIFWGLMTLSTFGNDLAPTSNGIEVIFSIINVLSGLMLFTLLIGNIQVFLHAVLARKRKMQLRFRXHGMVXXAEAXAVPAEAKGAQIXARTLGRRXGRRGDGDDQGSA

SEQ ID NO: 14112 - protein, 252 aa, Zea mays subsp. mays
  peptide (1)..(252): Ceres Seq. ID no. 12567162
  misc_feature (107)..(107): Xaa is any aa, unknown or other
  misc_feature (147)..(147): Xaa is any aa, unknown or other
MPRLAFLRRSLPARLLARACGGGGGVRGSPGQVARDEEAGGSGGMSGRSSAGGPSGGECYACTQPGVPAFHSTTCDQVHSPDWDADAGSSLVPVQGPGAGGGGAAAXARGAVAVGARAGPAEQARAALEPLDPAGPRRRAGGGPALXLRALHRPRRPALPLHGRRARLRGHGAADLRRRGAPRARAPAAPPRLRLPRVPRRRVRQARVGRPRRRRALRTLRQGPLLRPLRHPPHPAGYLLAGYTKVNQGGAG

SEQ ID NO: 14113 - protein, 252 aa, Zea mays subsp. mays
  peptide (1)..(252): Ceres Seq. ID no. 12567163
  misc_feature (5)..(5): Xaa is any aa, unknown or other
  misc_feature (9)..(9): Xaa is any aa, unknown or other
  misc_feature (22)..(22): Xaa is any aa, unknown or other
  misc_feature (30)..(30): Xaa is any aa, unknown or other
  misc_feature (47)..(47): Xaa is any aa, unknown or other
  misc_feature (55)..(55): Xaa is any aa, unknown or other
  misc_feature (62)..(62): Xaa is any aa, unknown or other
  misc_feature (69)..(69): Xaa is any aa, unknown or other
  misc_feature (76)..(76): Xaa is any aa, unknown or other
  misc_feature (93)..(93): Xaa is any aa, unknown or other
  misc_feature (121)..(121): Xaa is any aa, unknown or other
  misc_feature (132)..(132): Xaa is any aa, unknown or other
  misc_feature (155)..(155): Xaa is any aa, unknown or other
MEWWXRRRXLPSRLRQRVRKYXRERWAAVXGDEEMEMIKDLPEGLRXDIKRYLCXELVKQVXLFHGMDXLILDNIXDRLRPLVLSSGEKVIRXGDPVQRMVFILQGKLRSTQPLTKGVVAXCMLGAGSFLGXELLSWCLRRRLLGPAPRVVGHVXVRGPRAGVLPRRAGPAVHHRALPVQLRQREAQAHGAVLLVQLADVGRRQHPARVAQVQGPDVGGPGGAGRASVGGRARRRGPAAQTLRGHVHVATAA

SEQ ID NO: 14114 - DNA, 1071 bp, Zea mays subsp. mays
  misc_feature (1)..(1071): Ceres Seq. ID no. 12435826
  misc_feature (1)..(1071): Ortholog of  Ceres SEQ ID NO 14305649 as cited in SEQ ID NO 52548
attaacaaaacgcctcccgaagcagacagcctcactccgcgcgcccgcgcagcgaagcagggagcatggagctgaggccgccgcgcctgcgaccgtgagcacgctctgtagccagccgggtccggctgggcggccatggcagccaccgttctcttcactccggcgcagtgccaccgcgccaccgcgacgacgagcgggcgaggagccccctcgcattgcgccctggcccctgggcaccggcgcccggggcggggatcggtgagggcggtgcctcccgagcagagcagcttgcctcaggcggcggctgctgtctacgggactgctggcgacgtcaaggccgcgctgtaccgagcgctggacggcgccaacagggggatattcgggatgacgtccgccaagcgctcggagatccatggcctggtggagctgctcgagtccaggaaccccacgccggagcccaccgccaagctgcaggacaaggtggatggatgctggaaactcatctacagcacgatctccatactggggaagaagagaaccaagttagggctgcgagatttcatcagcctaggggacttcctccagataattgacgtcaaacaggaaaaggcggtgaatgtggtagagttcagcgcgagagcactgaagatactgacggggaagctcaccatcgaggcttcgtacagagttaccagccaaacaagagtggatatcaagctcgagagctcaaccatcacccctgagcagctgatgaacatatttcagaagaactacgacatgctcctggaaatattcaatccagagggctggctggagataacatatgttgatgaatctctacggattggacgagatgacaaagaaaacatattcgtgctggagagagcagacctgccagacgtccgatgacgcgcagttcatgcgcacaggcggtccgtaattttgtgacgaggagcgagtgtaacacgcagaaaacatagcctctgcaaatatataaatatggtatatccgacagctaggactcttgcatggttattggcagttcgatgcagacaatctactacttgaagt

SEQ ID NO: 14115 - protein, 257 aa, Zea mays subsp. mays
  peptide (1)..(257): Ceres Seq. ID no. 12435827
MAATVLFTPAQCHRATATTSGRGAPSHCALAPGHRRPGRGSVRAVPPEQSSLPQAAAAVYGTAGDVKAALYRALDGANRGIFGMTSAKRSEIHGLVELLESRNPTPEPTAKLQDKVDGCWKLIYSTISILGKKRTKLGLRDFISLGDFLQIIDVKQEKAVNVVEFSARALKILTGKLTIEASYRVTSQTRVDIKLESSTITPEQLMNIFQKNYDMLLEIFNPEGWLEITYVDESLRIGRDDKENIFVLERADLPDVR

SEQ ID NO: 14116 - protein, 174 aa, Zea mays subsp. mays
  peptide (1)..(174): Ceres Seq. ID no. 12435828
MTSAKRSEIHGLVELLESRNPTPEPTAKLQDKVDGCWKLIYSTISILGKKRTKLGLRDFISLGDFLQIIDVKQEKAVNVVEFSARALKILTGKLTIEASYRVTSQTRVDIKLESSTITPEQLMNIFQKNYDMLLEIFNPEGWLEITYVDESLRIGRDDKENIFVLERADLPDVR

SEQ ID NO: 14117 - DNA, 2450 bp, Zea mays subsp. mays
  misc_feature (1)..(2450): Ceres Seq. ID no. 12435822
  misc_feature (1)..(2450): Ortholog of  Ceres SEQ ID NO 15224874 as cited in SEQ ID NO 55015
atcacacatccaccgccgccgccaccaccaccacccgccctatacccgtatataattactcgtacccggacgccaccgccgcctgcgccatgggcgactcctcggtggccggcgcgctcgtgccgtccgtgcccaagccggagcccgcgccgtccggtgacacctccgcggcggccgcggcgactacagcggcgctggcgatgccggaggaggcgggtatgcgcgcggcgtcggcgtcgcctcaggggcctgcggaggagggggagggccccgccgatagggaccttctctgcccgatctgcatggccgtcatcaaggacgccttcctcaccgcatgcggccacagcttctgctacatgtgcatcgtcacgcatctcagcaacaagagcgactgcccctgctgcggccactaccttaccaaggcccagctctaccccaactttctccttgacaaggttctgaagaaaatatcagcccaacaaatagcaaaaacagcatcgccaatcgatcaatttcgatgtgcattgcaacagggaaatgaaatgggggttaaagagttggatagccttatgactttgattgctgagaagaagcggcaaatggaacaacaagaatcagagacaaatatgcaaatattgctagtcttcttacactgccttagaaagcaaaagctagaagagttgaatgagattcaaactgatctacaatacatcaaagaggatataagttctgtggagagacatagggcagaattatatcgcacaaaagaaaggtactccatgaagctgcgcatgcttttagatgagcctactgcacaaaaaatgtggccctcttctatagacaaagctagctgtcgctttcttcccaactctcggacaccacttagtggatcatgtccaggaactttacagaataagaagcttgatttgaaagctcaagtaagccatcaaggatttcaaaggagagatgctctaacttcttctgatcctcctaactcccctatacaatcgggtaatgttattgctaggaagaggcgagttcaagcacagttcaatgagcttcaagaatactacctgcaaagacgtcgtactggagcacaggcacgcagacaggaagaaagagatatagttgcaatgaatagagaaggctatcatgcaggtcttcaggatttccagtctgtgctaacaacgttcactcgatacagtcgtctacgtgtcattgcggaactaagacatggagacttgtttcactctgccaatattgtatccagtattgaatttgatcgtgatgatgaactatttgctaccgctggagtctcgaaacgtattaaagtcttcgaattttccactgttgttaatgaaccatcagatgtgcattgcccagttgttgaaatggctaccagatctaaacttagctgcctaagctggaacaagtactcaaaaaatattattgcaagcagtgactatgagggtatagtaactgtgtgggatgttcagacccgtcagagtgtgatggaatatgaagagcatgagaagagagcatggagtgttgatttttctcgcacagactcttcaatgctagtatctgggagtgatgattgcaaggtgaaagtgtggtgcacaaatcaagaagcaagtgtgatcaatattgatatgaaagcaaatatttgctcggttaaatataatcctggatcaagcttctacgttgcagtcggatctgctgatcaccatattcattactttgatttacgtaatccaagttcgcctgtccatattttcggggggcacaagaaagcagtatcgtatgtgaaattcttatctaacaatgagcttgcgtctgcgtcaacagatagcacattacgcttatgggatgtcaaggataactgcccggtacggacattcagagggcacaaaaatgaaaagaactttgttggcttgtctgtgaacaatgaatatattgcttgtggaagtgagacaaatgaggtttttgtttatcacaaggctatctcgaaaccggcagcaagccatagatttgtatcttctgacccggatgatgccgatgatgatcctggttcttatttcattagtgctgtctgctggaagagtgatagccctacgatgttgactgctaacagtcaggggaccataaaagttcttgtacttgctccttgatgtcatggagggcgttcaagaggttcacagtactgtccagttgtttcctttcgtgtcattatattcccccaaaattgggaacgggggcataattgatctccggttagggaatgaagttttgcagatggtcagctgacgtagggttttgaggtatcagaatgtgcatagtcatgtttatgttgtataggtgtaattgtgtaaagcagccaagttattggttacaagtgtaacacgagaaatacacattaatataaaaaaaacctccagctcgtttgtgct

SEQ ID NO: 14118 - protein, 722 aa, Zea mays subsp. mays
  peptide (1)..(722): Ceres Seq. ID no. 12435823
HTSTAAATTTTRPIPVYNYSYPDATAACAMGDSSVAGALVPSVPKPEPAPSGDTSAAAAATTAALAMPEEAGMRAASASPQGPAEEGEGPADRDLLCPICMAVIKDAFLTACGHSFCYMCIVTHLSNKSDCPCCGHYLTKAQLYPNFLLDKVLKKISAQQIAKTASPIDQFRCALQQGNEMGVKELDSLMTLIAEKKRQMEQQESETNMQILLVFLHCLRKQKLEELNEIQTDLQYIKEDISSVERHRAELYRTKERYSMKLRMLLDEPTAQKMWPSSIDKASCRFLPNSRTPLSGSCPGTLQNKKLDLKAQVSHQGFQRRDALTSSDPPNSPIQSGNVIARKRRVQAQFNELQEYYLQRRRTGAQARRQEERDIVAMNREGYHAGLQDFQSVLTTFTRYSRLRVIAELRHGDLFHSANIVSSIEFDRDDELFATAGVSKRIKVFEFSTVVNEPSDVHCPVVEMATRSKLSCLSWNKYSKNIIASSDYEGIVTVWDVQTRQSVMEYEEHEKRAWSVDFSRTDSSMLVSGSDDCKVKVWCTNQEASVINIDMKANICSVKYNPGSSFYVAVGSADHHIHYFDLRNPSSPVHIFGGHKKAVSYVKFLSNNELASASTDSTLRLWDVKDNCPVRTFRGHKNEKNFVGLSVNNEYIACGSETNEVFVYHKAISKPAASHRFVSSDPDDADDDPGSYFISAVCWKSDSPTMLTANSQGTIKVLVLAP

SEQ ID NO: 14119 - protein, 693 aa, Zea mays subsp. mays
  peptide (1)..(693): Ceres Seq. ID no. 12435824
MGDSSVAGALVPSVPKPEPAPSGDTSAAAAATTAALAMPEEAGMRAASASPQGPAEEGEGPADRDLLCPICMAVIKDAFLTACGHSFCYMCIVTHLSNKSDCPCCGHYLTKAQLYPNFLLDKVLKKISAQQIAKTASPIDQFRCALQQGNEMGVKELDSLMTLIAEKKRQMEQQESETNMQILLVFLHCLRKQKLEELNEIQTDLQYIKEDISSVERHRAELYRTKERYSMKLRMLLDEPTAQKMWPSSIDKASCRFLPNSRTPLSGSCPGTLQNKKLDLKAQVSHQGFQRRDALTSSDPPNSPIQSGNVIARKRRVQAQFNELQEYYLQRRRTGAQARRQEERDIVAMNREGYHAGLQDFQSVLTTFTRYSRLRVIAELRHGDLFHSANIVSSIEFDRDDELFATAGVSKRIKVFEFSTVVNEPSDVHCPVVEMATRSKLSCLSWNKYSKNIIASSDYEGIVTVWDVQTRQSVMEYEEHEKRAWSVDFSRTDSSMLVSGSDDCKVKVWCTNQEASVINIDMKANICSVKYNPGSSFYVAVGSADHHIHYFDLRNPSSPVHIFGGHKKAVSYVKFLSNNELASASTDSTLRLWDVKDNCPVRTFRGHKNEKNFVGLSVNNEYIACGSETNEVFVYHKAISKPAASHRFVSSDPDDADDDPGSYFISAVCWKSDSPTMLTANSQGTIKVLVLAP

SEQ ID NO: 14120 - protein, 656 aa, Zea mays subsp. mays
  peptide (1)..(656): Ceres Seq. ID no. 12435825
MPEEAGMRAASASPQGPAEEGEGPADRDLLCPICMAVIKDAFLTACGHSFCYMCIVTHLSNKSDCPCCGHYLTKAQLYPNFLLDKVLKKISAQQIAKTASPIDQFRCALQQGNEMGVKELDSLMTLIAEKKRQMEQQESETNMQILLVFLHCLRKQKLEELNEIQTDLQYIKEDISSVERHRAELYRTKERYSMKLRMLLDEPTAQKMWPSSIDKASCRFLPNSRTPLSGSCPGTLQNKKLDLKAQVSHQGFQRRDALTSSDPPNSPIQSGNVIARKRRVQAQFNELQEYYLQRRRTGAQARRQEERDIVAMNREGYHAGLQDFQSVLTTFTRYSRLRVIAELRHGDLFHSANIVSSIEFDRDDELFATAGVSKRIKVFEFSTVVNEPSDVHCPVVEMATRSKLSCLSWNKYSKNIIASSDYEGIVTVWDVQTRQSVMEYEEHEKRAWSVDFSRTDSSMLVSGSDDCKVKVWCTNQEASVINIDMKANICSVKYNPGSSFYVAVGSADHHIHYFDLRNPSSPVHIFGGHKKAVSYVKFLSNNELASASTDSTLRLWDVKDNCPVRTFRGHKNEKNFVGLSVNNEYIACGSETNEVFVYHKAISKPAASHRFVSSDPDDADDDPGSYFISAVCWKSDSPTMLTANSQGTIKVLVLAP

SEQ ID NO: 14121 - DNA, 396 bp, Zea mays subsp. mays
  misc_feature (1)..(396): Ceres Seq. ID no. 3010931
  misc_feature (1)..(396): Ortholog of  Ceres SEQ ID NO 15226012 as cited in SEQ ID NO 1306
caactttcagtcaagttttgttcaacaagggtctgattgagacttccatgaaactgatcgatttgtcgttgctgtcatgtatgtgaacttatggtttagaagcagctaagtttccaacatgttacatggtagggaatgtatttgctaacactatttgctagcactacaagttccgtatgccctatgtgatagatggaaagattgaatgaagggctgtcattatttgatgcaatactgattgttccaatgtttcaaattgtttggaccttcttctctatttgtacaggatttgtttactttcaagaatatcaagtaagttcttgtttattataatcggataatgaagtkaawcatgcatttcctaantataaactgatgaatctgtttttctgctgt

SEQ ID NO: 14122 - protein, 46 aa, Zea mays subsp. mays
  peptide (1)..(46): Ceres Seq. ID no. 3010932
MERLNEGLSLFDAILIVPMFQIVWTFFSICTGFVYFQEYQVSSCLL

SEQ ID NO: 14123 - DNA, 1105 bp, Zea mays subsp. mays
  misc_feature (1)..(1105): Ceres Seq. ID no. 14305301
  misc_feature (1)..(1105): Ortholog of  Ceres SEQ ID NO 13590691 as cited in SEQ ID NO 66290
acaagctcgcttttttaaaatctgtccctgcaattctctcctctgttcccactcattaagataccaccgcctcccgccgcccgccgcccgccgccgacgagcaccgcagcctgacacagagccgcgggcgagccatcgcgtgcggcctcgcccgggatggcgaccatggagagcctgatcgggctggtgaaccggatccagcgcgcgtgcaccgtcctcggcgaccacggcggcggcggcggtgagggctccctctgggaggcgctcccctccgtcgctgtcgttggcgggcagagttccgggaagtcgtcggtgcttgagagcatagtagggagggacttcctgccccgtggatctggtatcgtcacgaggcggcctttagtgctgcagctccacaagacagatggtgggcacgagtatgctgagtttctccacgccccgcggaagcggttcaccgactttgctgctgtgaggaaagagattgctgatgaaacagaccgcattactgggaaaactaaagctatttcaaatgttcccatccatttgagtatatattcgccacatgttgttaacttgacacttattgatcttcctggactgacaaaggtcgctgtagaggggcaagcagaatctattgttcaagatattgaaaacatggttcgatcttatgttgacaagccaaattgcatcatcttggctatctccccagctaaccaagatatagcaacgtcagatgctatcaagcttgccagggatgtcgatccttcaggtgacaggacatttggagtcttaacaaagcttgatttgatggacaagggtaccaatgccgttgatgtacttgaagggagacaatatcgcttacaacacccctgggttggaattgttaatcgctcacaagctgatatcaacaagaatgttgatatgctttcagcaagacgcaaagaaaaagagtactttgagagtagtcctgaatatggtcacttggcacataaaatgggtgcagagtatcttgccaagcttctgtcacagcatttagaggctgtgatcagggccaaaattccaagtattatagccttgattaacaaaacaattgatgaaatagaag

SEQ ID NO: 14124 - protein, 316 aa, Zea mays subsp. mays
  peptide (1)..(316): Ceres Seq. ID no. 14305302
MATMESLIGLVNRIQRACTVLGDHGGGGGEGSLWEALPSVAVVGGQSSGKSSVLESIVGRDFLPRGSGIVTRRPLVLQLHKTDGGHEYAEFLHAPRKRFTDFAAVRKEIADETDRITGKTKAISNVPIHLSIYSPHVVNLTLIDLPGLTKVAVEGQAESIVQDIENMVRSYVDKPNCIILAISPANQDIATSDAIKLARDVDPSGDRTFGVLTKLDLMDKGTNAVDVLEGRQYRLQHPWVGIVNRSQADINKNVDMLSARRKEKEYFESSPEYGHLAHKMGAEYLAKLLSQHLEAVIRAKIPSIIALINKTIDEIE

SEQ ID NO: 14125 - protein, 313 aa, Zea mays subsp. mays
  peptide (1)..(313): Ceres Seq. ID no. 14305303
MESLIGLVNRIQRACTVLGDHGGGGGEGSLWEALPSVAVVGGQSSGKSSVLESIVGRDFLPRGSGIVTRRPLVLQLHKTDGGHEYAEFLHAPRKRFTDFAAVRKEIADETDRITGKTKAISNVPIHLSIYSPHVVNLTLIDLPGLTKVAVEGQAESIVQDIENMVRSYVDKPNCIILAISPANQDIATSDAIKLARDVDPSGDRTFGVLTKLDLMDKGTNAVDVLEGRQYRLQHPWVGIVNRSQADINKNVDMLSARRKEKEYFESSPEYGHLAHKMGAEYLAKLLSQHLEAVIRAKIPSIIALINKTIDEIE

SEQ ID NO: 14126 - DNA, 486 bp, Zea mays subsp. mays
  misc_feature (1)..(486): Ceres Seq. ID no. 3011241
  misc_feature (1)..(486): Ortholog of  Ceres SEQ ID NO 13654809 as cited in SEQ ID NO 62798
cccaactcgaacctcagtcaggcagcgtgaggagggagagttcaaggaccgaggcggcgtcgggcgagatgaagcttaacgtcaagaccctcaagggcaccaacttcgagatcgaggcgagccccgatgcgtcggttgctgacgtgaagaggatcattgagaccactcagggtcagagtacctaccgggcggaccagcaaatgcttatataccaagggaaaattctcaaggatgagaccactttggaaagcaacggagttgctgagaacagcttccttgttataatgttgtccaaggctaaggcatcgtcgagtggagcttctaccactactgctgcaaaagctcctgcaactctggcccaacctgctgccccggtgccccctgctgcatcagttgcaagaacaccaacacaggctcctgttgccacagctgaaanctgatgatgctgatgtgtacagtcaggcagcttcaaaccttgtatctggc

SEQ ID NO: 14127 - protein, 145 aa, Zea mays subsp. mays
  peptide (1)..(145): Ceres Seq. ID no. 3011242
  misc_feature (145)..(145): Xaa is any aa, unknown or other
QLEPQSGSVRRESSRTEAASGEMKLNVKTLKGTNFEIEASPDASVADVKRIIETTQGQSTYRADQQMLIYQGKILKDETTLESNGVAENSFLVIMLSKAKASSSGASTTTAAKAPATLAQPAAPVPPAASVARTPTQAPVATAEX

SEQ ID NO: 14128 - protein, 123 aa, Zea mays subsp. mays
  peptide (1)..(123): Ceres Seq. ID no. 3011243
  misc_feature (123)..(123): Xaa is any aa, unknown or other
MKLNVKTLKGTNFEIEASPDASVADVKRIIETTQGQSTYRADQQMLIYQGKILKDETTLESNGVAENSFLVIMLSKAKASSSGASTTTAAKAPATLAQPAAPVPPAASVARTPTQAPVATAEX

SEQ ID NO: 14129 - protein, 79 aa, Zea mays subsp. mays
  peptide (1)..(79): Ceres Seq. ID no. 3011244
  misc_feature (79)..(79): Xaa is any aa, unknown or other
MLIYQGKILKDETTLESNGVAENSFLVIMLSKAKASSSGASTTTAAKAPATLAQPAAPVPPAASVARTPTQAPVATAEX

SEQ ID NO: 14130 - DNA, 1913 bp, Zea mays subsp. mays
  misc_feature (1)..(1913): Ceres Seq. ID no. 12425465
  misc_feature (1)..(1913): Ortholog of  Ceres SEQ ID NO 13593925 as cited in SEQ ID NO 59489
  misc_feature (1)..(1913): Ortholog of  Ceres SEQ ID NO 13503610 as cited in SEQ ID NO 62416
  misc_feature (1)..(1913): Ortholog of  Ceres SEQ ID NO 13657610 as cited in SEQ ID NO 66165
  misc_feature (1)..(1913): Ortholog of  Ceres SEQ ID NO 13598312 as cited in SEQ ID NO 68448
  misc_feature (1)..(1913): Ortholog of  Ceres SEQ ID NO 13596100 as cited in SEQ ID NO 68573
aacacaagcatgcaagtccatcagcttctcggcttatggtgccagaccgacgtgcctagtagcgtactatcttagcttcaagagaccgaccaggcaagatccattgatcgatggagctgcttcctctgctcacgtggctcctccttgcgcacgccctggcctgcctggcctggacggccgccgcgcggcgccggcagtctcggtgctacctcctggactacgtctgccacaagcccagcgacgaccgcaagctgtccacggagacggccggcaacgtgatccagcgcaacgcgcggctggggctcaccgactaccgcttcctcctccgcgtcatcgtccgctccggcatcggcgaggagacctacgccccgcgcaacatcctggagggccgcgaggactcgcccaccctggaggacgcggtggacgagatggacgccttcttcgacgaggccatcgccgagctcttcgcccggaccggcctcgcgccccgcgacgtggacgtgctcgtcttcaacgtctccatgctctccccggcgccgtcgctgtcgtccaggatcgtgcgccgctacggcctgcgcgaggacgtggcggcgtacaacctcacgggcatggggtgcagcgcgggcctgatcgcgctggacctggcccggaacgcgctccggacgcgtccccgggcgctggcgctggtggtgtcgtccgagtccatcgcgcccaactggtactccggcaccgacaagactatgatgctggccaactgcctgttccgcagcggcggctccgcggtgctggtgaccaacgacccggcgcggcgcgggcaggccaagatggagctcagctgcctggtgcgcgccaacatcggcgccagcgacgacgcgcacgcgtgcgcgctgcagcgcgaggacggcgagggccgcgtcgggatcagcctgagcaaggcgctccccaaggccgccgtgcgcgccttcgccgtcaacctgcgccgcctcgcgccgcgcgtgctccccgtgggcgagctcgcgcggttcgccgcgcgtctcctcgcccggaggctcttcacgacgtccccgcacctgcgtcagcagcacctatcgggcggcaagcagaagggcgacgcggcggcggccccaaagatcaacttcaaggccggggtggaccacttctgcctccaccccggcggcacggccgtcatcgaggcggtgaagaagagcctggacctggaggacgaggacgtggagccggcgcggatgacgctgcaccggtgggggaacacgtcggcgagcagcctgtggtacgtgctgtcttacatggaggccaaagggcggctcaaggtcggggacagggtgctcatggtcacgttcgggtcggggttcaagtgcaacagctgcgtgtgggaggtgaccggcgacatggccgacaagggggcgtgggccgactgcatcgacgcctacccgccggagaagctcgccaacccgtacttggacaagttcggttggatcaacgatgtcgacggcgataccctgatgctctaacggtacggtatacgatcgaggaccgctctccaccggcggaaatgacgacaacggcggaagcagtaaaaagcaggctagctgttgttcagaacgacaggccggtgatgctagcttgcagcctgcgtaggtgtatttatgcccttggttttactgggcctgtcgttctgaacaatatagccctatttatttaccacccaattatatatgtgtagccgatgcagcagtagcacaatatattcttcttcttcttctgaattgttttctatagcaaaaggaaaaaacatatatagcttttttagaacagaagatcgatcggatctccatgtatacagaaacgattgcaagaacaaacaatataatatcaagtgtacttttacccgcctg

SEQ ID NO: 14131 - protein, 579 aa, Zea mays subsp. mays
  peptide (1)..(579): Ceres Seq. ID no. 12425466
TQACKSISFSAYGARPTCLVAYYLSFKRPTRQDPLIDGAASSAHVAPPCARPGLPGLDGRRAAPAVSVLPPGLRLPQAQRRPQAVHGDGRQRDPAQRAAGAHRLPLPPPRHRPLRHRRGDLRPAQHPGGPRGLAHPGGRGGRDGRLLRRGHRRALRPDRPRAPRRGRARLQRLHALPGAVAVVQDRAPLRPARGRGGVQPHGHGVQRGPDRAGPGPERAPDASPGAGAGGVVRVHRAQLVLRHRQDYDAGQLPVPQRRLRGAGDQRPGAARAGQDGAQLPGARQHRRQRRRARVRAAARGRRGPRRDQPEQGAPQGRRARLRRQPAPPRAARAPRGRARAVRRASPRPEALHDVPAPASAAPIGRQAEGRRGGGPKDQLQGRGGPLLPPPRRHGRHRGGEEEPGPGGRGRGAGADDAAPVGEHVGEQPVVRAVLHGGQRAAQGRGQGAHGHVRVGVQVQQLRVGGDRRHGRQGGVGRLHRRLPAGEARQPVLGQVRLDQRCRRRYPDALTVRYTIEDRSPPAEMTTTAEAVKSRLAVVQNDRPVMLACSLRRCIYALGFTGPVVLNNIALFIYHPIIYV

SEQ ID NO: 14132 - protein, 472 aa, Zea mays subsp. mays
  peptide (1)..(472): Ceres Seq. ID no. 12425467
MELLPLLTWLLLAHALACLAWTAAARRRQSRCYLLDYVCHKPSDDRKLSTETAGNVIQRNARLGLTDYRFLLRVIVRSGIGEETYAPRNILEGREDSPTLEDAVDEMDAFFDEAIAELFARTGLAPRDVDVLVFNVSMLSPAPSLSSRIVRRYGLREDVAAYNLTGMGCSAGLIALDLARNALRTRPRALALVVSSESIAPNWYSGTDKTMMLANCLFRSGGSAVLVTNDPARRGQAKMELSCLVRANIGASDDAHACALQREDGEGRVGISLSKALPKAAVRAFAVNLRRLAPRVLPVGELARFAARLLARRLFTTSPHLRQQHLSGGKQKGDAAAAPKINFKAGVDHFCLHPGGTAVIEAVKKSLDLEDEDVEPARMTLHRWGNTSASSLWYVLSYMEAKGRLKVGDRVLMVTFGSGFKCNSCVWEVTGDMADKGAWADCIDAYPPEKLANPYLDKFGWINDVDGDTLML

SEQ ID NO: 14133 - protein, 366 aa, Zea mays subsp. mays
  peptide (1)..(366): Ceres Seq. ID no. 12425468
MDAFFDEAIAELFARTGLAPRDVDVLVFNVSMLSPAPSLSSRIVRRYGLREDVAAYNLTGMGCSAGLIALDLARNALRTRPRALALVVSSESIAPNWYSGTDKTMMLANCLFRSGGSAVLVTNDPARRGQAKMELSCLVRANIGASDDAHACALQREDGEGRVGISLSKALPKAAVRAFAVNLRRLAPRVLPVGELARFAARLLARRLFTTSPHLRQQHLSGGKQKGDAAAAPKINFKAGVDHFCLHPGGTAVIEAVKKSLDLEDEDVEPARMTLHRWGNTSASSLWYVLSYMEAKGRLKVGDRVLMVTFGSGFKCNSCVWEVTGDMADKGAWADCIDAYPPEKLANPYLDKFGWINDVDGDTLML

SEQ ID NO: 14134 - DNA, 1485 bp, Zea mays subsp. mays
  misc_feature (1)..(1485): Ceres Seq. ID no. 12450637
  misc_feature (1)..(1485): Ortholog of  Ceres SEQ ID NO 13597041 as cited in SEQ ID NO 63502
aatcctaatcccctccgcctcatccccttcaaccccacgtctctctcgccgaaggctccggcctcgtcgggatccggtgctggattgacgcaatggcgccgctccacgccgcgctgccgccgccctcctccgccgccgctcaccaccacgcggcagccccgcctgtcttcctcgcccgctcgccgtaccacccccgcagggcggcggcctcctgcccgctcgccgtcgctgccgctccctcgtcgagaaaagcgttcttgtcgtgcccgctgctgggccactggaccacggccgcgccgccgcgcgccatcccctcctcgtcgtcgtcgtcgaccccggcgctcatcgcgtccgtgcaggacctgtatgacttcatctgctgcggcccgctggtggacaggatcggctacaccagtgagaagatcaccgagtccatcgaccgctggcttctcgccggggctagggtggcgcgcctcttccgcctcaacgagctccagctgtcggacgccgagaaggcccggatataccacttctacatccccgtcttcctctggtgcgaggacgaggtcatggtgcacagagccaggtacaacgacggcgatgacatcccgccattggtgatcggggtcagcgctccccaaggaagtgggaagacgactcttgtgttcgcacttgattatctttttcgggttgctggtaggaattctgccacattgtctatagacgacttctatctgacagcaaaagaacagaatgaattgagggacagaaatcctgcaaatgctcttttagagttccgcgggaatgctggaagccacgatctccaactctcagtggaaacactcgagtcactgatcaagctaacgaaggaaggtatgaagatgaaggttccacggtatgacaagtctgcgtttgggggaaggggtgaccgggctgatccttctgtatggccagaggttgaagggcccttagaggttgttctgttcgaaggatggatgcttggatttaaacctcttccaaatgaagttgtgaaagaagtggatccacagctggaggtggttaacaagaaccttgaagcatactctgatgcttgggacaggttcatccagtcatggattgttattaaaataagagaacccggtagcgtttaccagtggagactgcaggcagaggtcgctatgagagcagatggaaagcctggaatgtctgatgaggaggttatggattttgtatcacgctacctaccggcataccatgcatatctgccaacactgtacaaagaggggccgaatggttcgaatccagatcatctgctggtcatcgacatagacgaaaataggaaccctatctgtggtggatcatgggacatctcatgtttgtgaaactacttttatgatgggccgtcaaacaccactggcctcttgttgccctacactctggtagtgtaaatctgtgaattccatgtaaatatgaatttcgcttcct

SEQ ID NO: 14135 - protein, 429 aa, Zea mays subsp. mays
  peptide (1)..(429): Ceres Seq. ID no. 12450638
MAPLHAALPPPSSAAAHHHAAAPPVFLARSPYHPRRAAASCPLAVAAAPSSRKAFLSCPLLGHWTTAAPPRAIPSSSSSSTPALIASVQDLYDFICCGPLVDRIGYTSEKITESIDRWLLAGARVARLFRLNELQLSDAEKARIYHFYIPVFLWCEDEVMVHRARYNDGDDIPPLVIGVSAPQGSGKTTLVFALDYLFRVAGRNSATLSIDDFYLTAKEQNELRDRNPANALLEFRGNAGSHDLQLSVETLESLIKLTKEGMKMKVPRYDKSAFGGRGDRADPSVWPEVEGPLEVVLFEGWMLGFKPLPNEVVKEVDPQLEVVNKNLEAYSDAWDRFIQSWIVIKIREPGSVYQWRLQAEVAMRADGKPGMSDEEVMDFVSRYLPAYHAYLPTLYKEGPNGSNPDHLLVIDIDENRNPICGGSWDISCL

SEQ ID NO: 14136 - protein, 270 aa, Zea mays subsp. mays
  peptide (1)..(270): Ceres Seq. ID no. 12450639
MVHRARYNDGDDIPPLVIGVSAPQGSGKTTLVFALDYLFRVAGRNSATLSIDDFYLTAKEQNELRDRNPANALLEFRGNAGSHDLQLSVETLESLIKLTKEGMKMKVPRYDKSAFGGRGDRADPSVWPEVEGPLEVVLFEGWMLGFKPLPNEVVKEVDPQLEVVNKNLEAYSDAWDRFIQSWIVIKIREPGSVYQWRLQAEVAMRADGKPGMSDEEVMDFVSRYLPAYHAYLPTLYKEGPNGSNPDHLLVIDIDENRNPICGGSWDISCL

SEQ ID NO: 14137 - DNA, 1117 bp, Zea mays subsp. mays
  misc_feature (1)..(1117): Ceres Seq. ID no. 12436168
  misc_feature (1)..(1117): Ortholog of  Ceres SEQ ID NO 14314643 as cited in SEQ ID NO 56903
gcatttgatttctttgcaggtgcagccgtgcaggtgaggtgatcgcgcgtggatgggagttcagacaatgtcgtcccactcccacggcgacgacggccgccgcggcctcccgcggcagggctcggtctacggcctcacgctgaccgaggtggagacgcagctgggcgagccgctgcggaccatgaacctggacgacctcctgcgcaccgttctcccggcctccgccgccgccgccgccgcaggcccgcccccgcccccggccccggcggccaagaagacggtggacgaggtgtggcgcgacatccagagcgccggcggcggcggcggcggccgtcagccctccatgggcgagatgacgctggaggacttcctctcccgcgccggcgtcgccgtcgatgccgccccgcattggatgcaccagtacccgcagcagcagcagcagtacgcgctgccgcggcccctgccgcttcccggcccggctctggacgccgcgtaccacggcgaccggcccggtgttttcctctcgcactcgcaggtggccgggcggaagcgcgccgccacggcggccgtggccggggacggcgtcgtggagaggacggtggagcggcggcagaagcgcatgatcaagaaccgcgagtccgcggcgaggtcccgggccaggaagcaggcgtacaccaacgagctggagaacaaggtggcccggctggaggaggagaacaagcgtctcattgagctcaaggtgctgaaaccactggagccactggagccgccaccggcggagcagaacaagaagcagccgccgccgcaaccgaagaggaagcagccgcagccaccgccaccgccgccgccgccgattcagcagctgccgccgaagcaccgccacgacctccggcgaacgaattccgccactttctgatgacgagggcacgggggggggggggggctctctgcctctctctagggcgtctacggggggtactgtactgtactgtactgtacttgggatgctttgagatgtgaatgaacaaaaccctgctctgcttgcagagactctggtggtctgtggatgggtgcgtgcgtgccgccgttgcagtgaaagctagcagtgttgatgtgc

SEQ ID NO: 14138 - protein, 287 aa, Zea mays subsp. mays
  peptide (1)..(287): Ceres Seq. ID no. 12436169
MGVQTMSSHSHGDDGRRGLPRQGSVYGLTLTEVETQLGEPLRTMNLDDLLRTVLPASAAAAAAGPPPPPAPAAKKTVDEVWRDIQSAGGGGGGRQPSMGEMTLEDFLSRAGVAVDAAPHWMHQYPQQQQQYALPRPLPLPGPALDAAYHGDRPGVFLSHSQVAGRKRAATAAVAGDGVVERTVERRQKRMIKNRESAARSRARKQAYTNELENKVARLEEENKRLIELKVLKPLEPLEPPPAEQNKKQPPPQPKRKQPQPPPPPPPPIQQLPPKHRHDLRRTNSATF

SEQ ID NO: 14139 - protein, 282 aa, Zea mays subsp. mays
  peptide (1)..(282): Ceres Seq. ID no. 12436170
MSSHSHGDDGRRGLPRQGSVYGLTLTEVETQLGEPLRTMNLDDLLRTVLPASAAAAAAGPPPPPAPAAKKTVDEVWRDIQSAGGGGGGRQPSMGEMTLEDFLSRAGVAVDAAPHWMHQYPQQQQQYALPRPLPLPGPALDAAYHGDRPGVFLSHSQVAGRKRAATAAVAGDGVVERTVERRQKRMIKNRESAARSRARKQAYTNELENKVARLEEENKRLIELKVLKPLEPLEPPPAEQNKKQPPPQPKRKQPQPPPPPPPPIQQLPPKHRHDLRRTNSATF

SEQ ID NO: 14140 - protein, 244 aa, Zea mays subsp. mays
  peptide (1)..(244): Ceres Seq. ID no. 12436171
MNLDDLLRTVLPASAAAAAAGPPPPPAPAAKKTVDEVWRDIQSAGGGGGGRQPSMGEMTLEDFLSRAGVAVDAAPHWMHQYPQQQQQYALPRPLPLPGPALDAAYHGDRPGVFLSHSQVAGRKRAATAAVAGDGVVERTVERRQKRMIKNRESAARSRARKQAYTNELENKVARLEEENKRLIELKVLKPLEPLEPPPAEQNKKQPPPQPKRKQPQPPPPPPPPIQQLPPKHRHDLRRTNSATF

SEQ ID NO: 14141 - DNA, 795 bp, Zea mays subsp. mays
  misc_feature (1)..(795): Ceres Seq. ID no. 12419382
  misc_feature (1)..(795): Ortholog of  Ceres SEQ ID NO 15177807 as cited in SEQ ID NO 59667
agaaggaagatgcatggcagatctatgcggcgcactacattgtgatctgatgatgcagttcaaaaaaccaaaaagtaaatgcaatgcagctgcagctacaaggaatcgtcatctttgtgagagccttgcagacagttgctttcctattaatcaaggtcttgctgccagccgtcttcatgaatttttcttgcgccagttttgtgatgctcacacttgcagtaagggaacaaaacctttccccaaaggtggcaggaaacaaacaaacaggttatacctcgctctctccattttgacgctgatacttttgccgctgttctatctaattgtgttcctgcaccagagggaaatgaggaaaggtacccaagatctaaaacggttttcgaaaattgggcagaagaaaaagccatcctagtgtccaacagtcacaacgttctcgagcccatggagccaaggatgagctggataaggaacgtggtatgcagtgtgaaatgtttttatgggcagggaagaaatttccctcatttccaggacgggaacaatgtccgcaggtcgaggaatgctggcttcgaccttttcttttctttttctttcttttttgtttcgacatgtagatgcaaacttcgagaggcaagcatgtgtggtctttgtgagattacggcgatatgaagtcctattgataatttaaggatttttgggaggcctcaggcttaaaaaccaatgtcagtaaatgtagtatgactcctatccaatgtaatgatcaatgtgttggtgaggcacaatctttattcccttgct

SEQ ID NO: 14142 - protein, 136 aa, Zea mays subsp. mays
  peptide (1)..(136): Ceres Seq. ID no. 12419383
EGRCMADLCGALHCDLMMQFKKPKSKCNAAAATRNRHLCESLADSCFPINQGLAASRLHEFFLRQFCDAHTCSKGTKPFPKGGRKQTNRLYLALSILTLILLPLFYLIVFLHQREMRKGTQDLKRFSKIGQKKKPS

SEQ ID NO: 14143 - protein, 132 aa, Zea mays subsp. mays
  peptide (1)..(132): Ceres Seq. ID no. 12419384
MADLCGALHCDLMMQFKKPKSKCNAAAATRNRHLCESLADSCFPINQGLAASRLHEFFLRQFCDAHTCSKGTKPFPKGGRKQTNRLYLALSILTLILLPLFYLIVFLHQREMRKGTQDLKRFSKIGQKKKPS

SEQ ID NO: 14144 - protein, 120 aa, Zea mays subsp. mays
  peptide (1)..(120): Ceres Seq. ID no. 12419385
MMQFKKPKSKCNAAAATRNRHLCESLADSCFPINQGLAASRLHEFFLRQFCDAHTCSKGTKPFPKGGRKQTNRLYLALSILTLILLPLFYLIVFLHQREMRKGTQDLKRFSKIGQKKKPS

SEQ ID NO: 14145 - DNA, 1616 bp, Zea mays subsp. mays
  misc_feature (1)..(1616): Ceres Seq. ID no. 12436397
  misc_feature (1)..(1616): Ortholog of  Ceres SEQ ID NO 15170956 as cited in SEQ ID NO 55034
accaacacaacaacatctcctccattctcctagctccagcaacaaacaggacacaacaccttctcctcctcattcttctaccatagctagctagctagcttcacatcagcagctacatactcaccgatagatacagacctcagagcatcacactacagagtacagacctagctcagagcacacatccagccatggggctcctccctaccgaccgcatggatagcctcttctccccgcgctgcgtgtgggtgaccgggcccatcatcgtgggcgcggggccgtcggggctagccgtggcggcgtgcctgcgggagcagggcgtgccgttcgtcgtcctggagcgcgccgactgtatcgcctcgctgtggcaacggcgcacgtacaaccgcctcaagctgcacctacccaagcagttctgccagctcccgcgcatgccgttcccggaagactacccggagtacccgacccgccgccagttcgtcgactacctcgagcgctacgccgccgagttcgagatcaagccggagttcggcaccaccgtgctgtcggcgcgctacgacgagacgtcgggcctctggcgcgtcgtcaccaacggcggagccggcggcgacatggagtacatcgggcgctggctcgtggtcgccacgggcgagaacgcggaggccgtggtgcccgacatcccgggcctcgccggcttcgacggcgaggtgacccacgtgagcgagtacaagtccggcgaggcctacgccggcaagcgcgtgctggtggtcggctgcggcaactccgggatggaggtgtcgctggacctggccgagcacggcgcgcgcccggccatggtggtgcgcgacgccgtccacgtcctcccgcgcgaggtgctgggcacgtccaccttcgggctcgccgtgctgctcatgcgctggctcccgctctggctcgtcgactggctcatggtgctcctcggcgtggctcgtcctcggcaacctcgccaggctcggcctccgccgccccgccgccggcccgctccagctcaaggagacgcacggccgcacaccagtcctcgactacggcgcgctcgcgcgcatccgcgccggcgacatcaccgtcgtccctgcggtgacacggttcgccggcaagggcggacaggttgaggtcgccgacggccgcacgctcggcttcgacgccgtcatcctcgccaccggatatcgcagcaacgtgccgcagtggctccagggcaacgatttcttcaacaaggacggataccccaagacggcgttcccgcacgggtggaagggcgagagtgggctgtacgccgtggggttcacccggcgcggcctctccggcgcctccgccgacgccgtgcgcatcgccacggacctcgggaacgtctggagggaggagaccaagcccaccaagagggccggcgcctgccacaggcgctgcatctcggtcgtcttctaatccgatcggccacacctgggagcatgcatgacgatgattgaagctaacttttctgaagcgcagaanaaaaaaaaaaaaaaaaaaaaaaaaaaaaaaaaaaaaaaaaaaaaaaaaaaaaaangaaaaaaaaaaaaaaaaantttcgttcccgtcaacct

SEQ ID NO: 14146 - protein, 318 aa, Zea mays subsp. mays
  peptide (1)..(318): Ceres Seq. ID no. 12436398
MGLLPTDRMDSLFSPRCVWVTGPIIVGAGPSGLAVAACLREQGVPFVVLERADCIASLWQRRTYNRLKLHLPKQFCQLPRMPFPEDYPEYPTRRQFVDYLERYAAEFEIKPEFGTTVLSARYDETSGLWRVVTNGGAGGDMEYIGRWLVVATGENAEAVVPDIPGLAGFDGEVTHVSEYKSGEAYAGKRVLVVGCGNSGMEVSLDLAEHGARPAMVVRDAVHVLPREVLGTSTFGLAVLLMRWLPLWLVDWLMVLLGVARPRQPRQARPPPPRRRPAPAQGDARPHTSPRLRRARAHPRRRHHRRPCGDTVRRQGRTG

SEQ ID NO: 14147 - protein, 310 aa, Zea mays subsp. mays
  peptide (1)..(310): Ceres Seq. ID no. 12436399
MDSLFSPRCVWVTGPIIVGAGPSGLAVAACLREQGVPFVVLERADCIASLWQRRTYNRLKLHLPKQFCQLPRMPFPEDYPEYPTRRQFVDYLERYAAEFEIKPEFGTTVLSARYDETSGLWRVVTNGGAGGDMEYIGRWLVVATGENAEAVVPDIPGLAGFDGEVTHVSEYKSGEAYAGKRVLVVGCGNSGMEVSLDLAEHGARPAMVVRDAVHVLPREVLGTSTFGLAVLLMRWLPLWLVDWLMVLLGVARPRQPRQARPPPPRRRPAPAQGDARPHTSPRLRRARAHPRRRHHRRPCGDTVRRQGRTG

SEQ ID NO: 14148 - protein, 238 aa, Zea mays subsp. mays
  peptide (1)..(238): Ceres Seq. ID no. 12436400
MPFPEDYPEYPTRRQFVDYLERYAAEFEIKPEFGTTVLSARYDETSGLWRVVTNGGAGGDMEYIGRWLVVATGENAEAVVPDIPGLAGFDGEVTHVSEYKSGEAYAGKRVLVVGCGNSGMEVSLDLAEHGARPAMVVRDAVHVLPREVLGTSTFGLAVLLMRWLPLWLVDWLMVLLGVARPRQPRQARPPPPRRRPAPAQGDARPHTSPRLRRARAHPRRRHHRRPCGDTVRRQGRTG

SEQ ID NO: 14149 - DNA, 1925 bp, Zea mays subsp. mays
  misc_feature (1)..(1925): Ceres Seq. ID no. 12425449
  misc_feature (1)..(1925): Ortholog of  Ceres SEQ ID NO 15170670 as cited in SEQ ID NO 68165
gtgtttccagccttccaggcgcctctgctgcctgcgcctgcgcgcgtcgtgaaggcgtgaacggcagctcggctcggcgcaggccccccgcccgcgccggcatcgcgtcgcggccgccgcgcgagccccatgctgcgttgctgccgcacgacacgtcacttcggctgcggcgtggttgtgtggactcctctcgctcctggccctcgccggcgctgcgtcggctgcggatggggcggagggtgagtgggagccgctgatacggatgccgacggcgaaggggagtgacgctgcttctgctccggctgctgaggatgatgaagtggggacgaggtgggccgtgctcgtcgccggatccttcggttatgggaactaccggcaccaggccgatgtgtgccatgcgtaccagatactgcagaagggaggagtgaagaaggagaacattgtggtgttcatgtatgatgatattgcccacaacattctgaaccctaggcctggagttatcattaaccatcctaaaggagcaaatgtttatgatggtgttccaaaggattacacaggtgatcaggtcactactgaaaacttctttgctgtcctcttgggcaatagaagtgctaccactggagggagtaagaaggtgatagacagcaaacctaatgaccacatcttcatctattactcagatcatgggggtcctggagttcttggtatgccgaacctgccatatctgtatgctggtgacttcatcaaggtcttgaaaaagaagcatgcttccaatagctactcaaaaatggttatatatgttgaagcatgtgaaagtggcagtatctttgaggggttaatgcctgaagatctaaatatttatgtcacaacagcctcaaatccagttgaaaatagttggggaacttactgccctgggatggaaccatcaccccctcctgagtacattacctgtttaggtgatttgtacagtgtttcttggatggaagacagtgaaacccacaatctaaagaaggaaaccatcaaggatcagtatgaagtggtgaaaacaagaacctcaaactcaaataagtacaaagagggttctcatgttatggagtatggtgataagaccttcaaggatgagaagctttccttttatcaaggttttgatcctgctaatgccaacattgcaaacatgctgctttggccaggcccaaagggtgcagtcaatcaaagagatgctgatcttctcttcatgtggaagaggtacgagcagttaaatggggggaccgaagagaagctgagggctctcatagagattaaagaaactgttcagcacaggaagcatcttgacagcagtatcgatttcgttgggaggctcgtcttcggatttgagaaagggccttcgatgcttgaggctgttagaacctctggtcaaccattagtcgatgactgggactgtttgaagaggatggtgcggattttcgagtcccagtgtggttcacttactcagtacggcatgaagtacatgagagcgtttgcaaacatctgcaacagtggtatatctgagatgaaaatgagggagtcgagcatcagcgcttgcagcagctacaactcggcgaggtggagcccgatggctcggggacacagtgcttgatggtaaagatcaaatagcaaagccccccgaggtctgctgccccatgtccctgtgagcgagctcgtatcatctggggactgtggacccatcgacggttgtacatatcatgcacttgtgctcgtgcctatgtaaagtagtaataccaactcaactctgatcttcatccaagtaccgaaatgattaaaagatcagatgtgaatgctgttgcgatgggtgatcgcaagtaggccataatcagtggaccgaaaatgatgacccaaatcaaggtagtgctcctctgatcgatagc

SEQ ID NO: 14150 - protein, 457 aa, Zea mays subsp. mays
  peptide (1)..(457): Ceres Seq. ID no. 12425450
MPTAKGSDAASAPAAEDDEVGTRWAVLVAGSFGYGNYRHQADVCHAYQILQKGGVKKENIVVFMYDDIAHNILNPRPGVIINHPKGANVYDGVPKDYTGDQVTTENFFAVLLGNRSATTGGSKKVIDSKPNDHIFIYYSDHGGPGVLGMPNLPYLYAGDFIKVLKKKHASNSYSKMVIYVEACESGSIFEGLMPEDLNIYVTTASNPVENSWGTYCPGMEPSPPPEYITCLGDLYSVSWMEDSETHNLKKETIKDQYEVVKTRTSNSNKYKEGSHVMEYGDKTFKDEKLSFYQGFDPANANIANMLLWPGPKGAVNQRDADLLFMWKRYEQLNGGTEEKLRALIEIKETVQHRKHLDSSIDFVGRLVFGFEKGPSMLEAVRTSGQPLVDDWDCLKRMVRIFESQCGSLTQYGMKYMRAFANICNSGISEMKMRESSISACSSYNSARWSPMARGHSA

SEQ ID NO: 14151 - protein, 394 aa, Zea mays subsp. mays
  peptide (1)..(394): Ceres Seq. ID no. 12425451
MYDDIAHNILNPRPGVIINHPKGANVYDGVPKDYTGDQVTTENFFAVLLGNRSATTGGSKKVIDSKPNDHIFIYYSDHGGPGVLGMPNLPYLYAGDFIKVLKKKHASNSYSKMVIYVEACESGSIFEGLMPEDLNIYVTTASNPVENSWGTYCPGMEPSPPPEYITCLGDLYSVSWMEDSETHNLKKETIKDQYEVVKTRTSNSNKYKEGSHVMEYGDKTFKDEKLSFYQGFDPANANIANMLLWPGPKGAVNQRDADLLFMWKRYEQLNGGTEEKLRALIEIKETVQHRKHLDSSIDFVGRLVFGFEKGPSMLEAVRTSGQPLVDDWDCLKRMVRIFESQCGSLTQYGMKYMRAFANICNSGISEMKMRESSISACSSYNSARWSPMARGHSA

SEQ ID NO: 14152 - protein, 309 aa, Zea mays subsp. mays
  peptide (1)..(309): Ceres Seq. ID no. 12425452
MPNLPYLYAGDFIKVLKKKHASNSYSKMVIYVEACESGSIFEGLMPEDLNIYVTTASNPVENSWGTYCPGMEPSPPPEYITCLGDLYSVSWMEDSETHNLKKETIKDQYEVVKTRTSNSNKYKEGSHVMEYGDKTFKDEKLSFYQGFDPANANIANMLLWPGPKGAVNQRDADLLFMWKRYEQLNGGTEEKLRALIEIKETVQHRKHLDSSIDFVGRLVFGFEKGPSMLEAVRTSGQPLVDDWDCLKRMVRIFESQCGSLTQYGMKYMRAFANICNSGISEMKMRESSISACSSYNSARWSPMARGHSA

SEQ ID NO: 14153 - DNA, 1261 bp, Zea mays subsp. mays
  misc_feature (1)..(1261): Ceres Seq. ID no. 12450620
  misc_feature (1)..(1261): Ortholog of  Ceres SEQ ID NO 14303831 as cited in SEQ ID NO 52976
  misc_feature (1)..(1261): Ortholog of  Ceres SEQ ID NO 12619453 as cited in SEQ ID NO 65952
agttcattcccatttcccaacccaaaccagcggctggcacggacgccggcgagccgcgcggcccggaggaccactgcctcctgcatatagccggcttccgcggccatgtcatccgtacacttctttcctgcctcctcccagaccccggtccccgcctgccttctcaaaacctctccaaagtcacccctcccgtgcccccgcacccttgccaccaccgctctccagagtgttggcggcaattgcaatgcgtggcaccgcccgcacctacggctgcagcggagggtccgcacccctgcagcaccgtccgacgcgccgcctgtgggccccgatggcgggagcgggggcggcggcgcggggggagggagtggaggggaggatgaggaggaggagggggagaagaagaagggactgttgcccgagtggatgaacttgacaacagaggacgccaagacggtgctggccgcggtagctatctcgctcgctttccgaaccttcgtcgccgagccgcgcttcatcccctcgctctccatgttccccaccttcgacgtcggtgaccgcatcgtcgccgagaaggttacttactactttaggaagccatgtgttaatgatataataattttcaaaagccctccagtgctgcaggaggttgggtatactgataatgatgttttcattaaaagagtagttgccagggagggagatgttgttgaggttcatgaaggaaaactcgttgtgaatgcaagtaccagaaaactctgtttttgtgatgggagataaccgaaacaacagctacgattcacatgtgtggggccctcttccagcaaaaaacatattggggagatcaatttttcggtattggcctcctggtcgaatagggggtactaccaagggttgcttcagccctgaattaagccctggagcaaagccagaatcacttactgatgtcaaatcgacaaagtaggagattgagaagttagttttggtggtgcctgatgtgcaggggaagcttcggttattcttcgtggtagaatgtcacagaggaatcctgtgttgtgtggcaggtagttctattagaacccagagagaggaagacaatttgattctcattgagtcattgattggattggccaaaaggcacagaaaccattttgtctcagggtttcttgtccttttgccttgctgtatacgtacgtattagggaaacttgataccatgatggctgacctagttaagctgcaaaaaagtatggttccactgttgc

SEQ ID NO: 14154 - protein, 223 aa, Zea mays subsp. mays
  peptide (1)..(223): Ceres Seq. ID no. 12450621
MSSVHFFPASSQTPVPACLLKTSPKSPLPCPRTLATTALQSVGGNCNAWHRPHLRLQRRVRTPAAPSDAPPVGPDGGSGGGGAGGGSGGEDEEEEGEKKKGLLPEWMNLTTEDAKTVLAAVAISLAFRTFVAEPRFIPSLSMFPTFDVGDRIVAEKVTYYFRKPCVNDIIIFKSPPVLQEVGYTDNDVFIKRVVAREGDVVEVHEGKLVVNASTRKLCFCDGR

SEQ ID NO: 14155 - protein, 141 aa, Zea mays subsp. mays
  peptide (1)..(141): Ceres Seq. ID no. 12450622
VHSHFPTQTSGWHGRRRAARPGGPLPPAYSRLPRPCHPYTSFLPPPRPRSPPAFSKPLQSHPSRAPAPLPPPLSRVLAAIAMRGTARTYGCSGGSAPLQHRPTRRLWAPMAGAGAAARGEGVEGRMRRRRGRRRRDCCPSG

SEQ ID NO: 14156 - protein, 125 aa, Zea mays subsp. mays
  peptide (1)..(125): Ceres Seq. ID no. 12450623
FIPISQPKPAAGTDAGEPRGPEDHCLLHIAGFRGHVIRTLLSCLLPDPGPRLPSQNLSKVTPPVPPHPCHHRSPECWRQLQCVAPPAPTAAAEGPHPCSTVRRAACGPRWRERGRRRGGREWRGG

SEQ ID NO: 14157 - DNA, 2550 bp, Zea mays subsp. mays
  misc_feature (1)..(2550): Ceres Seq. ID no. 13599007
  misc_feature (1)..(2550): Ortholog of  Ceres SEQ ID NO 14315138 as cited in SEQ ID NO 53488
agaacatcctaatcgaaaaaccgcacacggctccgctgcttcgcgactcctctccggctctccgcacaggactccaaccgcctcgccgttgcatcgccgcgggcgtcaacctaggctgctgccggtaccggtgcgtccccagccatggctcggccgccgcaggaggcgatcgacaccttcgtcagcatcaccggcgccgacgaggtcaccgcagtccgcgtgctcgaggaacatggtcatgatctaaatgaagctgtgaatgcttattttaatgaaggagataggaccaccaccagaatcaatcagaatcctgtgcctgccactgccagttatgatgacatgatggagctggatgaaccacttgatcccatgttcaacagacctttgttccctagaactttgggcaacccttttgcccttttggatccaggttttgctgacataactgctggtgatatatttggacgtggaccccgagttacacaacctagggacgtgaggcagatacctattgaagttaaggacagcaatactcaaacaggcagttctggtcagggtcccattattgaggatgttactggacgtgaatcttttatggtccagaggtccatgggaccgttatagttgaygaagatgatgaagacttgccattaacactatctgctcaggatcctaagatcccaagcagtgctttgcacccaaaccatttcatgcctagtgcgcctccagtggttgatgttagtgaccataacaatgatatagaagaggagatgattaaggcagcaattgaagcttcaaaaagggaagctgacgggatgaaaaatgttctaagtagtggtcaatctgaaaacatgtcacgtggcagaggtgatcatgagcttgctcgggcggtttctttgtccttggaggtagccttttaacttctaagatgtagctatgtatttttgttcatatacctatacctgcaatgtgttttttatgtggctatcagacagcagagcgagagagagctctgcgccaagagggaatgtatgtagcagatcactctcctgacttatctgataaagaaggcggtcaaggaggaagtgggataagcgaaaggtgaagtcacatttccaaatgggtagaacagtggtagtgtgtggattattacttatttataatcaattaatggctcaatttctgttcccctatcatttgtttttttgtatggtttcatttgcatggaagccatgcatcgtgtgggatatgatattgtttccctgtttgtgtgggtcacttctcatgcaatgttttagcgagcttttcctaacctttgtaagtataatctgtgtctaattggaatatacttggtagcagctgattcctcatacatgtccattcttattgtaggcgaggactaactacaggagaagtgggaacttctgagcaaacagtagatgaagagaacttccaagaggacaatgaagatggtgaagaacaacctttagttaggactcgttctaggcgacttcgaggcagaactattgagccagcagaaactgttcaaagggctgacagcccgccctcaagtccccaacctcatgttcaaattggtcatcagcgtaatgtggggtttccttcagtagagtggggtggtatttcttctgaagagcgtgatgaagctcttatgcttgaggctgcaatgtttggtgggattcctgaaggagcaccatatccattttccttcccagcccatggcaggtcgactcactatcccctagtagcacgtcctccatcaccatcattaacggcacagcggttgttaagggagcagcaggatgatgagtatcttgctgctctccaagctgatcgagaaaaagagttgaaggctgtgcaggaggctgaacttcgcagggtagaggaagctgcagcaagagaggctgctcttgaacgtcaaaagaaagaagaggaggagaagctaaagaaacaacgtgaggaagaggagttggaatccaagcttgcagccaaacaagcatcactacctaaggagccactacaaaatgacgagggggctgtcacagtggtagtccgcatgcctgatggtagtcgtcgaggacggcgctttctcaaatctgacaggcttcagtatctttttgatttcatagacatcagccggactttcaaaccaggaacttatagactggcgaggtcttatcccaggcgtgccttcactgaattggagagccagatgtcactgagcgatctcggtctcactagcaagcaggaagctctgttcctagaaaaactgtctgcgtagagtacaaggttctggagttatggtcgagtagtatatgcacttataaaatcggtcatttagatcgtgcctggcgtgtgttcatgaaaatactgcagcggttgaatgattactgatctctagagatcccgtcgccatcttctgtgctctgaaacggaggtgtttcgatctgactgtgcagatgggcagttctacattcagatttcagaacaactgtagctcttgcggttttaagacttgagtatggtttactc

SEQ ID NO: 14158 - protein, 209 aa, Zea mays subsp. mays
  peptide (1)..(209): Ceres Seq. ID no. 15222489
MLEAAMFGGIPEGAPYPFSFPAHGRSTHYPLVARPPSPSLTAQRLLREQQDDEYLAALQADREKELKAVQEAELRRVEEAAAREAALERQKKEEEEKLKKQREEEELESKLAAKQASLPKEPLQNDEGAVTVVVRMPDGSRRGRRFLKSDRLQYLFDFIDISRTFKPGTYRLARSYPRRAFTELESQMSLSDLGLTSKQEALFLEKLSA

SEQ ID NO: 14159 - protein, 204 aa, Zea mays subsp. mays
  peptide (1)..(204): Ceres Seq. ID no. 15222490
MFGGIPEGAPYPFSFPAHGRSTHYPLVARPPSPSLTAQRLLREQQDDEYLAALQADREKELKAVQEAELRRVEEAAAREAALERQKKEEEEKLKKQREEEELESKLAAKQASLPKEPLQNDEGAVTVVVRMPDGSRRGRRFLKSDRLQYLFDFIDISRTFKPGTYRLARSYPRRAFTELESQMSLSDLGLTSKQEALFLEKLSA

SEQ ID NO: 14160 - protein, 159 aa, Zea mays subsp. mays
  peptide (1)..(159): Ceres Seq. ID no. 15222491
MARPPQEAIDTFVSITGADEVTAVRVLEEHGHDLNEAVNAYFNEGDRTTTRINQNPVPATASYDDMMELDEPLDPMFNRPLFPRTLGNPFALLDPGFADITAGDIFGRGPRVTQPRDVRQIPIEVKDSNTQTGSSGQGPIIEDVTGRESFMVQRSMGPL

SEQ ID NO: 14161 - DNA, 2347 bp, Zea mays subsp. mays
  misc_feature (1)..(2347): Ceres Seq. ID no. 12450495
  misc_feature (1)..(2347): Ortholog of  Ceres SEQ ID NO 13599324 as cited in SEQ ID NO 0
ataattggtgcctttcttgataagttgatatacaaccgtggatccttggaacttcgatttagttagtgactccgtaggtatcagataaccaaaaaaagaggaatcacgtgaactaccggttatatttcccctggatttcgacaaagctttttaggaaatttcgtactttttttcatggagaaatttcgaagacaccaatgaagttctcgcataaaataataaaaaaaccctaagcatgctcgattttcatttttttttttgccatgaacaactgctagtcaagcacaaaacaaggatttcctaattctccacactcgacaaccattattttcacagcttcaagaactctcaacttcccctcaccccaacccaaaagaagtgaatacaaccataaccttcacagcttcaagaacttttcaacttcaaggaaatttctaaacagtaattcttttttaagctggtgaggtgtcccggccctcctgtttcctgaaaaaaaagcacgactgaactagatgttattaggtccgcacatgaattgcatacgaaatgttttcctgactggggctaaattgctagtttagccatggggcagacgcatcttttgttgctcgcttgtttctgggtcctgtcaacatgctccttgctacttgatgcttcctccgatggactgttaagaatcaacctgaacaagaagagactggacaaggaagctttgactgctgcgaaattggcgaagaaggagagcaaccttcgaaggtctgtgggtgctgaccagtatctcagtgcctcaactgatgacatagtccctttggacaactacctggacacccagtactttggacagatcagcatcggcacgccaccacagaacttcacagtgatattcgacactggaagctccaacttgtgggttccctcatccaagtgctacttttcgatagcatgctacttacaccacagatacaagtcaaccaagtcgaagacttacacaaagaatggagaatcttgtacgataacatatggttctgggcaaatcgctggcttcttcagtgaggacaatgtgttggttggcaaccttgttgtgcaaaatcagaaatttattgagacaactcgagaaaccagccctactttcatcattgggaagtttgatggaattcttggtctcggatttcctgaaatttctgtaggaggagcccctccaatttggcagagcatgaaacagcagaaactggtcgcaaaggatgtcttctctttctggcttaatcgtgaccctgatgcatcttctggaggaggcgagcttgtctttggtggtgttgacccaaaacactacaaaggggaccatacatatgttcccgttacacgcaaaggctactggcagtttgacatgggagatcttattattggtggccactcaactggtttctgtgctggtggctgtgctgctattgtggactcagggacttcattgcttgctggtccaactaccatagtggctcaagtcaatcatgcaattggggctgagggaatcatcagtacagaatgcaaagaagtggtgagcgagtatggagagatgatccttgagttgctcatatcgcagacaagcccacagaaagtgtgcactcagattggtctctgtgtatttgatggtgcccattctgtcagcaatccaattgaatctgttgttgagaaacagaagcgtggttctgatcttttctgtactgcttgtgagatggctgttgtctggatacagaatcagctccgtgaaaacaagacaaaagaactcattttgaattatgctaatcagctctgtgagcgtctccctagccccaatggcgagtcaactgttgattgccatcagatctcaaagatgccaaatcttgcattcaccatagcaaacaagactttcaccttaacaccagagcagtacatagtgaagctggagcaagcaggacaaactatctgcatcagtgggtttatggcatttgacgtaccgcctcctcgtggtcctctctggatacttggtgatgtttttatgggtgcctaccacactgtttttgacttcggtgagaacaggattgggtttgccaaatctgcatgaggactggagttctgcgctttagtagcatgtccagtttgttatccgggtattgtacatatatatgttgccaactggtgtaatccgcagtgtttaatagtatatattcatgcagaaatctagaagattgtggcatgatatgtgtttgcaaatggagctatgctatgtatggagctccaggacctagagttttatgtaaagggagacgatgaggattagggcttttaacctattctcatcacgttattgtcc

SEQ ID NO: 14162 - protein, 504 aa, Zea mays subsp. mays
  peptide (1)..(504): Ceres Seq. ID no. 12450496
MGQTHLLLLACFWVLSTCSLLLDASSDGLLRINLNKKRLDKEALTAAKLAKKESNLRRSVGADQYLSASTDDIVPLDNYLDTQYFGQISIGTPPQNFTVIFDTGSSNLWVPSSKCYFSIACYLHHRYKSTKSKTYTKNGESCTITYGSGQIAGFFSEDNVLVGNLVVQNQKFIETTRETSPTFIIGKFDGILGLGFPEISVGGAPPIWQSMKQQKLVAKDVFSFWLNRDPDASSGGGELVFGGVDPKHYKGDHTYVPVTRKGYWQFDMGDLIIGGHSTGFCAGGCAAIVDSGTSLLAGPTTIVAQVNHAIGAEGIISTECKEVVSEYGEMILELLISQTSPQKVCTQIGLCVFDGAHSVSNPIESVVEKQKRGSDLFCTACEMAVVWIQNQLRENKTKELILNYANQLCERLPSPNGESTVDCHQISKMPNLAFTIANKTFTLTPEQYIVKLEQAGQTICISGFMAFDVPPPRGPLWILGDVFMGAYHTVFDFGENRIGFAKSA

SEQ ID NO: 14163 - protein, 294 aa, Zea mays subsp. mays; identical to SEQ ID NO: 13178
  peptide (1)..(294): Ceres Seq. ID no. 12450497

SEQ ID NO: 14164 - DNA, 2285 bp, Zea mays subsp. mays
  misc_feature (1)..(2285): Ceres Seq. ID no. 13622799
  misc_feature (1)..(2285): Ortholog of  Ceres SEQ ID NO 14315275 as cited in SEQ ID NO 52556
  misc_feature (1)..(2285): Ortholog of  Ceres SEQ ID NO 14303351 as cited in SEQ ID NO 54864
  misc_feature (1)..(2285): Ortholog of  Ceres SEQ ID NO 13597260 as cited in SEQ ID NO 63885
  misc_feature (1)..(2285): Ortholog of  Ceres SEQ ID NO 15180208 as cited in SEQ ID NO 0
ggatctttcgctttccttaccccgttagcgttcctgcttgatacactacgactgcagattctttggcagaccgctaccaagtgcaagtgtgcaacgcacacacatcactcacagtctcacggtgtctctgtgcgcgcgcgtgggacacaggagggagagagacacagagaagggggcgggacgatcagctctagctcagctggtatcgtctaaactgcataaaaggggagggaaaaaaagttgcaatgatgcatcccggcgcatagatagagagagagagagaagagagagccccgactcgagagccaagaacgccgtgtgttgtgtttgtgtgcatctatctccgtacacgcacgctcgtacgcaccagctagcacgaccgccatggccgccaccaggagagccttcttccacagcgccgtcgacggcattgcgcgcgccgggccgggggaggccgagcggctgccggcgccgccgcaggtcgggcgaccggtggaaggcgccagcagcatggtcttgggcttccccgtgccgcggcccacgatgccggaccgccggccggccgccgtcacccagcagttctttccgcccactactacggccgcgcagcaggcgacgatggaggagcaatgccacgtgcccgccggtagcgcggcggagcagtgggtccggtcgtcggcgtccaggaagagccggcgcggcccgcggtcacggagctcgcagtaccgcggcgtcaccttctaccgccgcaccggccgctgggagtcccacatctgggactgtgggaaacaggtgtacttgggtggattcgacacggcgcaggccgctgcgagggcctacgaccaagccgcgatcaagttccgcggcctgaacgcggacatcaacttcaccctggacgactacaaggacgagatgaagaagatgaaggacttgagcaaggaggagttcgtgttggtgctccggcggcagggcgccggcttcgtcaggggcagctccaggttccggggagtcacccagcacaagtgcggcaagtgggaggccaggatcggccagctcatgggcaagaagtatgtgtacctgggcctgtatgacacagagacggaggctgcccaggcatatgacaaggctgccatcaagtgctacggcaaggaggcggtgaccaacttcgatgcccagagctacgacaaggagctccagtcgcagccctgggacggcgagctggatctcgagctcagtctgggctgcgccagcagcgatccgtccacggtcgccgtcgaggcgttcagccccgcgacgagcagcagtagccgcaagcagaggacgatgacgctgacgctcggtctgccggaggaggaggagacgggcgccggctaccctcaccctgctgccggcatgttcgggcgcccggctgatggccacgtccacgtagcaccgccgccacaccggcaatggcagcagcagcagcagggacagcacgcagctccagatgcggcgcctgagcgacgagcggcagagccagcagatcggcagcggtggggccggggcgcgcgctggcccatcgccagcgccagcggcattaactgggcctgggcgccgccgtacgccaccgcccgcgccggcaccgacgacgacgacgccagcagcgccgccgctgcagcatcatcaggattcccactgtggcagctgggtgcggcgtcgtccaggtccagctggcccagctgctgagcctttcctgtcgtcccgcgccaccaacagtgacgctgctgggccacgtactgacggcgactggtgacctgctggaaccgccgccggcctgtttcccttttctaggtaaaagcagtggcagaggggcgagctagcgacagcgtgcctcgtcatccatcgtccctgcgccgtggctggcggggtgggaaaaagtctgagcagttttgagcgtccggaggagctcgagatttcctccctcgaatagtcacttggggtggccactagttattatttctttccttccccctcgttgattctgctacccattatagcctctgtatctagctacatgcatgatgctgctctagcgctgttggacgttgatggcacggtgtacggatatgggacagggttcgtgtgaccccatgtccactgctaggcctgtttccaaatggagtatttctgcagtaccatggcttatagaaatgccgagtattttaaaccattaggtgcttggttactttcccaaaaactaggttttcaaagctatggtataatgaataccacggtatatatttttc

SEQ ID NO: 14165 - protein, 446 aa, Zea mays subsp. mays
  peptide (1)..(446): Ceres Seq. ID no. 13622800
MAATRRAFFHSAVDGIARAGPGEAERLPAPPQVGRPVEGASSMVLGFPVPRPTMPDRRPAAVTQQFFPPTTTAAQQATMEEQCHVPAGSAAEQWVRSSASRKSRRGPRSRSSQYRGVTFYRRTGRWESHIWDCGKQVYLGGFDTAQAAARAYDQAAIKFRGLNADINFTLDDYKDEMKKMKDLSKEEFVLVLRRQGAGFVRGSSRFRGVTQHKCGKWEARIGQLMGKKYVYLGLYDTETEAAQAYDKAAIKCYGKEAVTNFDAQSYDKELQSQPWDGELDLELSLGCASSDPSTVAVEAFSPATSSSSRKQRTMTLTLGLPEEEETGAGYPHPAAGMFGRPADGHVHVAPPPHRQWQQQQQGQHAAPDAAPERRAAEPADRQRWGRGARWPIASASGINWAWAPPYATARAGTDDDDASSAAAAASSGFPLWQLGAASSRSSWPSC

SEQ ID NO: 14166 - protein, 404 aa, Zea mays subsp. mays
  peptide (1)..(404): Ceres Seq. ID no. 13622801
MVLGFPVPRPTMPDRRPAAVTQQFFPPTTTAAQQATMEEQCHVPAGSAAEQWVRSSASRKSRRGPRSRSSQYRGVTFYRRTGRWESHIWDCGKQVYLGGFDTAQAAARAYDQAAIKFRGLNADINFTLDDYKDEMKKMKDLSKEEFVLVLRRQGAGFVRGSSRFRGVTQHKCGKWEARIGQLMGKKYVYLGLYDTETEAAQAYDKAAIKCYGKEAVTNFDAQSYDKELQSQPWDGELDLELSLGCASSDPSTVAVEAFSPATSSSSRKQRTMTLTLGLPEEEETGAGYPHPAAGMFGRPADGHVHVAPPPHRQWQQQQQGQHAAPDAAPERRAAEPADRQRWGRGARWPIASASGINWAWAPPYATARAGTDDDDASSAAAAASSGFPLWQLGAASSRSSWPSC

SEQ ID NO: 14167 - protein, 393 aa, Zea mays subsp. mays
  peptide (1)..(393): Ceres Seq. ID no. 13622802
MPDRRPAAVTQQFFPPTTTAAQQATMEEQCHVPAGSAAEQWVRSSASRKSRRGPRSRSSQYRGVTFYRRTGRWESHIWDCGKQVYLGGFDTAQAAARAYDQAAIKFRGLNADINFTLDDYKDEMKKMKDLSKEEFVLVLRRQGAGFVRGSSRFRGVTQHKCGKWEARIGQLMGKKYVYLGLYDTETEAAQAYDKAAIKCYGKEAVTNFDAQSYDKELQSQPWDGELDLELSLGCASSDPSTVAVEAFSPATSSSSRKQRTMTLTLGLPEEEETGAGYPHPAAGMFGRPADGHVHVAPPPHRQWQQQQQGQHAAPDAAPERRAAEPADRQRWGRGARWPIASASGINWAWAPPYATARAGTDDDDASSAAAAASSGFPLWQLGAASSRSSWPSC

SEQ ID NO: 14168 - DNA, 1888 bp, Zea mays subsp. mays
  misc_feature (1)..(1888): Ceres Seq. ID no. 12454903
  misc_feature (1)..(1888): Ortholog of  Ceres SEQ ID NO 15172174 as cited in SEQ ID NO 60481
  misc_feature (1)..(1888): Ortholog of  Ceres SEQ ID NO 12624445 as cited in SEQ ID NO 61193
  misc_feature (1)..(1888): Ortholog of  Ceres SEQ ID NO 15176081 as cited in SEQ ID NO 65838
  misc_feature (1)..(1888): Ortholog of  Ceres SEQ ID NO 14302875 as cited in SEQ ID NO 66242
  misc_feature (1)..(1888): Ortholog of  Ceres SEQ ID NO 13660287 as cited in SEQ ID NO 67316
  misc_feature (1)..(1888): Ortholog of  Ceres SEQ ID NO 14307892 as cited in SEQ ID NO 67490
acactggcacgtactccagagacgagcgcgcgcgcgcggagcaggccgggtccataaattatgagctcgccctttggaaccgagaggcgtttcctacccaccttaccttatcattattagctccaagcaagtcgcacacgacacagacacacacacatcatcatcatcaacaacctgacatggccggcgacggggcggacgccgcgcacggcgcgtcggcgcggctggagggcgtgctgacggatgcgtcgaccccgtgggcgcggcgcgcgtggggcgcggccgccatcgagctgccgctgctgacgcggctggcggcgccggcggttgtgatgtacatgatcaactacctcatgtccatgtcgacgcagatcttctcgggccacctcggcaacctggagctcgccgccgcctcgctcggcaacaccggcgtgcagatgttcgcctacggactcatgctgggcatgggcagcgcggtggagacgctgtgcgggcaggcgtacggcgcccacaagtacgagatgctgggcatctacctgcagcggtcggccgtgctgctgtgcgcgacgggcgtgccgctggccgtgatctacggcttctcggagccgatcctggtgttcctggggcagtcgccggagatcgcccgcgcggcggccatcttcgtgtacggcctgatcccgcagatcttcgcgtacgccatcaacttcccgatccagaagttcatgcaggcagcagagcatcgtgctcccgagcgcgtacatctccaccgcgtcgctggcgctgcacctgctgctgagctgggtggtggtctacaaggtggggctgggcctgctgggggcctccctggtgctgagcctcagctggtggctcctcgtcgcggcgcagttcgcgtacatcgtgatgagccccaggtgccgccacacctggaccggcttcacctggcaggccttctcgggcctctgggacttcctcaagctctccgccgcgtccgccgtcatgctctgcctcgagacctggtactatcaggtcctggtgctcatcgccggcttgctccccaaccctgaacttgcattggacgcgctgtctgtatgcatgactgttaatgggtgggtgttcatgatcgcagtagggttcaacgccgctgccagcgtgagagtgagcaatgagctcggcgccggccaccccaagtccgcgtatttctcggtgtgggtagtgaccgcgctgtcgacgctcatatctatcatgctcggcgttctggtcctctgcctgcgcaactacatcagctacttgttcacggagggcgaggtggtgtccaacgcggtggccgatctctgcccgctgcttgccgtcacgctcgttctcaacggcatccagcctgtgctgtcaggtgtcgccgttgggtgcgggtggcagcagttcgtggcctacgtgaacattggctgctactacatagtcggcgtccccctcggcgccgtgctcgggttcgtcttcaagctcggtgtgaagggcatttgggctgggatgatcggagggacttgcatgcagacggctattctagtgtgggtcaccttgagaactgactggaacaaggaggtagaggaagcacatgaatangttgcacaagtgggaggctaacaagacgacggagccccttcttgcgggggtcagcaatgacaaataaataacgtaactgcgcgcggatgatcgatcgatccacaatatcaatcaatctccggccttcaccagtactagttcccttcatgcataatgttgggaactggcgtctttagattttctgtgcagtaaattaaatgaaccacggtaacgtcaatgtaaacgaatcacgcatgtttggtttgcttatttcttccgttttaatgcttaacgt

SEQ ID NO: 14169 - protein, 353 aa, Zea mays subsp. mays
  peptide (1)..(353): Ceres Seq. ID no. 12454904
TGTYSRDERARAEQAGSINYELALWNREAFPTHLTLSLLAPSKSHTTQTHTHHHHQQPDMAGDGADAAHGASARLEGVLTDASTPWARRAWGAAAIELPLLTRLAAPAVVMYMINYLMSMSTQIFSGHLGNLELAAASLGNTGVQMFAYGLMLGMGSAVETLCGQAYGAHKYEMLGIYLQRSAVLLCATGVPLAVIYGFSEPILVFLGQSPEIARAAAIFVYGLIPQIFAYAINFPIQKFMQAAEHRAPERVHLHRVAGAAPAAELGGGLQGGAGPAGGLPGAEPQLVAPRRGAVRVHRDEPQVPPHLDRLHLAGLLGPLGLPQALRRVRRHALPRDLVLSGPGAHRRLAPQP

SEQ ID NO: 14170 - protein, 294 aa, Zea mays subsp. mays
  peptide (1)..(294): Ceres Seq. ID no. 12454905
MAGDGADAAHGASARLEGVLTDASTPWARRAWGAAAIELPLLTRLAAPAVVMYMINYLMSMSTQIFSGHLGNLELAAASLGNTGVQMFAYGLMLGMGSAVETLCGQAYGAHKYEMLGIYLQRSAVLLCATGVPLAVIYGFSEPILVFLGQSPEIARAAAIFVYGLIPQIFAYAINFPIQKFMQAAEHRAPERVHLHRVAGAAPAAELGGGLQGGAGPAGGLPGAEPQLVAPRRGAVRVHRDEPQVPPHLDRLHLAGLLGPLGLPQALRRVRRHALPRDLVLSGPGAHRRLAPQP

SEQ ID NO: 14171 - protein, 244 aa, Zea mays subsp. mays
  peptide (1)..(244): Ceres Seq. ID no. 12454906
  misc_feature (238)..(238): Xaa is any aa, unknown or other
MSPRCRHTWTGFTWQAFSGLWDFLKLSAASAVMLCLETWYYQVLVLIAGLLPNPELALDALSVCMTVNGWVFMIAVGFNAAASVRVSNELGAGHPKSAYFSVWVVTALSTLISIMLGVLVLCLRNYISYLFTEGEVVSNAVADLCPLLAVTLVLNGIQPVLSGVAVGCGWQQFVAYVNIGCYYIVGVPLGAVLGFVFKLGVKGIWAGMIGGTCMQTAILVWVTLRTDWNKEVEEAHEXVAQVGG

SEQ ID NO: 14172 - DNA, 1417 bp, Zea mays subsp. mays
  misc_feature (1)..(1417): Ceres Seq. ID no. 12436145
  misc_feature (1)..(1417): Ortholog of  Ceres SEQ ID NO 13598369 as cited in SEQ ID NO 62165
aaacggaggctggactggattcttgaagaggcttccattccatgggggtaaagcgatcccatttccactcctgcctgttgtctgcctccaaggcaacagttttttagtttgcttgcgctctcctgccttcggttcaccgcctctccatgaatgcaagcaagccgccttttaaatacgaggctctcgcttgttactgaagctgcgcggcgtcttgtgcctcggaacctgccaactgccattggaagtgtttctctacagtctacaaatacgtcgcgcgccatggacggcgactcgaagaagctgagggtgtggttttctggagtaggaaagggaggtggaggtggacgccagtcttcagcggcaccaccgcaagaaagcgcgcctattggaagagcggaaatgaacagcagcggggaatttgatgctgcattcgcagccacaattgcagcagcagcatttgcaattgctgcccgtgaagagaagcttgcagctcagaagaagtctgtccccatcgaggaggtgccacgagccctgtcgctagtcaagagagctggaagcaccaaaaaacctgcgggaggcaacaaaatctcaagatggtttagcggcaaggagcctctagaacacgacgacgacggtccagtgagcaggccactgaaaccagcacctggaaagcccgagggtatgcctgcagatcacaaggtggcacccaagattcttgagacttctctgagtgtgaggaagggttcagggtcctccggcaagacaacagacaggaaagggagcaagaagtttgagcaagaacatgttcagaaagcgccatcgatcatcaggccatctacatcataccattctagacggaatggagaagacgcagcaggagtagctgctattggcggcacgagatctaaggctgatgagtgggagaaggcaaagcttgcaaaagttagagaggagtacgaaaagatgatggagaccatagctgaatgggaaactgagaagaaggtgaaggcgagacgccataaagaacagagagagactgtgctggacagaaagagagcaaaagcactagaagaatacaaccaggagatgacaaggatcagcaagattgctggaggagcaaggtcgatggcagaggaacgaaaatacaacgacgagaataagatcaaagagaaggcgcacaagatacgatccacaagaaagcctccccgcacatgtgcttgcttttgagaatagttctatacactgaaatttggaaccgtatgaaagaagtgtgatttgaagtcactattgtaaaagtcacacaatagtgacgtactgtattgtaatatgtatttggctttgacaagatattagtgtagagttgtatcccccttcaaaaagagagttgtatccaacacgcaacatattgacgctttcc

SEQ ID NO: 14173 - protein, 358 aa, Zea mays subsp. mays
  peptide (1)..(358): Ceres Seq. ID no. 12436146
MQASRLLNTRLSLVTEAARRLVPRNLPTAIGSVSLQSTNTSRAMDGDSKKLRVWFSGVGKGGGGGRQSSAAPPQESAPIGRAEMNSSGEFDAAFAATIAAAAFAIAAREEKLAAQKKSVPIEEVPRALSLVKRAGSTKKPAGGNKISRWFSGKEPLEHDDDGPVSRPLKPAPGKPEGMPADHKVAPKILETSLSVRKGSGSSGKTTDRKGSKKFEQEHVQKAPSIIRPSTSYHSRRNGEDAAGVAAIGGTRSKADEWEKAKLAKVREEYEKMMETIAEWETEKKVKARRHKEQRETVLDRKRAKALEEYNQEMTRISKIAGGARSMAEERKYNDENKIKEKAHKIRSTRKPPRTCACF

SEQ ID NO: 14174 - protein, 315 aa, Zea mays subsp. mays
  peptide (1)..(315): Ceres Seq. ID no. 12436147
MDGDSKKLRVWFSGVGKGGGGGRQSSAAPPQESAPIGRAEMNSSGEFDAAFAATIAAAAFAIAAREEKLAAQKKSVPIEEVPRALSLVKRAGSTKKPAGGNKISRWFSGKEPLEHDDDGPVSRPLKPAPGKPEGMPADHKVAPKILETSLSVRKGSGSSGKTTDRKGSKKFEQEHVQKAPSIIRPSTSYHSRRNGEDAAGVAAIGGTRSKADEWEKAKLAKVREEYEKMMETIAEWETEKKVKARRHKEQRETVLDRKRAKALEEYNQEMTRISKIAGGARSMAEERKYNDENKIKEKAHKIRSTRKPPRTCACF

SEQ ID NO: 14175 - protein, 275 aa, Zea mays subsp. mays
  peptide (1)..(275): Ceres Seq. ID no. 12436148
MNSSGEFDAAFAATIAAAAFAIAAREEKLAAQKKSVPIEEVPRALSLVKRAGSTKKPAGGNKISRWFSGKEPLEHDDDGPVSRPLKPAPGKPEGMPADHKVAPKILETSLSVRKGSGSSGKTTDRKGSKKFEQEHVQKAPSIIRPSTSYHSRRNGEDAAGVAAIGGTRSKADEWEKAKLAKVREEYEKMMETIAEWETEKKVKARRHKEQRETVLDRKRAKALEEYNQEMTRISKIAGGARSMAEERKYNDENKIKEKAHKIRSTRKPPRTCACF

SEQ ID NO: 14176 - DNA, 457 bp, Zea mays subsp. mays
  misc_feature (1)..(457): Ceres Seq. ID no. 3011619
  misc_feature (1)..(457): Ortholog of  Ceres SEQ ID NO 13655881 as cited in SEQ ID NO 64426
cacacctcctcaaccgccgcctccaagaccctagtaccgaaccccaacctcgtcccgctccggctcgtccgccacttcccggccatggccgccaccgccgcagacgagttcgtgaagggccgcgtcttccccaacggcgtcgccgtcatcacgctcgaccgacccaaggccctcaacgccatgaacctcgaaatggatgttagatacaaggcacttcttgatgaatgggaaacaaatccaagtgtcaagtgtattcttgtggaaagcagctcttctcgtgccttctcagcaggtattcacagtagagtactctttaatttgtaagatacatgagtatgcaaaaccttatatatgcttgatggatggagtgacaatgggatttggaattgggctatcagggcatggccgctaccgcattattacagagagaacactcctagccatgcctgaaaatggt

SEQ ID NO: 14177 - protein, 107 aa, Zea mays subsp. mays
  peptide (1)..(107): Ceres Seq. ID no. 3011620
HTSSTAASKTLVPNPNLVPLRLVRHFPAMAATAADEFVKGRVFPNGVAVITLDRPKALNAMNLEMDVRYKALLDEWETNPSVKCILVESSSSRAFSAGIHSRVLFNL

SEQ ID NO: 14178 - protein, 87 aa, Zea mays subsp. mays
  peptide (1)..(87): Ceres Seq. ID no. 3011621
MLDTRHFLMNGKQIQVSSVFLWKAALLVPSQQVFTVEYSLICKIHEYAKPYICLMDGVTMGFGIGLSGHGRYRIITERTLLAMPENG

SEQ ID NO: 14179 - protein, 79 aa, Zea mays subsp. mays
  peptide (1)..(79): Ceres Seq. ID no. 3011622
MAATAADEFVKGRVFPNGVAVITLDRPKALNAMNLEMDVRYKALLDEWETNPSVKCILVESSSSRAFSAGIHSRVLFNL

SEQ ID NO: 14180 - DNA, 2187 bp, Zea mays subsp. mays
  misc_feature (1)..(2187): Ceres Seq. ID no. 13666028
  misc_feature (1)..(2187): Ortholog of  Ceres SEQ ID NO 15170788 as cited in SEQ ID NO 52635
  misc_feature (1)..(2187): Ortholog of  Ceres SEQ ID NO 13638058 as cited in SEQ ID NO 55054
  misc_feature (1)..(2187): Ortholog of  Ceres SEQ ID NO 15170362 as cited in SEQ ID NO 57883
  misc_feature (1)..(2187): Ortholog of  Ceres SEQ ID NO 14303297 as cited in SEQ ID NO 67765
accgaaccaaacaacacacgtcaaagcggaaaacctcagaaaaccacaataaatcatcctcgtccaccactgcccccgctctgctgcaactccactcggcccggccgctctttccacccaccttgatcctctgatccgttggtgcttgaccgatccatggacacccacatcggatccgtgaacggggcggcgtcgaaccagacggttggctgcccggcgtcggcgccggggtgcccgatggcgtccacgccggcgcagcccgcggcgaccctgtcggcgggggaggcgtcgctggggcgccacctcgcgcgtcgcctcgtgcaggtcggcgtcaacgatgtattcgcggttccgggggacttcaacctcacgctgctcgaccacctgatcgccgagcccggcctgcgcctcgtcggctgctgcaacgagctcaacgccgggtacgccgccgacgggtacgcgcgcgcgcgcggcgtcggggcctgcgccgtcacgttcacagtcggggggctcagcgtgctcaacgccatcgcgggcgcctacagcgagaacctgcccgtcatctgcatcgccggcgggcccaactccaacgactacgggaccaaccgcatcctccaccacaccatcggcctccccgacttctcgcaggagctccgctgcttccagaccgtcacctgccatcaggcggtggtgaacaatctggatgacgcgcacgagcagatcgacacggccattgccacggcactgagggagagcaagcccgtgtacctcagcatcagctgcaacctccctgggctgcctcatcctaccttcagccgcgacccagtgcccttcttcctcacccccaggacgagcaacaagatggggctagaggctgcagtggaggcaactgtcgaattcctgaacaaggcggtgaagccagtccttgtcgccggccccaaactgcgtgtggcaaaggcaggaaaggcatttgtcgatatggtagatgccagtggctatgcctatgccgtgatgccatcggccaagggtcttgtgccagagactcacccccacttcatcggcacctactggggcgccgtcagcaccgccttctgtgcggagattgttgagtccgcagatgcctacctctttgcaggccccattttcaatgactacagctctgttggctactcattcctcctcaagaaggaaaaggccatcatcgtccagcctgagcgtgtgatagtggggaatgggccggcattcggatgtgtgatgatgaaagagttcttgtctgaattggctaagagggttaataagaacaccactgcctatgagaattacaagaggatctttgtacctgagggccagccgctggaaagcgagccaaatgagccactgcgagtgaatgtgctcttcaagcacgtccagaagatgttgactggtgatagtgcggtgattgctgagactggtgactcctggttcaactgccagaagcttaagctgccagaaggctgtgggtatgaattccaaatgcagtatggttcgattggatggtcagtgggtgcattgctcggatatgctcagggtgcgaaccacaagcgtgtgattgccttcattggtgatgggagcttccaggttacagcacaggatgtgtcaactatgctgcgatgtgagcagaacagcataatcttcctgatcaacaacggtgggtacacgattgaggtggaaatccatgacgggccatacaacgtcatcaagaactggaactacactggctttgtggacgccatccacaatggcttgggcaagtgctggacctccaaggtgaagagcgaggaggacctgacggctgccattgagacagcgctaggggagaagaaggactgcctgtgcttcatcgaggtgatcgcgcacaaggacgacaccagcaaagagctgctggaatggggctctagggtttctgccgccaactcccgaccaccaaatcctcagtagaagtccgcaggctccaagcctcggagtgtcattagtgatagtaagctgtagcacggtgggggctcaaccgaataacctgaacgcattgccctttctgttacgtgttttattttattgtgtttctgtggtcgtatatctgttttgtgacgtgttccctgcttctcccatgtgaattccagaagaactatgagaaaattcaggttggttgtc

SEQ ID NO: 14181 - protein, 606 aa, Zea mays subsp. mays
  peptide (1)..(606): Ceres Seq. ID no. 13666029
MDTHIGSVNGAASNQTVGCPASAPGCPMASTPAQPAATLSAGEASLGRHLARRLVQVGVNDVFAVPGDFNLTLLDHLIAEPGLRLVGCCNELNAGYAADGYARARGVGACAVTFTVGGLSVLNAIAGAYSENLPVICIAGGPNSNDYGTNRILHHTIGLPDFSQELRCFQTVTCHQAVVNNLDDAHEQIDTAIATALRESKPVYLSISCNLPGLPHPTFSRDPVPFFLTPRTSNKMGLEAAVEATVEFLNKAVKPVLVAGPKLRVAKAGKAFVDMVDASGYAYAVMPSAKGLVPETHPHFIGTYWGAVSTAFCAEIVESADAYLFAGPIFNDYSSVGYSFLLKKEKAIIVQPERVIVGNGPAFGCVMMKEFLSELAKRVNKNTTAYENYKRIFVPEGQPLESEPNEPLRVNVLFKHVQKMLTGDSAVIAETGDSWFNCQKLKLPEGCGYEFQMQYGSIGWSVGALLGYAQGANHKRVIAFIGDGSFQVTAQDVSTMLRCEQNSIIFLINNGGYTIEVEIHDGPYNVIKNWNYTGFVDAIHNGLGKCWTSKVKSEEDLTAAIETALGEKKDCLCFIEVIAHKDDTSKELLEWGSRVSAANSRPPNPQ

SEQ ID NO: 14182 - protein, 579 aa, Zea mays subsp. mays
  peptide (1)..(579): Ceres Seq. ID no. 13666030
MASTPAQPAATLSAGEASLGRHLARRLVQVGVNDVFAVPGDFNLTLLDHLIAEPGLRLVGCCNELNAGYAADGYARARGVGACAVTFTVGGLSVLNAIAGAYSENLPVICIAGGPNSNDYGTNRILHHTIGLPDFSQELRCFQTVTCHQAVVNNLDDAHEQIDTAIATALRESKPVYLSISCNLPGLPHPTFSRDPVPFFLTPRTSNKMGLEAAVEATVEFLNKAVKPVLVAGPKLRVAKAGKAFVDMVDASGYAYAVMPSAKGLVPETHPHFIGTYWGAVSTAFCAEIVESADAYLFAGPIFNDYSSVGYSFLLKKEKAIIVQPERVIVGNGPAFGCVMMKEFLSELAKRVNKNTTAYENYKRIFVPEGQPLESEPNEPLRVNVLFKHVQKMLTGDSAVIAETGDSWFNCQKLKLPEGCGYEFQMQYGSIGWSVGALLGYAQGANHKRVIAFIGDGSFQVTAQDVSTMLRCEQNSIIFLINNGGYTIEVEIHDGPYNVIKNWNYTGFVDAIHNGLGKCWTSKVKSEEDLTAAIETALGEKKDCLCFIEVIAHKDDTSKELLEWGSRVSAANSRPPNPQ

SEQ ID NO: 14183 - protein, 371 aa, Zea mays subsp. mays
  peptide (1)..(371): Ceres Seq. ID no. 13666031
MGLEAAVEATVEFLNKAVKPVLVAGPKLRVAKAGKAFVDMVDASGYAYAVMPSAKGLVPETHPHFIGTYWGAVSTAFCAEIVESADAYLFAGPIFNDYSSVGYSFLLKKEKAIIVQPERVIVGNGPAFGCVMMKEFLSELAKRVNKNTTAYENYKRIFVPEGQPLESEPNEPLRVNVLFKHVQKMLTGDSAVIAETGDSWFNCQKLKLPEGCGYEFQMQYGSIGWSVGALLGYAQGANHKRVIAFIGDGSFQVTAQDVSTMLRCEQNSIIFLINNGGYTIEVEIHDGPYNVIKNWNYTGFVDAIHNGLGKCWTSKVKSEEDLTAAIETALGEKKDCLCFIEVIAHKDDTSKELLEWGSRVSAANSRPPNPQ

SEQ ID NO: 14184 - DNA, 2591 bp, Zea mays subsp. mays
  misc_feature (1)..(2591): Ceres Seq. ID no. 12435670
  misc_feature (1)..(2591): Ortholog of  Ceres SEQ ID NO 13600595 as cited in SEQ ID NO 629
  misc_feature (1)..(2591): Ortholog of  Ceres SEQ ID NO 13593379 as cited in SEQ ID NO 20573
atcacaacaaaaggcgcaagcaccgcacggagagcaagcaagaaagcatccactgcactgccactacctaacaatggcccgcgcctacgtgtttctcgtcgtgctcctcctggccgctgtcatcgtggcaccgttcgcgggagcgacgcgtgtcgacgtcgttgagggcaggtccatggcgtccgccgacgcgccggaggccgccgcaccatcacccgggcctgactctgcctcgtcaccggactcctcgtcggaagcgccctccagcagcagctcctcggactagatagctctagccgcaggtcaggcatatatcaactgggcagcaaagatggcagtgggactggacactggtgtgccgtgggtgatgtgcaaggaggaggatgcacctgatccagtgatcaatgcgtgtaatggtttctactgtgatgcattttctcctaacaaaccttacaagcccacaatgtggactgaagcttggagtggctggttcacagaatttggtgggaccatccgccaacgaccggttgaagatctcgcatttgctgttgctcgatttgtacaaaagggtggctcttttatcaattactacatgtatcatggaggaacaaattttggacgcactgctgggggtcccttcatcacaacaagctatgattatgatgctccaattgatgaatatggacttattagagaaccaaagcacagtcatcttaaagaactccacagagctgttaagttatgtgaacaggctttggtttctgttgaccccacaattactacccttggaactatgcaagaggcccatgtcttccgatctccatctggttgtgcagctttccttgcaaactacaattctaactcccatgcaaaagttgtgttcaacaatgagcaatacagcctcccaccttggtcaattagcatccttcctgattgcaagaatgtagtttttaacagtgccacagttggtgttcagacatctcagatgcaaatgtggggagatggtgccacatcgatgatgtgggagaggtacgatgaggaggttgattctctggcagctgctccattgctcaccacaactggtttgcttgagcagcttaacgtcaccagagacagcagtgattatctgtggtacattaccagtgttgacataagcccatctgaaaactttctacaaggtggtggcaagcctccgtctctgagtgttcagtctgctggtcacgccttgcatgtctttgtcaacggacaacttcaaggttcttcgtatggtaccagggaggatcgaagaattaaatataatggcaatgttaaccttcgagctggtactaacaaaatcgcactactgagtgttgcttgcggattgccgaatgttggagtgcattatgagacgtggaacaccggcgtcggtggtcctgtcgtgcttcatggattgaatgaaggttcgcgagaccttacttggcagacctggtcctatcaggttggcctgaaaggcgagcagatgaatctgaactccgtagaaggctcaggctcagttgaatggatgcaagggtcactgatagctcagaagcaacagccgttggcctggtaaggcttacttcgagactcccagcggggacgagccattggctttggatatgggcagcatgggcaagggacaggtctggataaacggacaaagcattggacgctactggacagcgtatgcagacggggactgcaaagggtgcagctacaccgggaccttccgggcacccaagtgccaagcaggctgcggccagcccacccagcgttggtaccatgtgccaaggtcctggctgcagcccagcagaaacctactggtagtcttggaggaactgggtggtggggactcgtcgaagatcgccctagccaagaggtcggtctcgagcgtctgtgccgacgtgtccgaggaccatccgaacatcaagaagtggcagatcgagagctacggcgagcgcgagcaccgcagggccaaggtgcacctgaggtgcgcgcacgggcagtccatctccgcgatcagattcgcgagcttcgggacgcctgtgggcacctgcggcaacttccagcagggaggctgccactcggctagctctcacgctgtgctagagaagagatgcattgggctctagagatgcgtcgtcgccatctcccccgacaacttcggaggagacccctgcccgagcgtgacgaagagggtggcggtcgaggcggtgtgctctcccgccgcttaggcttagcctgcccgcccgcccctacttctccgactcaccgagcaacggatttgaaggccgaaaccgatgtgtgtggagagtggaactgtaagtatcgacttgcattggtcggagggaggtttagcattcgtccgtctgattccggtttaggattggtgctctgctacgtctccatgaactgttcaaagcggccagctgggtccagggatggagctgtagagagagtaggagtagaagactgatcatgcgttcttttgctgttgtgtgttagtagtagctgtgtacctacccgtgacacatctcgtttttcttgaaacggaggaagacgcaggtgaagcgtgc

SEQ ID NO: 14185 - protein, 418 aa, Zea mays subsp. mays
  peptide (1)..(418): Ceres Seq. ID no. 12435671
MAVGLDTGVPWVMCKEEDAPDPVINACNGFYCDAFSPNKPYKPTMWTEAWSGWFTEFGGTIRQRPVEDLAFAVARFVQKGGSFINYYMYHGGTNFGRTAGGPFITTSYDYDAPIDEYGLIREPKHSHLKELHRAVKLCEQALVSVDPTITTLGTMQEAHVFRSPSGCAAFLANYNSNSHAKVVFNNEQYSLPPWSISILPDCKNVVFNSATVGVQTSQMQMWGDGATSMMWERYDEEVDSLAAAPLLTTTGLLEQLNVTRDSSDYLWYITSVDISPSENFLQGGGKPPSLSVQSAGHALHVFVNGQLQGSSYGTREDRRIKYNGNVNLRAGTNKIALLSVACGLPNVGVHYETWNTGVGGPVVLHGLNEGSRDLTWQTWSYQVGLKGEQMNLNSVEGSGSVEWMQGSLIAQKQQPLAW

SEQ ID NO: 14186 - protein, 406 aa, Zea mays subsp. mays
  peptide (1)..(406): Ceres Seq. ID no. 12435672
MCKEEDAPDPVINACNGFYCDAFSPNKPYKPTMWTEAWSGWFTEFGGTIRQRPVEDLAFAVARFVQKGGSFINYYMYHGGTNFGRTAGGPFITTSYDYDAPIDEYGLIREPKHSHLKELHRAVKLCEQALVSVDPTITTLGTMQEAHVFRSPSGCAAFLANYNSNSHAKVVFNNEQYSLPPWSISILPDCKNVVFNSATVGVQTSQMQMWGDGATSMMWERYDEEVDSLAAAPLLTTTGLLEQLNVTRDSSDYLWYITSVDISPSENFLQGGGKPPSLSVQSAGHALHVFVNGQLQGSSYGTREDRRIKYNGNVNLRAGTNKIALLSVACGLPNVGVHYETWNTGVGGPVVLHGLNEGSRDLTWQTWSYQVGLKGEQMNLNSVEGSGSVEWMQGSLIAQKQQPLAW

SEQ ID NO: 14187 - protein, 374 aa, Zea mays subsp. mays
  peptide (1)..(374): Ceres Seq. ID no. 12435673
MWTEAWSGWFTEFGGTIRQRPVEDLAFAVARFVQKGGSFINYYMYHGGTNFGRTAGGPFITTSYDYDAPIDEYGLIREPKHSHLKELHRAVKLCEQALVSVDPTITTLGTMQEAHVFRSPSGCAAFLANYNSNSHAKVVFNNEQYSLPPWSISILPDCKNVVFNSATVGVQTSQMQMWGDGATSMMWERYDEEVDSLAAAPLLTTTGLLEQLNVTRDSSDYLWYITSVDISPSENFLQGGGKPPSLSVQSAGHALHVFVNGQLQGSSYGTREDRRIKYNGNVNLRAGTNKIALLSVACGLPNVGVHYETWNTGVGGPVVLHGLNEGSRDLTWQTWSYQVGLKGEQMNLNSVEGSGSVEWMQGSLIAQKQQPLAW

SEQ ID NO: 14188 - DNA, 1980 bp, Zea mays subsp. mays; identical to SEQ ID NO: 12689
  misc_feature (1)..(1980): Ceres Seq. ID no. 12450491
  misc_feature (1)..(1980): Ortholog of  Ceres SEQ ID NO 14307904 as cited in SEQ ID NO 66440
  misc_feature (1)..(1980): Ortholog of  Ceres SEQ ID NO 13659971 as cited in SEQ ID NO 67565

SEQ ID NO: 14189 - protein, 546 aa, Zea mays subsp. mays; identical to SEQ ID NO: 12690
  peptide (1)..(546): Ceres Seq. ID no. 12450492

SEQ ID NO: 14190 - protein, 530 aa, Zea mays subsp. mays; identical to SEQ ID NO: 12691
  peptide (1)..(530): Ceres Seq. ID no. 12450493

SEQ ID NO: 14191 - protein, 460 aa, Zea mays subsp. mays; identical to SEQ ID NO: 12692
  peptide (1)..(460): Ceres Seq. ID no. 12450494

SEQ ID NO: 14192 - DNA, 1738 bp, Zea mays subsp. mays
  misc_feature (1)..(1738): Ceres Seq. ID no. 12454899
  misc_feature (1)..(1738): Ortholog of  Ceres SEQ ID NO 14311028 as cited in SEQ ID NO 54464
atggactctcctctaatggagcccctactagtgcccaacaaccacagtcccggtccggttgtcgccgccacgccgggagaacacggcggtgctgcggtcgacgagagcagcaccctcgtggatgctgccagtggcacggatgagagccacagggcactcgccgacgccgacgtgaagatgaacgacgatggcgacgtacaaggggacgagctgtccgcgtccgtgcagcgccggctggacgagagcagcgccgtggagggggaggatgaagaggaggagattggtgacgacgcggaggccgacgacatggcggcgcgcatgggacggcgcctggcggcgctgcccgggaatgcgcatgagagcgagccgttcaccatcttccgcgtggcggggcccatgcgcgaccgcaaccggcacctctacgagccgcagatgatctccatcgggcccttccaccgtggcgccggccggcacctcgccgccatggaggagcacaagtggcggtacctccgcgacattctggcccgccccggcggcgcgacgctggcctcgtacgcccgcgccgcgcgctcgatggaggcctccgcgcgccgccggtacgcggagcccgtgctgctgcccgcggccgagttcgccgagatgctcctcctggacggctgcttcctggtggagttcttcctcaaggggcaggagagcgcggaggacgcgctcatcgacgcctcgtgggcgatgcagaacgtgtacaacgacatgctgctgctcgagaaccagctccccttcttcgtgctcgagcgcttctacgacctggccacgggcgggctcggccgggactacttcgtcaccaacgtcctcgtcaactacctcaccgtggacatgtgcgtcggcccgcgggaccccgagagcacgcggccccccgacggtgagatccaccacctgctgcacctctactactactggttcctgccaccggaggaccgggacgggagcggcacgggcagcaaggacaaggaagacggcgaggcgctcgaggaactgatgtccacgtctgcggatgagcgcatgccgtggcagctgccgccggcgtcggagctgaaggactccggggtgacgttccgcgccaagaagtcgccgcggagcatggtggacgtgaccttcgaccgccgcagcggcgcgctgtagatcccggccgtggagagctacacgaaccacgccatcttcgcgaacctgctggcgtacgagcagagccggggccggtgggagctgcagcgcctggtgagctacgtgctgctgatggcgtccgtggtggacgcgcggcgcgacgtggaggtcctgcagcgggccggcgtgttcgtgcgcggggacgaggagacggcggcgttctacgcgcacctgggcgagctgtgcccgccgcccgagttcgtcaacaactgctacgccgacctgttccgcgacgtcctggagtactgtgggcgcagctggaacaggcaccgcgccgtgctggtgcacgactacttcagcaacccgtggaccagcatgtccgccgccgccgccgtcttcctgcttgtcctcaccgtcgtgcagacggtctacaccgtgctgccatactacagccagaattaaccgggcaaaaaacaaaaaaggcgttttgccgccgtcacacagaccgggtgtcgccctctgttttttctttttttttgcctgcaactacaagaaaccctatgatttttncttggctcct

SEQ ID NO: 14193 - protein, 392 aa, Zea mays subsp. mays
  peptide (1)..(392): Ceres Seq. ID no. 12454900
MDSPLMEPLLVPNNHSPGPVVAATPGEHGGAAVDESSTLVDAASGTDESHRALADADVKMNDDGDVQGDELSASVQRRLDESSAVEGEDEEEEIGDDAEADDMAARMGRRLAALPGNAHESEPFTIFRVAGPMRDRNRHLYEPQMISIGPFHRGAGRHLAAMEEHKWRYLRDILARPGGATLASYARAARSMEASARRRYAEPVLLPAAEFAEMLLLDGCFLVEFFLKGQESAEDALIDASWAMQNVYNDMLLLENQLPFFVLERFYDLATGGLGRDYFVTNVLVNYLTVDMCVGPRDPESTRPPDGEIHHLLHLYYYWFLPPEDRDGSGTGSKDKEDGEALEELMSTSADERMPWQLPPASELKDSGVTFRAKKSPRSMVDVTFDRRSGAL

SEQ ID NO: 14194 - protein, 387 aa, Zea mays subsp. mays
  peptide (1)..(387): Ceres Seq. ID no. 12454901
MEPLLVPNNHSPGPVVAATPGEHGGAAVDESSTLVDAASGTDESHRALADADVKMNDDGDVQGDELSASVQRRLDESSAVEGEDEEEEIGDDAEADDMAARMGRRLAALPGNAHESEPFTIFRVAGPMRDRNRHLYEPQMISIGPFHRGAGRHLAAMEEHKWRYLRDILARPGGATLASYARAARSMEASARRRYAEPVLLPAAEFAEMLLLDGCFLVEFFLKGQESAEDALIDASWAMQNVYNDMLLLENQLPFFVLERFYDLATGGLGRDYFVTNVLVNYLTVDMCVGPRDPESTRPPDGEIHHLLHLYYYWFLPPEDRDGSGTGSKDKEDGEALEELMSTSADERMPWQLPPASELKDSGVTFRAKKSPRSMVDVTFDRRSGAL

SEQ ID NO: 14195 - protein, 333 aa, Zea mays subsp. mays
  peptide (1)..(333): Ceres Seq. ID no. 12454902
MNDDGDVQGDELSASVQRRLDESSAVEGEDEEEEIGDDAEADDMAARMGRRLAALPGNAHESEPFTIFRVAGPMRDRNRHLYEPQMISIGPFHRGAGRHLAAMEEHKWRYLRDILARPGGATLASYARAARSMEASARRRYAEPVLLPAAEFAEMLLLDGCFLVEFFLKGQESAEDALIDASWAMQNVYNDMLLLENQLPFFVLERFYDLATGGLGRDYFVTNVLVNYLTVDMCVGPRDPESTRPPDGEIHHLLHLYYYWFLPPEDRDGSGTGSKDKEDGEALEELMSTSADERMPWQLPPASELKDSGVTFRAKKSPRSMVDVTFDRRSGAL

SEQ ID NO: 14196 - DNA, 1761 bp, Zea mays subsp. mays
  misc_feature (1)..(1761): Ceres Seq. ID no. 12450583
  misc_feature (1)..(1761): Ortholog of  Ceres SEQ ID NO 15175923 as cited in SEQ ID NO 54037
  misc_feature (1)..(1761): Ortholog of  Ceres SEQ ID NO 14303366 as cited in SEQ ID NO 54418
  misc_feature (1)..(1761): Ortholog of  Ceres SEQ ID NO 13503610 as cited in SEQ ID NO 62416
  misc_feature (1)..(1761): Ortholog of  Ceres SEQ ID NO 13657610 as cited in SEQ ID NO 66165
  misc_feature (1)..(1761): Ortholog of  Ceres SEQ ID NO 13598312 as cited in SEQ ID NO 68448
  misc_feature (1)..(1761): Ortholog of  Ceres SEQ ID NO 13596100 as cited in SEQ ID NO 68573
aaccagcacaacgaagtcccgcgcacgcaaagaagtcacgtccaaactgaaggtgacaacatggagtccgcgccgtcaacggcggcggtcatggagcgcgagcgcctcacggccgagctggccttcgcggaggccgacgcagagcctagcagcttcgtcgtcaagatccggtgtcggctgccggacttcgcgcgcagcgtcaacctcaagtacgtccgcctcggcctgcgctctggcgccatccctgcgccctcctcatgggtcccgctcgcgctcgcgccgtcgctcctcgtcgcggcggcatactcgctcgttggcgcggacaagttctactcactcgacctgctcacctgcatcgcgtggctcgccgcggcggtgctgctgctcaccgtgtatttcctcatgcgcccaaggccggtgtacctcgtggacttcgcgtgctacaggccgggcaacgagcacgccatctccaaggngggcttcctggacatgacagancagcacgggctgcttcaacgcggaggcactcgagttccagaccaagatcaccaagcgctccggactcggcgatcggacgtacctcccgccgggcatccaggcacggccgccgcggctgtctatggaggaggcgcgcgcggaggccgaggccgtcatgttcggctgcctcgactcgctattctcggccacgggcatcgacccacgccgcgatgtgcgcgtgctcatcgtcaactgcagcctcttcaacccgacgccgtcgctggcgtccatggtagtgcaccgctacaagatgcgggaggacgtcaagtcgttcaaccttggaggcatggggtgcagcgcagggctcatcgccgtggacctcgccagggacatgctgcaggcgaaccccgggtgctacgccgtcntggtgagcaccgagaacatcacgctgaactggtacttcggcaacgaccgctccatgctgctgtccaactgcatcttccgcatgggcggcgctgccgcgctgctgtccaaccgccgcgccgacgccgggcgcgccaagtacaggctgctacacacggtacgcacccacaagggcgccgcggacgagtgctacggctgcgtgtaccagcgcgaggacggcaccggccgcgtcggcgtgtcgctggcgcgcgagctcatggccgtcgccggggacgcgctcaagacgaacatcaccaccctgggcccgctggtgctcccgatatcggagcagctcaagttcctcaagtccctcgtgctccgccgcgccctccgctcccgcggtgtccgtccgtacatcccggacttccggcgcgcgtttgaacacttctgcgtgcacgccggcgggcgcgccgtgctggaggaggtgcagcgcagcctggggctcagggacgcggacatggagcccagcaggtgcaccctgcaccgcttnggcaacaccagcagcagctcgctctggtacgagctcgcctacgccgaggccaanggccgcgtccgccgcggccnccgcgtgtggcagatcggattcggatccggattcaagtgcaacagtgctgtctggcgcgcgctccgcgacgtgccgcccgtgcacgccgacggcgccggcggtggcagcaactgcaacccgtgggtggacagcattcagagctacccgccaaaagagtacatctgatcgccatcttctttgtggtgaattaatcacgtcctgttggatcanttgtactanccgcgacgcagtagtgcacganaactgtatgtatggtg

SEQ ID NO: 14197 - protein, 439 aa, Zea mays subsp. mays
  peptide (1)..(439): Ceres Seq. ID no. 12450584
  misc_feature (159)..(159): Xaa is any aa, unknown or other
  misc_feature (166)..(166): Xaa is any aa, unknown or other
  misc_feature (301)..(301): Xaa is any aa, unknown or other
NQHNEVPRTQRSHVQTEGDNMESAPSTAAVMERERLTAELAFAEADAEPSSFVVKIRCRLPDFARSVNLKYVRLGLRSGAIPAPSSWVPLALAPSLLVAAAYSLVGADKFYSLDLLTCIAWLAAAVLLLTVYFLMRPRPVYLVDFACYRPGNEHAISKXGFLDMTXQHGLLQRGGTRVPDQDHQALRTRRSDVPPAGHPGTAAAAVYGGGARGGRGRHVRLPRLAILGHGHRPTPRCARAHRQLQPLQPDAVAGVHGSAPLQDAGGRQVVQPWRHGVQRRAHRRGPRQGHAAGEPRVLRRXGEHREHHAELVLRQRPLHAAVQLHLPHGRRCRAAVQPPRRRRARQVQAATHGTHPQGRRGRVLRLRVPARGRHRPRRRVAGARAHGRRRGRAQDEHHHPGPAGAPDIGAAQVPQVPRAPPRPPLPRCPSVHPGLPARV

SEQ ID NO: 14198 - protein, 419 aa, Zea mays subsp. mays
  peptide (1)..(419): Ceres Seq. ID no. 12450585
  misc_feature (139)..(139): Xaa is any aa, unknown or other
  misc_feature (146)..(146): Xaa is any aa, unknown or other
  misc_feature (281)..(281): Xaa is any aa, unknown or other
MESAPSTAAVMERERLTAELAFAEADAEPSSFVVKIRCRLPDFARSVNLKYVRLGLRSGAIPAPSSWVPLALAPSLLVAAAYSLVGADKFYSLDLLTCIAWLAAAVLLLTVYFLMRPRPVYLVDFACYRPGNEHAISKXGFLDMTXQHGLLQRGGTRVPDQDHQALRTRRSDVPPAGHPGTAAAAVYGGGARGGRGRHVRLPRLAILGHGHRPTPRCARAHRQLQPLQPDAVAGVHGSAPLQDAGGRQVVQPWRHGVQRRAHRRGPRQGHAAGEPRVLRRXGEHREHHAELVLRQRPLHAAVQLHLPHGRRCRAAVQPPRRRRARQVQAATHGTHPQGRRGRVLRLRVPARGRHRPRRRVAGARAHGRRRGRAQDEHHHPGPAGAPDIGAAQVPQVPRAPPRPPLPRCPSVHPGLPARV

SEQ ID NO: 14199 - protein, 409 aa, Zea mays subsp. mays
  peptide (1)..(409): Ceres Seq. ID no. 12450586
  misc_feature (129)..(129): Xaa is any aa, unknown or other
  misc_feature (136)..(136): Xaa is any aa, unknown or other
  misc_feature (271)..(271): Xaa is any aa, unknown or other
MERERLTAELAFAEADAEPSSFVVKIRCRLPDFARSVNLKYVRLGLRSGAIPAPSSWVPLALAPSLLVAAAYSLVGADKFYSLDLLTCIAWLAAAVLLLTVYFLMRPRPVYLVDFACYRPGNEHAISKXGFLDMTXQHGLLQRGGTRVPDQDHQALRTRRSDVPPAGHPGTAAAAVYGGGARGGRGRHVRLPRLAILGHGHRPTPRCARAHRQLQPLQPDAVAGVHGSAPLQDAGGRQVVQPWRHGVQRRAHRRGPRQGHAAGEPRVLRRXGEHREHHAELVLRQRPLHAAVQLHLPHGRRCRAAVQPPRRRRARQVQAATHGTHPQGRRGRVLRLRVPARGRHRPRRRVAGARAHGRRRGRAQDEHHHPGPAGAPDIGAAQVPQVPRAPPRPPLPRCPSVHPGLPARV

SEQ ID NO: 14200 - protein, 349 aa, Zea mays subsp. mays
  peptide (1)..(349): Ceres Seq. ID no. 12450587
  misc_feature (95)..(95): Xaa is any aa, unknown or other
  misc_feature (270)..(270): Xaa is any aa, unknown or other
  misc_feature (288)..(288): Xaa is any aa, unknown or other
  misc_feature (295)..(295): Xaa is any aa, unknown or other
MEEARAEAEAVMFGCLDSLFSATGIDPRRDVRVLIVNCSLFNPTPSLASMVVHRYKMREDVKSFNLGGMGCSAGLIAVDLARDMLQANPGCYAVXVSTENITLNWYFGNDRSMLLSNCIFRMGGAAALLSNRRADAGRAKYRLLHTVRTHKGAADECYGCVYQREDGTGRVGVSLARELMAVAGDALKTNITTLGPLVLPISEQLKFLKSLVLRRALRSRGVRPYIPDFRRAFEHFCVHAGGRAVLEEVQRSLGLRDADMEPSRCTLHRXGNTSSSSLWYELAYAEAXGRVRRGXRVWQIGFGSGFKCNSAVWRALRDVPPVHADGAGGGSNCNPWVDSIQSYPPKEYI

SEQ ID NO: 14201 - DNA, 1477 bp, Zea mays subsp. mays; identical to SEQ ID NO: 2026
  misc_feature (1)..(1477): Ceres Seq. ID no. 12405682
  misc_feature (1)..(1477): Ortholog of  Ceres SEQ ID NO 12616212 as cited in SEQ ID NO 63390

SEQ ID NO: 14202 - protein, 304 aa, Zea mays subsp. mays; identical to SEQ ID NO: 2027
  peptide (1)..(304): Ceres Seq. ID no. 12405683

SEQ ID NO: 14203 - protein, 254 aa, Zea mays subsp. mays; identical to SEQ ID NO: 2028
  peptide (1)..(254): Ceres Seq. ID no. 12405684

SEQ ID NO: 14204 - protein, 239 aa, Zea mays subsp. mays; identical to SEQ ID NO: 2029
  peptide (1)..(239): Ceres Seq. ID no. 12405685

SEQ ID NO: 14205 - DNA, 1711 bp, Zea mays subsp. mays; identical to SEQ ID NO: 6526
  misc_feature (1)..(1711): Ceres Seq. ID no. 12566006
  misc_feature (1)..(1711): Ortholog of  Ceres SEQ ID NO 15176081 as cited in SEQ ID NO 65838
  misc_feature (1)..(1711): Ortholog of  Ceres SEQ ID NO 13660287 as cited in SEQ ID NO 67316

SEQ ID NO: 14206 - protein, 441 aa, Zea mays subsp. mays; identical to SEQ ID NO: 6527
  peptide (1)..(441): Ceres Seq. ID no. 12566007

SEQ ID NO: 14207 - protein, 373 aa, Zea mays subsp. mays; identical to SEQ ID NO: 6528
  peptide (1)..(373): Ceres Seq. ID no. 12566008

SEQ ID NO: 14208 - protein, 288 aa, Zea mays subsp. mays; identical to SEQ ID NO: 6529
  peptide (1)..(288): Ceres Seq. ID no. 12566009

SEQ ID NO: 14209 - DNA, 1010 bp, Zea mays subsp. mays
  misc_feature (1)..(1010): Ceres Seq. ID no. 12450604
  misc_feature (1)..(1010): Ortholog of  Ceres SEQ ID NO 13586574 as cited in SEQ ID NO 469
acgagtgcactgcgcacaacgctgtgcgtgtgcggtgtgcgctcgacgattccagacattgcccacgggccacggccgccaaacacagctgccggaactgcacgccctcctcgctccactgatccaaagctgcgcctgcgctcgctccaaggtacccatgggatcccaccaccactacacctccgcctcgcaattcgtcttcgccgccgtcgattccaaccccaaccccaggcccagctacagccacaagcccaagaccaccgtgcaaatccccatcacgtctctaccagaacgggctcgggcgggaccgcccgacgcggcggccgccgccaagatccaggcggccttgcggggctacctggtcatgcggcacgccgcggccgtgcgcggggccgacgccgaggcgacgcggctcgagcggctgctccggcggcaggagaccgtggacgccgtccgcggcgacgagcgcgagcgggcccggttctccgaggcgctcatggccgtgctgctccgcctggacgccgtgccgggacgctacccggccgtgcgggacgcgcggcgcgccgtgagccgccgcgtcgtcggcctgcaggaagtgttcgacgctgttgtcncggcncctgcagngcagacttgcggggttccggctagcctggagcaggtcctngaagggatntggggcatcgganaggcgcctgttccggtgccgccggcgcaggcgatggccgcggtggaggaggaagtnaggaggggcggatcatactgggcaaggttttttggtggagtgggctggccgtgactgtgactctgtgagtgtgtagcgaggagggtacctgggtactagaatggctatagnctactgctgtgccgtactcggctgcacatgtattttgagatgtgtcgtattgtataccaaagtgccatgttgctgttaatgacgtgagagaaaaactgtaagtcaccatttggatcctttatttcagggctcgtttgtcggcaatgttttaccg

SEQ ID NO: 14210 - protein, 265 aa, Zea mays subsp. mays
  peptide (1)..(265): Ceres Seq. ID no. 12450605
  misc_feature (205)..(205): Xaa is any aa, unknown or other
  misc_feature (206)..(206): Xaa is any aa, unknown or other
  misc_feature (209)..(209): Xaa is any aa, unknown or other
  misc_feature (222)..(222): Xaa is any aa, unknown or other
  misc_feature (225)..(225): Xaa is any aa, unknown or other
  misc_feature (230)..(230): Xaa is any aa, unknown or other
  misc_feature (248)..(248): Xaa is any aa, unknown or other
RVHCAQRCACAVCARRFQTLPTGHGRQTQLPELHALLAPLIQSCACARSKVPMGSHHHYTSASQFVFAAVDSNPNPRPSYSHKPKTTVQIPITSLPERARAGPPDAAAAAKIQAALRGYLVMRHAAAVRGADAEATRLERLLRRQETVDAVRGDERERARFSEALMAVLLRLDAVPGRYPAVRDARRAVSRRVVGLQEVFDAVVXXPAXQTCGVPASLEQVXEGXWGIGXAPVPVPPAQAMAAVEEEXRRGGSYWARFFGGVGWP

SEQ ID NO: 14211 - protein, 216 aa, Zea mays subsp. mays
  peptide (1)..(216): Ceres Seq. ID no. 12450606
  misc_feature (205)..(205): Xaa is any aa, unknown or other
  misc_feature (207)..(207): Xaa is any aa, unknown or other
  misc_feature (209)..(209): Xaa is any aa, unknown or other
TSALRTTLCVCGVRSTIPDIAHGPRPPNTAAGTARPPRSTDPKLRLRSLQGTHGIPPPLHLRLAIRLRRRRFQPQPQAQLQPQAQDHRANPHHVSTRTGSGGTARRGGRRQDPGGLAGLPGHAARRGRARGRRRGDAARAAAPAAGDRGRRPRRRARAGPVLRGAHGRAAPPGRRAGTLPGRAGRAARREPPRRRPAGSVRRCCXGXCXADLRGSG

SEQ ID NO: 14212 - protein, 213 aa, Zea mays subsp. mays
  peptide (1)..(213): Ceres Seq. ID no. 12450607
  misc_feature (153)..(153): Xaa is any aa, unknown or other
  misc_feature (154)..(154): Xaa is any aa, unknown or other
  misc_feature (157)..(157): Xaa is any aa, unknown or other
  misc_feature (170)..(170): Xaa is any aa, unknown or other
  misc_feature (173)..(173): Xaa is any aa, unknown or other
  misc_feature (178)..(178): Xaa is any aa, unknown or other
  misc_feature (196)..(196): Xaa is any aa, unknown or other
MGSHHHYTSASQFVFAAVDSNPNPRPSYSHKPKTTVQIPITSLPERARAGPPDAAAAAKIQAALRGYLVMRHAAAVRGADAEATRLERLLRRQETVDAVRGDERERARFSEALMAVLLRLDAVPGRYPAVRDARRAVSRRVVGLQEVFDAVVXXPAXQTCGVPASLEQVXEGXWGIGXAPVPVPPAQAMAAVEEEXRRGGSYWARFFGGVGWP

SEQ ID NO: 14213 - DNA, 1884 bp, Zea mays subsp. mays
  misc_feature (1)..(1884): Ceres Seq. ID no. 12425457
  misc_feature (1)..(1884): Ortholog of  Ceres SEQ ID NO 15224473 as cited in SEQ ID NO 66479
aaaaaaacccaaaaaaacaattggcagcgcaaccgcccacagctcgtgacgaggcgacccaacccccccgtagcggcggcggcggcggcgagcaatcctccggtccggccggcggaaacactagcggcgggaggcagagcgtccaatggcggaggacgggggcaaggccgcggcggcgactgcggcggaggcgggaggcggaggagccaaggagggcggcgaggagaggaccgtcaagctcttcgtgggccaggtgcccaagcacatggccgaggccgacctgctcgccttgttccgcgaggtagccgccgtcgacgaggtcaccgtcatcaaggacaaggccaccaaggtctcccgagggtgctgcttcgtcatatgcccctcaagggaggaagctgacaaggcggtgaatgcctaccacaacaagcaaaccctctctggggtatgcgagcatactactaaccttgttctggcatcaagtcctttgcaagtaaaatatgctgatggagagttggagaggcttgaacataagcttttcattggaatgcttccgaaaaatgttacggacactgagttgactgatttgttttccaaatatgggaatgtcacggatttgcaaattttgagaggttcacaacaaacaaacaaagctggctgtgccttcattaaatatcaaacaaaagatcaagcattggcagctattgaagctctaaacgggaaacacaaaatagagggttctagcgtgccgttggttgtcaaatgggctgatacagaaaaggaaaggcaggctcggaaagcacaaaaagctcagtcacagctatctcatatacccaatgcaagtccaatgcagcagcactcttcagtatttggtgctttacagatgggatatatgcctcaatacaatggatttggttatcagccaacagggacatacggacttatgcagtaccctctatctcctatgcaaaatcaaggccccttccagaatatggtccaacctcttaatcaagggaactcgataagaggagtcaatcctgaagtgtctcccagttcagttcaaaggtcatttaatgcaatgcagctaggcagcccttatcctgctatgcctggtatgcagtatcctggatcatatcccggtggtcccatgggcaaccgtcatttgggaaattctcacaatccgattaaagttccaaattcgaatgccaattccactgtttcttctagtcccagcagcaatgctggtgggcaggttgaaggtcctcctggagccaacctatttatttatcatatcccacaagaatacggtgaccaggagctttccagcgccttccagagtttcggaagagtagtaagcgctaaggtgttcgtggacaaagcaacgggcgtgagcaaatgcttcggtttcgtgagctacgactctcctgcctccgcgcaggcagccatcaacaggatgaacggctaccagttaggcggtaaaaaactcaaggtacaactgaagagagaaaacaacaccaagcacagtagtaaaccgttttgacagacaaggcagcagccgtccggtacccggtacatattaattgaccatcaacacattgcagcagcagccttcagggcctggggagggaagagacccgtgtaccccctctttgttcaccttcacattcttggagattcgtcagtcagctcagctcgtgtaattcattgcagcagacataggccgtagcagcagtttgtaccatgatcagatcacttgtacacatgattcattcaattgttactgacagccggctttcatcctagaataattcgctgtgacaaccttatcatttgctgacgaatgaagtcaggtagacttgttcatctatggaatgatggcaactttcg

SEQ ID NO: 14214 - protein, 463 aa, Zea mays subsp. mays
  peptide (1)..(463): Ceres Seq. ID no. 12425458
MAEDGGKAAAATAAEAGGGGAKEGGEERTVKLFVGQVPKHMAEADLLALFREVAAVDEVTVIKDKATKVSRGCCFVICPSREEADKAVNAYHNKQTLSGVCEHTTNLVLASSPLQVKYADGELERLEHKLFIGMLPKNVTDTELTDLFSKYGNVTDLQILRGSQQTNKAGCAFIKYQTKDQALAAIEALNGKHKIEGSSVPLVVKWADTEKERQARKAQKAQSQLSHIPNASPMQQHSSVFGALQMGYMPQYNGFGYQPTGTYGLMQYPLSPMQNQGPFQNMVQPLNQGNSIRGVNPEVSPSSVQRSFNAMQLGSPYPAMPGMQYPGSYPGGPMGNRHLGNSHNPIKVPNSNANSTVSSSPSSNAGGQVEGPPGANLFIYHIPQEYGDQELSSAFQSFGRVVSAKVFVDKATGVSKCFGFVSYDSPASAQAAINRMNGYQLGGKKLKVQLKRENNTKHSSKPF

SEQ ID NO: 14215 - protein, 423 aa, Zea mays subsp. mays
  peptide (1)..(423): Ceres Seq. ID no. 12425459
MAEADLLALFREVAAVDEVTVIKDKATKVSRGCCFVICPSREEADKAVNAYHNKQTLSGVCEHTTNLVLASSPLQVKYADGELERLEHKLFIGMLPKNVTDTELTDLFSKYGNVTDLQILRGSQQTNKAGCAFIKYQTKDQALAAIEALNGKHKIEGSSVPLVVKWADTEKERQARKAQKAQSQLSHIPNASPMQQHSSVFGALQMGYMPQYNGFGYQPTGTYGLMQYPLSPMQNQGPFQNMVQPLNQGNSIRGVNPEVSPSSVQRSFNAMQLGSPYPAMPGMQYPGSYPGGPMGNRHLGNSHNPIKVPNSNANSTVSSSPSSNAGGQVEGPPGANLFIYHIPQEYGDQELSSAFQSFGRVVSAKVFVDKATGVSKCFGFVSYDSPASAQAAINRMNGYQLGGKKLKVQLKRENNTKHSSKPF

SEQ ID NO: 14216 - protein, 330 aa, Zea mays subsp. mays
  peptide (1)..(330): Ceres Seq. ID no. 12425460
MLPKNVTDTELTDLFSKYGNVTDLQILRGSQQTNKAGCAFIKYQTKDQALAAIEALNGKHKIEGSSVPLVVKWADTEKERQARKAQKAQSQLSHIPNASPMQQHSSVFGALQMGYMPQYNGFGYQPTGTYGLMQYPLSPMQNQGPFQNMVQPLNQGNSIRGVNPEVSPSSVQRSFNAMQLGSPYPAMPGMQYPGSYPGGPMGNRHLGNSHNPIKVPNSNANSTVSSSPSSNAGGQVEGPPGANLFIYHIPQEYGDQELSSAFQSFGRVVSAKVFVDKATGVSKCFGFVSYDSPASAQAAINRMNGYQLGGKKLKVQLKRENNTKHSSKPF

SEQ ID NO: 14217 - DNA, 1063 bp, Zea mays subsp. mays
  misc_feature (1)..(1063): Ceres Seq. ID no. 13586635
  misc_feature (1)..(1063): Ortholog of  Ceres SEQ ID NO 14312711 as cited in SEQ ID NO 1401
  misc_feature (1)..(1063): Ortholog of  Ceres SEQ ID NO 15170220 as cited in SEQ ID NO 55383
  misc_feature (1)..(1063): Ortholog of  Ceres SEQ ID NO 12616285 as cited in SEQ ID NO 63483
cacgcgattctcgactcccctccacccatacgtaacacgttctcctcccacgcccccactaaaacagatgccttcgcccttcgtgcgccacaacggaaaacccaccactcgcgagcaagtgcaggcaccgttgcccatccatcgttcatgatcccagcctgcctccgcggcctctgcacctgcttcgacgtggacgacgacaaggctaacaaccacgagcaagagccgacgatggccgccgccgccgccgctacaggcagcgccgacgacgaccagacggcaagcaccatcacccaccgcaccgtggagctgagcaccggcgtgcgcctgcacgtggcggaggccggcggcgcggcggcaacagcagcaggaggcgcgcccgcggtgctgctgctgcacggcttcccggagctgtggtacacctggcgccaccagatgcgggcgctggccgcggccgggtaccgcgccgtggcgccggacctgcgcgggtacggcggctccgacgcgccggcggtgggcggcggcgacgacgacgacgacccggccgcgcagtacaccgcgctgcacgtggtgggggacctggtggcgctcctcgacgcgctcggcgagagccaggtgttcgtggcggcgcacgactggggcgcgctcgtggcctggagcctctgcctgttccggcccgaccgggtgcgcgcgctcgtcgcgctcagcgtcgcctacacgccccgcagcgccgcgcggaagccagtcgacggcctccgggcgctcttcggcgacgactactacatctgccggatccaggagcccggggaaatagaagcagaatttgctgcagagtggtgtcttcgcccaaggatgggaagagcggggagaagacgatgaccatcgatgtaggcgtatgcagggaaggcgagttcagccaagtagcaggagcatgagcttttattagagatagatgaagataggaagatttcaaattcttttcttcttcctttttcttgtacgagtccgttcctcggagagtatgaacttgtctcgtttcaaatcccaccttttttgtttaaac

SEQ ID NO: 14218 - protein, 292 aa, Zea mays subsp. mays
  peptide (1)..(292): Ceres Seq. ID no. 13586636
HAILDSPPPIRNTFSSHAPTKTDAFALRAPQRKTHHSRASAGTVAHPSFMIPACLRGLCTCFDVDDDKANNHEQEPTMAAAAAATGSADDDQTASTITHRTVELSTGVRLHVAEAGGAAATAAGGAPAVLLLHGFPELWYTWRHQMRALAAAGYRAVAPDLRGYGGSDAPAVGGGDDDDDPAAQYTALHVVGDLVALLDALGESQVFVAAHDWGALVAWSLCLFRPDRVRALVALSVAYTPRSAARKPVDGLRALFGDDYYICRIQEPGEIEAEFAAEWCLRPRMGRAGRRR

SEQ ID NO: 14219 - protein, 243 aa, Zea mays subsp. mays
  peptide (1)..(243): Ceres Seq. ID no. 13586637
MIPACLRGLCTCFDVDDDKANNHEQEPTMAAAAAATGSADDDQTASTITHRTVELSTGVRLHVAEAGGAAATAAGGAPAVLLLHGFPELWYTWRHQMRALAAAGYRAVAPDLRGYGGSDAPAVGGGDDDDDPAAQYTALHVVGDLVALLDALGESQVFVAAHDWGALVAWSLCLFRPDRVRALVALSVAYTPRSAARKPVDGLRALFGDDYYICRIQEPGEIEAEFAAEWCLRPRMGRAGRRR

SEQ ID NO: 14220 - protein, 215 aa, Zea mays subsp. mays
  peptide (1)..(215): Ceres Seq. ID no. 13586638
MAAAAAATGSADDDQTASTITHRTVELSTGVRLHVAEAGGAAATAAGGAPAVLLLHGFPELWYTWRHQMRALAAAGYRAVAPDLRGYGGSDAPAVGGGDDDDDPAAQYTALHVVGDLVALLDALGESQVFVAAHDWGALVAWSLCLFRPDRVRALVALSVAYTPRSAARKPVDGLRALFGDDYYICRIQEPGEIEAEFAAEWCLRPRMGRAGRRR

SEQ ID NO: 14221 - DNA, 2385 bp, Zea mays subsp. mays
  misc_feature (1)..(2385): Ceres Seq. ID no. 12436349
  misc_feature (1)..(2385): Ortholog of  Ceres SEQ ID NO 14306268 as cited in SEQ ID NO 51135
  misc_feature (1)..(2385): Ortholog of  Ceres SEQ ID NO 14304565 as cited in SEQ ID NO 53297
  misc_feature (1)..(2385): Ortholog of  Ceres SEQ ID NO 14307164 as cited in SEQ ID NO 54775
  misc_feature (1)..(2385): Ortholog of  Ceres SEQ ID NO 15225368 as cited in SEQ ID NO 58345
  misc_feature (1)..(2385): Ortholog of  Ceres SEQ ID NO 15172170 as cited in SEQ ID NO 58957
  misc_feature (1)..(2385): Ortholog of  Ceres SEQ ID NO 13654989 as cited in SEQ ID NO 63117
  misc_feature (1)..(2385): Ortholog of  Ceres SEQ ID NO 13584744 as cited in SEQ ID NO 69137
aaaacattgcctccaaaaaaaatataaaaaaaacggagccagcccaaaccgcgcgccagaaatccccgagagctgaacagagctcagagctgccatgcgttccccgagccaccacgaccgagacctcctcctcctcctcctcgtactcgcggcggccgtcggttcccgcagcgacgatacgcacgcgtgccggtcgcggccgtacctctgcggcggcgtgaacatcagctacccgttccacctcgccagcgacgccacggcggtcccgggccacgatggcgagtcctactgcggctacccgggcctcgccgtcagctgcgacggcggcaacaaggccgtcctgaacctcggcgaccacgactacacagtctcgcgcatagactacgccaaccagaccgtctcgctcgccgacgcgggggccagcagcggatgccccgtcgtggaccacaacgtgacgatcccgcaggacgtccggctgtccctcctccacagcatcgactacctcctcttcttcgccggctgctccttcggcccgggcgccggccccgaccccaggccgccgaagccgccgtccatcgagcccgtcacctgcggcgagtctggcgacctgggcaagccggccgccgccatgacgttcgtgctcccgcgcgccgaggtgcctccgggcgactgggcgagcgcgtgccggaaggtcttccaggtgccggtgctcaagggctccgtcccgcccgacgcccagcacgacccgctgtggacgagcggcggcgggtacggcgaggcgctccgcgcggggttccagctcggctgggaccgcggctctggcccgtgcgcccgatgcgagcagtccggcggcaagtgcgggtacggccgcgccggcgagttcctgggatgcctctgcgccggcagccgcgtggacggcggcggcgactgcagtaagatgtcagccggctcctccgatctgccttggttcgggccaaaaagtaaaacagcagttattgccggtgtcgcggctggcgctggtgttgcaatacttgctgctgccatttttttgttcgtgaggcgcaagagaaagcagaagagagtggtcaactcgtcttcgaagctcctcaagtacagcggctctggcgggaccccgcgttcacgggtcggtgacatggagtccggcagcatcgaggacccgcctacgcatctcttcacctacgaggagcttgaggaggcgaccagttgcttcgacgaaaacagagagctcggtgacggtggcttcggcaccgtctacaaagggtacctcaaggacgggcgcgtggtggcggtgaaacggctgtacaacaacagctaccggcgcgtggagcagttccagaacgaggcggccatcctgtcggggctacgccaccccaacctcgtcatgttctacggctgcacgtccagccagagccgcgagctgctgctggtgtacgagttcgtggccaacggcacggtcgccgaccacctgcacgggcagcgggccgccgagcgcgccctcccgtggccgctccgcctcggcgtcgccgtggagtccgccgcggcgctcacctacctgcacgccatcgagccgcccgtggtgcaccgcgacgtcaagaccaccaacatcctcctggacgccgactaccacgtcaaggtcgccgacttcggcctctcccgcctcttccccctcgacgtcacgcacgtctccaccgctccccagggcacgccagggtatgtagatccagagtaccaccagtgctaccagctgacggacaagagcgacgtgtacagtttcggagtggtcctggtggagctcatctcgtccaagcccgccgtcgacgtcacccggcaccgcaacgagatcaacctggccggcatggccatcagcaagatccagaagtgccagctggaggagctcgtcgacatcgacctgggctacgagtccgacccggccaccaagaaggcgatgacggcggtcgccgagctggccttccgttgcctgcagcagaacggcgagatgcgcccgccgatcaaggaggtgctcgaggtgctcaggagcattcagggcgaataccagacggggaaggacggagacaaaaacaagggacggacccctctctcccaccacggttcatgctccgtgggagagcagggccacgacgcccaacaccagcagggactagaccagtcggtcagtgtcaaggactggagaccggagaagttgctgctgctgtgtgactgtgaggcatgccagattgcctgtcatttgttttcaggcttcgcggtccggttcctgctgatgtatatatttgttttgttgggtctgtcagagctgagggaatgtacatatatgtgaaagagtggtgaatgatatatataatacac

SEQ ID NO: 14222 - protein, 753 aa, Zea mays subsp. mays
  peptide (1)..(753): Ceres Seq. ID no. 12436350
MRSPSHHDRDLLLLLLVLAAAVGSRSDDTHACRSRPYLCGGVNISYPFHLASDATAVPGHDGESYCGYPGLAVSCDGGNKAVLNLGDHDYTVSRIDYANQTVSLADAGASSGCPVVDHNVTIPQDVRLSLLHSIDYLLFFAGCSFGPGAGPDPRPPKPPSIEPVTCGESGDLGKPAAAMTFVLPRAEVPPGDWASACRKVFQVPVLKGSVPPDAQHDPLWTSGGGYGEALRAGFQLGWDRGSGPCARCEQSGGKCGYGRAGEFLGCLCAGSRVDGGGDCSKMSAGSSDLPWFGPKSKTAVIAGVAAGAGVAILAAAIFLFVRRKRKQKRVVNSSSKLLKYSGSGGTPRSRVGDMESGSIEDPPTHLFTYEELEEATSCFDENRELGDGGFGTVYKGYLKDGRVVAVKRLYNNSYRRVEQFQNEAAILSGLRHPNLVMFYGCTSSQSRELLLVYEFVANGTVADHLHGQRAAERALPWPLRLGVAVESAAALTYLHAIEPPVVHRDVKTTNILLDADYHVKVADFGLSRLFPLDVTHVSTAPQGTPGYVDPEYHQCYQLTDKSDVYSFGVVLVELISSKPAVDVTRHRNEINLAGMAISKIQKCQLEELVDIDLGYESDPATKKAMTAVAELAFRCLQQNGEMRPPIKEVLEVLRSIQGEYQTGKDGDKNKGRTPLSHHGSCSVGEQGHDAQHQQGLDQSVSVKDWRPEKLLLLCDCEACQIACHLFSGFAVRFLLMYIFVLLGLSELRECTYM

SEQ ID NO: 14223 - protein, 575 aa, Zea mays subsp. mays
  peptide (1)..(575): Ceres Seq. ID no. 12436351
MTFVLPRAEVPPGDWASACRKVFQVPVLKGSVPPDAQHDPLWTSGGGYGEALRAGFQLGWDRGSGPCARCEQSGGKCGYGRAGEFLGCLCAGSRVDGGGDCSKMSAGSSDLPWFGPKSKTAVIAGVAAGAGVAILAAAIFLFVRRKRKQKRVVNSSSKLLKYSGSGGTPRSRVGDMESGSIEDPPTHLFTYEELEEATSCFDENRELGDGGFGTVYKGYLKDGRVVAVKRLYNNSYRRVEQFQNEAAILSGLRHPNLVMFYGCTSSQSRELLLVYEFVANGTVADHLHGQRAAERALPWPLRLGVAVESAAALTYLHAIEPPVVHRDVKTTNILLDADYHVKVADFGLSRLFPLDVTHVSTAPQGTPGYVDPEYHQCYQLTDKSDVYSFGVVLVELISSKPAVDVTRHRNEINLAGMAISKIQKCQLEELVDIDLGYESDPATKKAMTAVAELAFRCLQQNGEMRPPIKEVLEVLRSIQGEYQTGKDGDKNKGRTPLSHHGSCSVGEQGHDAQHQQGLDQSVSVKDWRPEKLLLLCDCEACQIACHLFSGFAVRFLLMYIFVLLGLSELRECTYM

SEQ ID NO: 14224 - protein, 472 aa, Zea mays subsp. mays
  peptide (1)..(472): Ceres Seq. ID no. 12436352
MSAGSSDLPWFGPKSKTAVIAGVAAGAGVAILAAAIFLFVRRKRKQKRVVNSSSKLLKYSGSGGTPRSRVGDMESGSIEDPPTHLFTYEELEEATSCFDENRELGDGGFGTVYKGYLKDGRVVAVKRLYNNSYRRVEQFQNEAAILSGLRHPNLVMFYGCTSSQSRELLLVYEFVANGTVADHLHGQRAAERALPWPLRLGVAVESAAALTYLHAIEPPVVHRDVKTTNILLDADYHVKVADFGLSRLFPLDVTHVSTAPQGTPGYVDPEYHQCYQLTDKSDVYSFGVVLVELISSKPAVDVTRHRNEINLAGMAISKIQKCQLEELVDIDLGYESDPATKKAMTAVAELAFRCLQQNGEMRPPIKEVLEVLRSIQGEYQTGKDGDKNKGRTPLSHHGSCSVGEQGHDAQHQQGLDQSVSVKDWRPEKLLLLCDCEACQIACHLFSGFAVRFLLMYIFVLLGLSELRECTYM

SEQ ID NO: 14225 - DNA, 925 bp, Zea mays subsp. mays
  misc_feature (1)..(925): Ceres Seq. ID no. 12436172
  misc_feature (1)..(925): Ortholog of  Ceres SEQ ID NO 15175965 as cited in SEQ ID NO 20627
tattagctataattgatgtttagtacatatagtataaaaggcaaggtttttgttacaaagaaaatattctctgtttgtgtgtgtgtttgcttaagtgttatggattattcattttttgtaaatttagtgatacttttatttgacctgctgcacacctagctaatagttcatttctctgttggcatagcaagaagtggtacacaggttcatttggacaaggaaactcttattatgcaagaaattttcccatgcccaaaaaggattcttcagcaggtggagcttcgaagttaccaaaagaatatgcagaaccatgggactatagccatgattatcctgttactctcccactaaggaagccctactctggaaatcctgaaattctggatgaggaagaatttggagaatcttctgccagcaggacccaagatgatgaattatctgcagcagagcagcttggattaatggatatgtcgtcggaatcacagttcctcttcttccagttgccatcctntcttcctttaccgaggcagccacaatcagttgctgaccctaacgaagtccgcgatgagaaacgtgagggcatgaggccatcatcgcacaatggctcgaaactcaaagaggttcctgaaggctatatggggaaaatgctcgtatataagagtggtaaagtgaagatgaagataggagacactctctttgatgtttcatttggctcgaattgcatgttttcccaggaggttgcagcaatcaacatcagagaaaaacattgctgtacggtgggagagatcagcaagcgtgcaatcatcaccccagatattaactacatgttgggttctgttgacaagatggaagaatagtccattggtttctttcgcgcaaaccatatagaccatattatgccattacaagatagttttgctttctt

SEQ ID NO: 14226 - protein, 202 aa, Zea mays subsp. mays
  peptide (1)..(202): Ceres Seq. ID no. 12436173
  misc_feature (88)..(88): Xaa is any aa, unknown or other
MPKKDSSAGGASKLPKEYAEPWDYSHDYPVTLPLRKPYSGNPEILDEEEFGESSASRTQDDELSAAEQLGLMDMSSESQFLFFQLPSXLPLPRQPQSVADPNEVRDEKREGMRPSSHNGSKLKEVPEGYMGKMLVYKSGKVKMKIGDTLFDVSFGSNCMFSQEVAAINIREKHCCTVGEISKRAIITPDINYMLGSVDKMEE

SEQ ID NO: 14227 - protein, 131 aa, Zea mays subsp. mays
  peptide (1)..(131): Ceres Seq. ID no. 12436174
  misc_feature (17)..(17): Xaa is any aa, unknown or other
MDMSSESQFLFFQLPSXLPLPRQPQSVADPNEVRDEKREGMRPSSHNGSKLKEVPEGYMGKMLVYKSGKVKMKIGDTLFDVSFGSNCMFSQEVAAINIREKHCCTVGEISKRAIITPDINYMLGSVDKMEE

SEQ ID NO: 14228 - protein, 129 aa, Zea mays subsp. mays
  peptide (1)..(129): Ceres Seq. ID no. 12436175
  misc_feature (15)..(15): Xaa is any aa, unknown or other
MSSESQFLFFQLPSXLPLPRQPQSVADPNEVRDEKREGMRPSSHNGSKLKEVPEGYMGKMLVYKSGKVKMKIGDTLFDVSFGSNCMFSQEVAAINIREKHCCTVGEISKRAIITPDINYMLGSVDKMEE

SEQ ID NO: 14229 - DNA, 423 bp, Zea mays subsp. mays
  misc_feature (1)..(423): Ceres Seq. ID no. 3114586
  misc_feature (1)..(423): Ortholog of  Ceres SEQ ID NO 13662804 as cited in SEQ ID NO 65394
aaaatatatatatcctcgctttccttcccgtcgccgcctgaaaccgctgcgctctcggcttggatagcaagggtctcagtctctcagagggagcaagaagaggatctgagggtgagatggcgatcgaccacgagtccccgttcaaggagctccgcctcaagaaccgaaggatcatgggcggcggcggccctgaccctgagccggaggaggaggaggaggagggcgtcacggcggcgtacgcggagcggtggccgcggtggctgcagccgctgctgtccgcgcgcttcttcgcgcagtgcaggacgcacagcgactccaaccgcagcggcgaatgcaacatgttctgcctggactgctcggccgccgggggcacgggcacgggcgcgggcgcgctctgctcgctgtgcctggcgcagcacgggc

SEQ ID NO: 14230 - protein, 141 aa, Zea mays subsp. mays
  peptide (1)..(141): Ceres Seq. ID no. 3114587
KIYISSLSFPSPPETAALSAWIARVSVSQREQEEDLRVRWRSTTSPRSRSSASRTEGSWAAAALTLSRRRRRRRASRRRTRSGGRGGCSRCCPRASSRSAGRTATPTAAANATCSAWTARPPGARARARARSARCAWRSTG

SEQ ID NO: 14231 - protein, 102 aa, Zea mays subsp. mays
  peptide (1)..(102): Ceres Seq. ID no. 3114588
MAIDHESPFKELRLKNRRIMGGGGPDPEPEEEEEEGVTAAYAERWPRWLQPLLSARFFAQCRTHSDSNRSGECNMFCLDCSAAGGTGTGAGALCSLCLAQHG

SEQ ID NO: 14232 - protein, 83 aa, Zea mays subsp. mays
  peptide (1)..(83): Ceres Seq. ID no. 3114589
MGGGGPDPEPEEEEEEGVTAAYAERWPRWLQPLLSARFFAQCRTHSDSNRSGECNMFCLDCSAAGGTGTGAGALCSLCLAQHG

SEQ ID NO: 14233 - DNA, 1315 bp, Zea mays subsp. mays
  misc_feature (1)..(1315): Ceres Seq. ID no. 13635214
  misc_feature (1)..(1315): Ortholog of  Ceres SEQ ID NO 13590307 as cited in SEQ ID NO 67154
gcatcccatctgctatcccttggttgccgcwkcctccaaagccactcccaaacccccgcttccagaaccttctcgaarctcyccgcckcytcctcyactmgcwccgatggcgaaggaaccratgcgcgtgctcgtcactggmgccgcaggrcaaattggatatgcyctkgttcccatgattgctaggggwgttatgcttggtgcagaccagcctgttattctgcacatgcttgayattccgccagcagctgaagcccttawtggtgttaagatggagtyggttgatgctgcrtttcctcttctgaagggagtygttgckacaactgatgttgtggaagcgctgcactggsgtsaatgtggccgtcatgswtggtggattccccaggaaggagggaannnaaaggaaaagatgttatgtckaaaaaatgtttcaatctacaaawcccaagcatctgctccttgaagcccatgcrgcycccaactgcaaggttctggtggttgccaacccagcraacaccaatgctcttatcttgaaagaatttgctccatcwattccwgakargaacgttacttgcctgacccgkctggaccacaacagggctcttggccagatttctgagagacttartgtccaagtyagtgatgtgaagaatgttatcatctggggtaaccactcgtccwctcagtaccctgatgttaaccatgccacagtgaagacttccactggggagaagcctgttcgtgagcttgtctgctgatgaygagtggctyaatggygaattcatcacaactgtccaacagcgtggtgctgcaatcatyaaagcgagaaagttctccagygctctctcrgctgctagctctgcttgtgaccayattcgtgattgggttcttggaacmcctgagggkacatttgtttccatgggtgtgtaytcygatggttcatayggtgttccttcyggactyatttaytcattcccagtaacatgcagtgggtgggtgaatggaaaatcgttcaaggcctcccgatygaygagytctcaaggaagaagawgggatgccactgcccaagagctgmcggargagaagacgcttgcttactcatgcctcgagtaaattctaccacayccagagagcaattgccaccccaatgttttgaataaaaaaagaaactccaactcsattcatagattctcwctcagaactgctgcacgtcgcagtgcaggcgtgttgctggcttcgcccacgcttctttttttgcctgtgatttgcgacgacatttatatttattgaaatcttgcagaatcgcttgacgatg

SEQ ID NO: 14234 - protein, 153 aa, Zea mays subsp. mays
  peptide (1)..(153): Ceres Seq. ID no. 15220341
  misc_feature (10)..(10): Xaa is any aa, unknown or other
  misc_feature (11)..(11): Xaa is any aa, unknown or other
  misc_feature (26)..(26): Xaa is any aa, unknown or other
  misc_feature (27)..(27): Xaa is any aa, unknown or other
  misc_feature (29)..(29): Xaa is any aa, unknown or other
  misc_feature (30)..(30): Xaa is any aa, unknown or other
  misc_feature (32)..(32): Xaa is any aa, unknown or other
  misc_feature (33)..(33): Xaa is any aa, unknown or other
  misc_feature (34)..(34): Xaa is any aa, unknown or other
  misc_feature (40)..(40): Xaa is any aa, unknown or other
  misc_feature (47)..(47): Xaa is any aa, unknown or other
  misc_feature (50)..(50): Xaa is any aa, unknown or other
  misc_feature (55)..(55): Xaa is any aa, unknown or other
  misc_feature (56)..(56): Xaa is any aa, unknown or other
  misc_feature (63)..(63): Xaa is any aa, unknown or other
  misc_feature (78)..(78): Xaa is any aa, unknown or other
  misc_feature (87)..(87): Xaa is any aa, unknown or other
  misc_feature (93)..(93): Xaa is any aa, unknown or other
  misc_feature (97)..(97): Xaa is any aa, unknown or other
  misc_feature (104)..(104): Xaa is any aa, unknown or other
  misc_feature (106)..(106): Xaa is any aa, unknown or other
  misc_feature (117)..(117): Xaa is any aa, unknown or other
  misc_feature (118)..(118): Xaa is any aa, unknown or other
  misc_feature (123)..(123): Xaa is any aa, unknown or other
  misc_feature (132)..(132): Xaa is any aa, unknown or other
  misc_feature (133)..(133): Xaa is any aa, unknown or other
  misc_feature (140)..(140): Xaa is any aa, unknown or other
  misc_feature (148)..(148): Xaa is any aa, unknown or other
HPICYPLVAXXSKATPKPPLPEPSRXXPXXPXXXPMAKEXMRVLVTXAAXQIGYXXVPMIARXVMLGADQPVILHMLXIPPAAEALXGVKMEXVDAXFPLLKGXVXTTDVVEALHWXXCGRHXWWIPQEGGXXKEKMLCXKNVSIYKXQASAP

SEQ ID NO: 14235 - protein, 143 aa, Zea mays subsp. mays
  peptide (1)..(143): Ceres Seq. ID no. 15220342
  misc_feature (8)..(8): Xaa is any aa, unknown or other
  misc_feature (9)..(9): Xaa is any aa, unknown or other
  misc_feature (15)..(15): Xaa is any aa, unknown or other
  misc_feature (24)..(24): Xaa is any aa, unknown or other
  misc_feature (25)..(25): Xaa is any aa, unknown or other
  misc_feature (32)..(32): Xaa is any aa, unknown or other
  misc_feature (39)..(39): Xaa is any aa, unknown or other
  misc_feature (49)..(49): Xaa is any aa, unknown or other
  misc_feature (50)..(50): Xaa is any aa, unknown or other
  misc_feature (62)..(62): Xaa is any aa, unknown or other
  misc_feature (75)..(75): Xaa is any aa, unknown or other
  misc_feature (77)..(77): Xaa is any aa, unknown or other
  misc_feature (78)..(78): Xaa is any aa, unknown or other
  misc_feature (79)..(79): Xaa is any aa, unknown or other
  misc_feature (86)..(86): Xaa is any aa, unknown or other
  misc_feature (101)..(101): Xaa is any aa, unknown or other
  misc_feature (104)..(104): Xaa is any aa, unknown or other
  misc_feature (119)..(119): Xaa is any aa, unknown or other
MLWKRCTXXNVAVMXGGFPRKEGXXRKRCYVXKMFQSTXPKHLLLEAHXXPNCKVLVVANPXNTNALILKEFAPXIXXXNVTCLTXLDHNRALGQISERLXVQXSDVKNVIIWGNHSSXQYPDVNHATVKTSTGEKPVRELVC

SEQ ID NO: 14236 - protein, 130 aa, Zea mays subsp. mays
  peptide (1)..(130): Ceres Seq. ID no. 15220343
  misc_feature (2)..(2): Xaa is any aa, unknown or other
  misc_feature (11)..(11): Xaa is any aa, unknown or other
  misc_feature (12)..(12): Xaa is any aa, unknown or other
  misc_feature (19)..(19): Xaa is any aa, unknown or other
  misc_feature (26)..(26): Xaa is any aa, unknown or other
  misc_feature (36)..(36): Xaa is any aa, unknown or other
  misc_feature (37)..(37): Xaa is any aa, unknown or other
  misc_feature (49)..(49): Xaa is any aa, unknown or other
  misc_feature (62)..(62): Xaa is any aa, unknown or other
  misc_feature (64)..(64): Xaa is any aa, unknown or other
  misc_feature (65)..(65): Xaa is any aa, unknown or other
  misc_feature (66)..(66): Xaa is any aa, unknown or other
  misc_feature (73)..(73): Xaa is any aa, unknown or other
  misc_feature (88)..(88): Xaa is any aa, unknown or other
  misc_feature (91)..(91): Xaa is any aa, unknown or other
  misc_feature (106)..(106): Xaa is any aa, unknown or other
MXGGFPRKEGXXRKRCYVXKMFQSTXPKHLLLEAHXXPNCKVLVVANPXNTNALILKEFAPXIXXXNVTCLTXLDHNRALGQISERLXVQXSDVKNVIIWGNHSSXQYPDVNHATVKTSTGEKPVRELVC

SEQ ID NO: 14237 - DNA, 2372 bp, Zea mays subsp. mays
  misc_feature (1)..(2372): Ceres Seq. ID no. 12450487
  misc_feature (1)..(2372): Ortholog of  Ceres SEQ ID NO 13582619 as cited in SEQ ID NO 56520
  misc_feature (1)..(2372): Ortholog of  Ceres SEQ ID NO 12611392 as cited in SEQ ID NO 56826
  misc_feature (1)..(2372): Ortholog of  Ceres SEQ ID NO 13660872 as cited in SEQ ID NO 60830
  misc_feature (1)..(2372): Ortholog of  Ceres SEQ ID NO 12616221 as cited in SEQ ID NO 63291
aacgaattcctcctcgggctcccacctaatcgtgttcgccgcctgcctctcccaaaccctagcaacccacgatcgaacccaaatccgctcctcccacccgaggggattatgcgaaattccccgagattctagcccagcactagcagatcgatccatcgcttgcccacctgccggccaccaacccttgtagtctcagtcaatctgtagattgagactacgatgagcctgtcaccgctcgactcctcctccccgccggccgcggctgcggctgctgctacggaggtgcccctcgccccgggcttccgcttccaccccaccgacgaggagctcgtctcctactacctccgccgccgcgtcctcggccgccgcctccgcgtcgacgccatcgccgagatcgacctctaccgcctcgagccctgggacctcccctccctctcccgcatccgcagccgcgacgcccagtggtacttcttcgcccgtctcgaccgcaaggtcgccggcgctggcgccgggggccggggcggtcccggcaacaggaccaaccgcgctacgccgagggggtactggaagaccacgggcaaggaccgcgaggtgcaccaccgcggcaagcccgtcgggatgaagaagacgctcgtcttccacgccgggagggcgcctaagggcgagaggaccaactgggtcatgcacgagtaccgcctcctcgatgcagacggacctcaggatctgcatgtggtttgtagaatcttccagaagcatgggtctggaccacagaacggtgcgcagtatggtgcaccatacatggaagaggaatgggaagaggatgatgatgctattgagaatggttctacccacgatgcatctggtcaaattgctgcaaccacctgtgctgtagatgaggagtcaaatgaggacgatgagaatgcatattgtgaaacaaacagacctgctcgagtagaaccatctcatctgccttcggttcatgaaatgctcaatccaccagagatggctcctctccaaggtcaatattctaaagagacaagcgatggaagttgttctgatgttgctatttctctggaagagattttgcaggaacctttgtcaaatattagtgtggagaatatgcatagacttgaagggcagaatgccactgatgataacatcagtgttgataacttgttatcagcatatcccacgaaagataatggctacgtaggccagtataacactatgaatgggagtgctccagcagatgaagctcacgcacgctggcctttgagaacatatagtaatcagaattatgtcaatggccctcttgctgatgagttctttgacacagggaatgataccaatggggttgcatattccaggcagcagcaagctgatggctttccagcacctcgccaagttgatgaaagtatggtattttatgatgccccatctgattacaacttggtggatggaaaagatgacttcgtatatctgaacgacattctgaatgagccacttggaaatgaatcgctctttgatggagatgatatgatggcttactttgatgccacagagaatgatttcaagtatgacattttgggctctggtcagggtttggattatccacttgcagacatgccgttgaactttgcccaaaagagtgacaaggaagacaagtttacattcgaagggatctctgaggttccggaagcaaatcctcagtacggtgcatcctcatctggttcacatgaagatctgtatactgatactgaatttctaggtgtgccaacagatgacactgctgataaaacttacggaaatcgcctggccagcatgttaggctctatcccagctccacctgcaatggcctcagaattcccgccgtcaacagggaaatctgctgggatgctttcggctgtcagctcgagctcaattcgttttactgctggtatcatccaacttgatggcctcactttcagcagcggctccggtcagtggcccttgcagaagaatggagacttgagtttgcttgtctcttttgctgtggagggcgacgtggcatccaagctccctgttggtcttgggcgtgctactcggattagcaccgttcccatggtgctgcgcagtggtttttaccttttctttatgtcggccatgattctcttgtttagctacaaagtagggtcgtgtatctacagcaggtaagttgaagttgatggcgcctcttgtccggccagacctgtgggctgtttattttagttcaacacgtggatcattccctcagtgatgggggtatagcagtcgttcgacaccttttttacacatttaccattttgacctgtcaaaacatacagcaataaactttcgaactggtggtggtgatc

SEQ ID NO: 14238 - protein, 657 aa, Zea mays subsp. mays
  peptide (1)..(657): Ceres Seq. ID no. 12450488
MSLSPLDSSSPPAAAAAAATEVPLAPGFRFHPTDEELVSYYLRRRVLGRRLRVDAIAEIDLYRLEPWDLPSLSRIRSRDAQWYFFARLDRKVAGAGAGGRGGPGNRTNRATPRGYWKTTGKDREVHHRGKPVGMKKTLVFHAGRAPKGERTNWVMHEYRLLDADGPQDLHVVCRIFQKHGSGPQNGAQYGAPYMEEEWEEDDDAIENGSTHDASGQIAATTCAVDEESNEDDENAYCETNRPARVEPSHLPSVHEMLNPPEMAPLQGQYSKETSDGSCSDVAISLEEILQEPLSNISVENMHRLEGQNATDDNISVDNLLSAYPTKDNGYVGQYNTMNGSAPADEAHARWPLRTYSNQNYVNGPLADEFFDTGNDTNGVAYSRQQQADGFPAPRQVDESMVFYDAPSDYNLVDGKDDFVYLNDILNEPLGNESLFDGDDMMAYFDATENDFKYDILGSGQGLDYPLADMPLNFAQKSDKEDKFTFEGISEVPEANPQYGASSSGSHEDLYTDTEFLGVPTDDTADKTYGNRLASMLGSIPAPPAMASEFPPSTGKSAGMLSAVSSSSIRFTAGIIQLDGLTFSSGSGQWPLQKNGDLSLLVSFAVEGDVASKLPVGLGRATRISTVPMVLRSGFYLFFMSAMILLFSYKVGSCIYSR

SEQ ID NO: 14239 - protein, 524 aa, Zea mays subsp. mays
  peptide (1)..(524): Ceres Seq. ID no. 12450489
MKKTLVFHAGRAPKGERTNWVMHEYRLLDADGPQDLHVVCRIFQKHGSGPQNGAQYGAPYMEEEWEEDDDAIENGSTHDASGQIAATTCAVDEESNEDDENAYCETNRPARVEPSHLPSVHEMLNPPEMAPLQGQYSKETSDGSCSDVAISLEEILQEPLSNISVENMHRLEGQNATDDNISVDNLLSAYPTKDNGYVGQYNTMNGSAPADEAHARWPLRTYSNQNYVNGPLADEFFDTGNDTNGVAYSRQQQADGFPAPRQVDESMVFYDAPSDYNLVDGKDDFVYLNDILNEPLGNESLFDGDDMMAYFDATENDFKYDILGSGQGLDYPLADMPLNFAQKSDKEDKFTFEGISEVPEANPQYGASSSGSHEDLYTDTEFLGVPTDDTADKTYGNRLASMLGSIPAPPAMASEFPPSTGKSAGMLSAVSSSSIRFTAGIIQLDGLTFSSGSGQWPLQKNGDLSLLVSFAVEGDVASKLPVGLGRATRISTVPMVLRSGFYLFFMSAMILLFSYKVGSCIYSR

SEQ ID NO: 14240 - protein, 503 aa, Zea mays subsp. mays
  peptide (1)..(503): Ceres Seq. ID no. 12450490
MHEYRLLDADGPQDLHVVCRIFQKHGSGPQNGAQYGAPYMEEEWEEDDDAIENGSTHDASGQIAATTCAVDEESNEDDENAYCETNRPARVEPSHLPSVHEMLNPPEMAPLQGQYSKETSDGSCSDVAISLEEILQEPLSNISVENMHRLEGQNATDDNISVDNLLSAYPTKDNGYVGQYNTMNGSAPADEAHARWPLRTYSNQNYVNGPLADEFFDTGNDTNGVAYSRQQQADGFPAPRQVDESMVFYDAPSDYNLVDGKDDFVYLNDILNEPLGNESLFDGDDMMAYFDATENDFKYDILGSGQGLDYPLADMPLNFAQKSDKEDKFTFEGISEVPEANPQYGASSSGSHEDLYTDTEFLGVPTDDTADKTYGNRLASMLGSIPAPPAMASEFPPSTGKSAGMLSAVSSSSIRFTAGIIQLDGLTFSSGSGQWPLQKNGDLSLLVSFAVEGDVASKLPVGLGRATRISTVPMVLRSGFYLFFMSAMILLFSYKVGSCIYSR

SEQ ID NO: 14241 - DNA, 2703 bp, Zea mays subsp. mays
  misc_feature (1)..(2703): Ceres Seq. ID no. 15180196
  misc_feature (1)..(2703): Ortholog of  Ceres SEQ ID NO 14310016 as cited in SEQ ID NO 20753
tcccccgatgctgtttgaattcctgcgacactgttaccgagaacatcctaatcaaaagtgttgtctagcactctagctgcttctctcggttctcgcgactcccaaacggcaaaacgccaaaaccctagccgcggccattccggaattggccatggaggcgagggcgtcgccgcgtccgtcggtctccatcggtggcggcggcggcttcggagctgggcggggtgacggcagcgccttctcgtttctctcaaaggggtggcgcgaggtgcgggattccgccaccgccgacctgcgcctcatgcgcgcgagggctgattccctccgcacgctcgcggaccgcgagctcgagcacctcctcgcgtccgcctccactgcgctgacctccgcgccgccgccgccgctcgccgcgggggcgcccatagccgagttcgagttcgtgcgcacacggatccagcccaagatctccgaactgcggcgcccggtacgtgtcacaggagcgggagctcggccgcagggtgctcgaggggtgggcgccgcgcggggcggggaaacccgcgcgcgcacgtgtcgacctctctgggatcaccgccatccgcaacgccatcgtctctgaagtggatggcggggagcgctggaggcgcgtggtgtggaacggggaggcggaagaggggaaagaatgggaggtgctcaggatcatacgggacggcatcaaagagttcgagcgccggagccagaccaaggagatttttgagggattgcgcagtaccggcgagctcgtcgagaaattcaagtccagcctgaaatcattcaacatggagtctcaaggatccaaggaaatccaaccactggatctacctgaaatactggcaaatcttgtaaggcagtctgaaccatttttggatcaacttggtgtacggagagatcagtgtgacaaactagtggaggcattgtgtaggaaacaaaatcattccctttcagaaaacacatccttgcctgtaaatgataagtcatcagatgaacttgacttgagaatcgcaagcgtgcttcaaagttctggttatcatgctgatgatggtttctggagtgaacctacaaagtctgaggtctcagacgataaaagacatgtggctatagtcaccacagcaagtttaccatggatgacaggaacagcagttaatccattgttccgtgcagcatatctcgcaaaaggtactagacaagatgtgacactggtagtgccttggctttgcaaatcagaccaagaactggtatacccaaatagcatgacgttcagttcaccagaagagcaggaaacttatataaggagctggctggaggaaagactaggatttgaatcaaacttcaagatatccttttatcctggcaagttctcaaaagagcggcgtagcatcattccagctggtgatacgtctcagttcataccgtcaagagaagctgatatagcaatattggaagaaccagaacatctcaattggtatcatcatgggaaacgctggactgacaagttcaaccatgttgttggtgtagttcatacaaactacctggaatatatcaagagagagaagaatggagctcttcaggcctttctagttaaacacatcaacaattgggtgaccagagcatactgcgacaaggtcttacgtctttctgcagcaactcaagatttaccaaagtctattgtttgcaatgttcatggtgttaacccaaagttcctgaagattggagaagaaataactgccaatagggggagttgggagcctccattttccaagggagcatattttcttgggaagatggtttgggccaaaggttatagggaactcatagatttgatggctaaacataaaagcgatttagaaggattcaagttagatgtatacggaagtggtgaggactcgcaagaagttcaatccactgccaggaggttagatttgagtctcaattttttcaagggaagggatcatgctgataattcactccatgggtacaaggttttcataaatccgagcattagtgatgtcctgtgcacagcaacggcagaggctcttgcaatggggaaattcgtgatctgcgcagaacatccatcaaatgagtttttcatgtcatttccgaactgtttgacatacaagacttcagaggagtttgttgcgagagtgaaagaggcaatggatagagaaccccaaccgctaacccctgagcaaagatacaacctttcgtgggaggcagcgactgagagattcatggagtactcagaccttgacaaggttctgaacaatgaggctgctcagcctggacaaggtaggaaaagaaagaataaaagaacctcacagcctaatttgtccgacataatggatggcggtctagcgttggcccatcgatgcttaactggcaatgaggttctcaggctggcaaccggagccattcctggtacccgggactacgataagcagcactgtgtggatatgggtctcttgcctcctcaagtacagcaccctgtatatggctggtgatgactgatgagcacccaaagctaatcgtaggtatatatgtacataatacaccatgtcgctcttatgtcgactaatgtttggagtattgtaattgtagcatgcatgacgacctttgcccattgttttgtactctgtaataaggttctttctccttaaattggagttttatcgc

SEQ ID NO: 14242 - protein, 572 aa, Zea mays subsp. mays
  peptide (1)..(572): Ceres Seq. ID no. 15180197
MESQGSKEIQPLDLPEILANLVRQSEPFLDQLGVRRDQCDKLVEALCRKQNHSLSENTSLPVNDKSSDELDLRIASVLQSSGYHADDGFWSEPTKSEVSDDKRHVAIVTTASLPWMTGTAVNPLFRAAYLAKGTRQDVTLVVPWLCKSDQELVYPNSMTFSSPEEQETYIRSWLEERLGFESNFKISFYPGKFSKERRSIIPAGDTSQFIPSREADIAILEEPEHLNWYHHGKRWTDKFNHVVGVVHTNYLEYIKREKNGALQAFLVKHINNWVTRAYCDKVLRLSAATQDLPKSIVCNVHGVNPKFLKIGEEITANRGSWEPPFSKGAYFLGKMVWAKGYRELIDLMAKHKSDLEGFKLDVYGSGEDSQEVQSTARRLDLSLNFFKGRDHADNSLHGYKVFINPSISDVLCTATAEALAMGKFVICAEHPSNEFFMSFPNCLTYKTSEEFVARVKEAMDREPQPLTPEQRYNLSWEAATERFMEYSDLDKVLNNEAAQPGQGRKRKNKRTSQPNLSDIMDGGLALAHRCLTGNEVLRLATGAIPGTRDYDKQHCVDMGLLPPQVQHPVYGW

SEQ ID NO: 14243 - protein, 457 aa, Zea mays subsp. mays
  peptide (1)..(457): Ceres Seq. ID no. 15180198
MTGTAVNPLFRAAYLAKGTRQDVTLVVPWLCKSDQELVYPNSMTFSSPEEQETYIRSWLEERLGFESNFKISFYPGKFSKERRSIIPAGDTSQFIPSREADIAILEEPEHLNWYHHGKRWTDKFNHVVGVVHTNYLEYIKREKNGALQAFLVKHINNWVTRAYCDKVLRLSAATQDLPKSIVCNVHGVNPKFLKIGEEITANRGSWEPPFSKGAYFLGKMVWAKGYRELIDLMAKHKSDLEGFKLDVYGSGEDSQEVQSTARRLDLSLNFFKGRDHADNSLHGYKVFINPSISDVLCTATAEALAMGKFVICAEHPSNEFFMSFPNCLTYKTSEEFVARVKEAMDREPQPLTPEQRYNLSWEAATERFMEYSDLDKVLNNEAAQPGQGRKRKNKRTSQPNLSDIMDGGLALAHRCLTGNEVLRLATGAIPGTRDYDKQHCVDMGLLPPQVQHPVYGW

SEQ ID NO: 14244 - protein, 415 aa, Zea mays subsp. mays
  peptide (1)..(415): Ceres Seq. ID no. 15180199
MTFSSPEEQETYIRSWLEERLGFESNFKISFYPGKFSKERRSIIPAGDTSQFIPSREADIAILEEPEHLNWYHHGKRWTDKFNHVVGVVHTNYLEYIKREKNGALQAFLVKHINNWVTRAYCDKVLRLSAATQDLPKSIVCNVHGVNPKFLKIGEEITANRGSWEPPFSKGAYFLGKMVWAKGYRELIDLMAKHKSDLEGFKLDVYGSGEDSQEVQSTARRLDLSLNFFKGRDHADNSLHGYKVFINPSISDVLCTATAEALAMGKFVICAEHPSNEFFMSFPNCLTYKTSEEFVARVKEAMDREPQPLTPEQRYNLSWEAATERFMEYSDLDKVLNNEAAQPGQGRKRKNKRTSQPNLSDIMDGGLALAHRCLTGNEVLRLATGAIPGTRDYDKQHCVDMGLLPPQVQHPVYGW

SEQ ID NO: 14245 - DNA, 1676 bp, Zea mays subsp. mays
  misc_feature (1)..(1676): Ceres Seq. ID no. 12450484
  misc_feature (1)..(1676): Ortholog of  Ceres SEQ ID NO 14315989 as cited in SEQ ID NO 57571
atctccatgagttgagcagcctgagcagatgaggtgaagtgagttggctgccagcgcgtgctgtatcttgtatggctgtactgtatcccccctcctctcgctaaccctttgtctccttcccccacaaaaccacctccgccccctcctcccaccagtacctgtgagttgtgagctccttgctgcggctgcttgctcccctcatctctagcctgtacactggttggagtggttgccagtgttctccccacctgctcctctcgatccactccatcccctttggccatgggtgtgcaagcatacatctacggtaattgcatgcttctcctgccttgaagcggaagccttagccttagcctgccgcctgggggaaaccttctgtttcgccgctgccgctgctgtggtataaaggtggaaggctgatccgtcgacggacggagtcccggcggagggaagattgctccgtcgccgcggtttcgcggccaagaaggtggcctacgcggtggaaaggggcggggcggggccgtgaaggaatcttgctccgacgccaatccctcctctgcccctcgattttcgggcggttgtcggtgctgcctttcgcagtaagaggtgggatctcgcgtccggcggcggcggcggcggcgttgctggatcgagcaacctccggcggtggcctgcgtacctgcgtggccgatctgtgcgtggctgttcatctcttcgccggcattgcgaggcgggctcgccgggcggtgtggattgcttgcggtgaggagtgcggaggagaggtgctgatccaagcggcgggcgggcgggcggctgcacgccaggtgttcgacgaaggaccccgaccgggccagccagccatgagggacttcccttcctgcttcggcgagagcggcgtccagatcgcggacgcgtcgtcgtcgtcgtccagcgccggcaagggcgcggcgcagaacctggtgacctgcctctaccagacgcagttctcgggccggccctgcgtgatctcgctcacgtggagcaggagcctcatggggcagggcctcagcgtcggcgtcgacgacctgtccggccactgcctctgcaaggcggacatcaagccgtggctcttctccaagaagaaggggtccaagagcctcgacgtcgaggacggcaagatcgacatcttctgggacctgtcgggcgccaagttcggcgctgggccagagccggtggaggggttctatgtcgcagtggtgttcgaccttgagctcgtgctcttgctcggcgacatgaagaaggatgcctacaggaagactggagccaaccggtcgatgctgaacgccgcgtttgtggcgaggagggagcacatatacggcaagaagacctactccgccaaggcgcagttctgcgacaatggccagttccatgacattgtcatagactgcgacaccgtcgacctgaaggatccgtgtcttgaaataagagttgacaagaagcccgtgatgctttaaagacccaccggcactggcagtgagtgttgctgcttgtgtaggctttggtacgtatgggctttatttgcttctggatgttgtgtactacttgggtttgttgaattattatgagcagttgcgtattgtaattcagctgggctacctggacattgttatgtattaataaatgctttgctttcttct

SEQ ID NO: 14246 - protein, 210 aa, Zea mays subsp. mays
  peptide (1)..(210): Ceres Seq. ID no. 12450485
MRDFPSCFGESGVQIADASSSSSSAGKGAAQNLVTCLYQTQFSGRPCVISLTWSRSLMGQGLSVGVDDLSGHCLCKADIKPWLFSKKKGSKSLDVEDGKIDIFWDLSGAKFGAGPEPVEGFYVAVVFDLELVLLLGDMKKDAYRKTGANRSMLNAAFVARREHIYGKKTYSAKAQFCDNGQFHDIVIDCDTVDLKDPCLEIRVDKKPVML

SEQ ID NO: 14247 - protein, 153 aa, Zea mays subsp. mays
  peptide (1)..(153): Ceres Seq. ID no. 12450486
MGQGLSVGVDDLSGHCLCKADIKPWLFSKKKGSKSLDVEDGKIDIFWDLSGAKFGAGPEPVEGFYVAVVFDLELVLLLGDMKKDAYRKTGANRSMLNAAFVARREHIYGKKTYSAKAQFCDNGQFHDIVIDCDTVDLKDPCLEIRVDKKPVML

SEQ ID NO: 14248 - DNA, 441 bp, Zea mays subsp. mays
  misc_feature (1)..(441): Ceres Seq. ID no. 4614339
  misc_feature (1)..(441): Ortholog of  Ceres SEQ ID NO 13654451 as cited in SEQ ID NO 67881
agaacgccccagccttccacctcgaactccgcggcgcccagcgccctcggtaaccgccccccgccccgccacagagacaggtcgacgagacagacaaaggccggccgccatgggagaggacaagaaggcgggcaacaaggacgccgccggcggcgacaagaagaaggacgccggcgccggggccgcgccgcagcccatcgtgctgaaggtcgacttgcactgcgccggctgcgccaacaaggtccgcaaggccatcaagcacgccccaggtgtggagtcggtgacgccggacatggcggcgggtaaggtggtcgtgaccggtctggcggacgcggtggagctcaaggagcgcatcgaggccagggcgaagaagcccgtgcagatcgtctccgccggcgccggcccacccaagaaggagaaggacaaggagaaggawgaagg

SEQ ID NO: 14249 - protein, 146 aa, Zea mays subsp. mays
  peptide (1)..(146): Ceres Seq. ID no. 4614340
  misc_feature (145)..(145): Xaa is any aa, unknown or other
ERPSLPPRTPRRPAPSVTAPRPATETGRRDRQRPAAMGEDKKAGNKDAAGGDKKKDAGAGAAPQPIVLKVDLHCAGCANKVRKAIKHAPGVESVTPDMAAGKVVVTGLADAVELKERIEARAKKPVQIVSAGAGPPKKEKDKEKXE

SEQ ID NO: 14250 - protein, 110 aa, Zea mays subsp. mays
  peptide (1)..(110): Ceres Seq. ID no. 4614341
  misc_feature (109)..(109): Xaa is any aa, unknown or other
MGEDKKAGNKDAAGGDKKKDAGAGAAPQPIVLKVDLHCAGCANKVRKAIKHAPGVESVTPDMAAGKVVVTGLADAVELKERIEARAKKPVQIVSAGAGPPKKEKDKEKXE

SEQ ID NO: 14251 - protein, 101 aa, Zea mays subsp. mays
  peptide (1)..(101): Ceres Seq. ID no. 4614342
RTPQPSTSNSAAPSALGNRPPPRHRDRSTRQTKAGRHGRGQEGGQQGRRRRRQEEGRRRRGRAAAHRAEGRLALRRLRQQGPQGHQARPRCGVGDAGHGGG

SEQ ID NO: 14252 - DNA, 1845 bp, Zea mays subsp. mays
  misc_feature (1)..(1845): Ceres Seq. ID no. 12454887
  misc_feature (1)..(1845): Ortholog of  Ceres SEQ ID NO 13639120 as cited in SEQ ID NO 56708
agtcctgggccgctgctgccgcgcactgcctgcttcggccgagacgagccccccggcccccgtttcgctcccatctcgcgacactctgcccacagctcactcgcctccgtctctccccgtcaaaaaagccacccccgtcccccgcgccgcgccacccgcctttggcctctggctggcaccctttcccccgcctagaaacccgagctctccctctagccttctgccgcacacttccgagttccttccgccacaacatccacacgcaaacctcgcgatggccgcgtcggaatccgtgccgttctgcgtcaaagggggcggcggcggcgcgcccaggccgcacggccacctggtgctcccggcggggcgggtccgcgaggggcttgcgttcgcggcgggcgccgtggtggccgctctcgtgctcctctcctcggcctccgtcctcacgccgccgcccgtgcccaacatcgtctccctccccctgtcgtcgtcgcccgccaacgccaacgccgccatctcttcctcccctgccgtggccgtcggcgagggcccgcgcacgttctacgacgaccgggagctgtcgtacgccgtcggggggcagcgcgtcacgggctgggacgcgaagcgcgcggcgtggctgcggacccggggcctggacggcgcggcggtcgcggggcgggtggtgatggtgaccgggtcgcanccggagccatgcaaggggccggggggcgaccacgcgctgctgcggttcctcaagaataagctggactactgccgcctccacgggatcgagctcctgtacaacaccgcgctgctggagccgtccatggtggcgtactgggccaagatccccagcgtgcgcgccgcgatgctggcgcacccggacgccgagtgggtgtggtgggtggacgccgacgccgtgttcacggacatggacttctccctcccgctggagcggtaccgcgagagcagcctggtggtgtacgggtgggagcgggaggtgtacgaggagcggtcgtgggtggggctcaacgccggcgtcttcctcatccgtaactgccagtggtcgctggacctcatggacgcgtgggcgcgcatgggcccggcctcgccggagtacgcgcggtgggggaagacgctgcgcgaggagctggaggggaaacccaacgacgagtcggacgaccagtcggcgctcgtgtacctcctgtccaggcacctggagcgggagcggtgggcgaacgccacgttcctcgagtccgggtactacttccaggggtactgggcggagatcgtggacaggctcgacggcgtggccacgcgctacgaggccgtggagcgcggccgcgcagggggccgggccgggctccgccgccgccacgcggagcgggagcacctcctgtacgcggcggcgcgacgtgagncggtgcggcagcagcgagggaccggcggaggcgtgcccgggccggacggcggcggccagaaggggtggcgccgccccttcgtcacgcacttcacggggtgccagccctgcggcggcgcgcccaaccggatgtacacgcggaggcggtgcgccgaggggatccgccgcgccctggcgttcgcggacgaccaggtgctccgctcctacggcttccgacacgccgcgccgctcagcgacagcgtcacgccgctgccgttcgactaccccgccgcacactgatgggcggtcgcgttggtgggcggtgggttcggcaactggctatggctattggctaggttaattaaatgagacaaaaccatgaatgcgatgcaatgtgtcaagtcacagtgtgtgtactatacatttttgatttgggtgtcatccatatt

SEQ ID NO: 14253 - protein, 564 aa, Zea mays subsp. mays
  peptide (1)..(564): Ceres Seq. ID no. 12454888
  misc_feature (233)..(233): Xaa is any aa, unknown or other
  misc_feature (473)..(473): Xaa is any aa, unknown or other
VLGRCCRALPASAETSPPAPVSLPSRDTLPTAHSPPSLPVKKATPVPRAAPPAFGLWLAPFPPPRNPSSPSSLLPHTSEFLPPQHPHANLAMAASESVPFCVKGGGGGAPRPHGHLVLPAGRVREGLAFAAGAVVAALVLLSSASVLTPPPVPNIVSLPLSSSPANANAAISSSPAVAVGEGPRTFYDDRELSYAVGGQRVTGWDAKRAAWLRTRGLDGAAVAGRVVMVTGSXPEPCKGPGGDHALLRFLKNKLDYCRLHGIELLYNTALLEPSMVAYWAKIPSVRAAMLAHPDAEWVWWVDADAVFTDMDFSLPLERYRESSLVVYGWEREVYEERSWVGLNAGVFLIRNCQWSLDLMDAWARMGPASPEYARWGKTLREELEGKPNDESDDQSALVYLLSRHLERERWANATFLESGYYFQGYWAEIVDRLDGVATRYEAVERGRAGGRAGLRRRHAEREHLLYAAARREXVRQQRGTGGGVPGPDGGGQKGWRRPFVTHFTGCQPCGGAPNRMYTRRRCAEGIRRALAFADDQVLRSYGFRHAAPLSDSVTPLPFDYPAAH

SEQ ID NO: 14254 - protein, 473 aa, Zea mays subsp. mays
  peptide (1)..(473): Ceres Seq. ID no. 12454889
  misc_feature (142)..(142): Xaa is any aa, unknown or other
  misc_feature (382)..(382): Xaa is any aa, unknown or other
MAASESVPFCVKGGGGGAPRPHGHLVLPAGRVREGLAFAAGAVVAALVLLSSASVLTPPPVPNIVSLPLSSSPANANAAISSSPAVAVGEGPRTFYDDRELSYAVGGQRVTGWDAKRAAWLRTRGLDGAAVAGRVVMVTGSXPEPCKGPGGDHALLRFLKNKLDYCRLHGIELLYNTALLEPSMVAYWAKIPSVRAAMLAHPDAEWVWWVDADAVFTDMDFSLPLERYRESSLVVYGWEREVYEERSWVGLNAGVFLIRNCQWSLDLMDAWARMGPASPEYARWGKTLREELEGKPNDESDDQSALVYLLSRHLERERWANATFLESGYYFQGYWAEIVDRLDGVATRYEAVERGRAGGRAGLRRRHAEREHLLYAAARREXVRQQRGTGGGVPGPDGGGQKGWRRPFVTHFTGCQPCGGAPNRMYTRRRCAEGIRRALAFADDQVLRSYGFRHAAPLSDSVTPLPFDYPAAH

SEQ ID NO: 14255 - protein, 337 aa, Zea mays subsp. mays
  peptide (1)..(337): Ceres Seq. ID no. 12454890
  misc_feature (6)..(6): Xaa is any aa, unknown or other
  misc_feature (246)..(246): Xaa is any aa, unknown or other
MVTGSXPEPCKGPGGDHALLRFLKNKLDYCRLHGIELLYNTALLEPSMVAYWAKIPSVRAAMLAHPDAEWVWWVDADAVFTDMDFSLPLERYRESSLVVYGWEREVYEERSWVGLNAGVFLIRNCQWSLDLMDAWARMGPASPEYARWGKTLREELEGKPNDESDDQSALVYLLSRHLERERWANATFLESGYYFQGYWAEIVDRLDGVATRYEAVERGRAGGRAGLRRRHAEREHLLYAAARREXVRQQRGTGGGVPGPDGGGQKGWRRPFVTHFTGCQPCGGAPNRMYTRRRCAEGIRRALAFADDQVLRSYGFRHAAPLSDSVTPLPFDYPAAH

SEQ ID NO: 14256 - DNA, 1144 bp, Zea mays subsp. mays
  misc_feature (1)..(1144): Ceres Seq. ID no. 12436331
  misc_feature (1)..(1144): Ortholog of  Ceres SEQ ID NO 15169372 as cited in SEQ ID NO 58778
aaaaactttgctagctagctagctgaaaggctccggccgggcctggctggtacacacgcccagatccttgttgtgcacgtacgttccaaacttgctcatactactcagagcgcggcgacatgttcggctttctgaaacaacggaggcagaccccgtcagggttctcgtcgtcgtcagccgccgaggaggtcaccgccggcatcgatggctccggcctcgtcgcgatcgtcacgggcgcgtctagtgggatcggtgccgagacctgccgagttctggcgctgcggggcgttcgcgttgtgatgggcgtgaggacaccgtctgccggtgagcgcgtcaaggaagagatcgtgaagaacgtccccgctgccggaatcgcattttctcctttcaccctttcggatgatggaattgagttacaatttgcaacaaattaccttggccattttctactcactaatcttttacttgaaaagatgaaaatcacggccatggagagtggaatagaaggtagggttgtgattgttgcttctgacagctacaagcacacgtatcgagagggaattcgttttgataaactcaatgatgcatcaggctataaaggcatcctggcttatggccaatcgaagctggccaatatattgcgttccaatgaactttcttgccgcttgaaggaagaagatgcaaaagtagtagtcaactcactgcatccgggagttgttgccaccaacatcacgcgccatctgggtatcataaaagatattctttctccaattgctaaacttgtactaaggggtgttgaacaaggtgcagccaccgtttgttatctggcattgcatcctcaggttgctggagtcaccggcaaatactttgtggatttcaatgctgttgaactaaaaccgcctgcaactgacaagtagttgtccaaaaagctctgggattttagtgtcagcctactccagtgatataactgccgattagttctcctacgccagctggtaaataaaggtcgatctgaatgagagatcatgtttcagtaatagaacaaggtgatccagcagtgtaatatctactactacttattgtttgactagatatggatgccatatgtttgtaatttgaataaattgattggatacatttctgc

SEQ ID NO: 14257 - protein, 265 aa, Zea mays subsp. mays
  peptide (1)..(265): Ceres Seq. ID no. 12436332
MFGFLKQRRQTPSGFSSSSAAEEVTAGIDGSGLVAIVTGASSGIGAETCRVLALRGVRVVMGVRTPSAGERVKEEIVKNVPAAGIAFSPFTLSDDGIELQFATNYLGHFLLTNLLLEKMKITAMESGIEGRVVIVASDSYKHTYREGIRFDKLNDASGYKGILAYGQSKLANILRSNELSCRLKEEDAKVVVNSLHPGVVATNITRHLGIIKDILSPIAKLVLRGVEQGAATVCYLALHPQVAGVTGKYFVDFNAVELKPPATDK

SEQ ID NO: 14258 - protein, 205 aa, Zea mays subsp. mays
  peptide (1)..(205): Ceres Seq. ID no. 12436333
MGVRTPSAGERVKEEIVKNVPAAGIAFSPFTLSDDGIELQFATNYLGHFLLTNLLLEKMKITAMESGIEGRVVIVASDSYKHTYREGIRFDKLNDASGYKGILAYGQSKLANILRSNELSCRLKEEDAKVVVNSLHPGVVATNITRHLGIIKDILSPIAKLVLRGVEQGAATVCYLALHPQVAGVTGKYFVDFNAVELKPPATDK

SEQ ID NO: 14259 - protein, 147 aa, Zea mays subsp. mays
  peptide (1)..(147): Ceres Seq. ID no. 12436334
MKITAMESGIEGRVVIVASDSYKHTYREGIRFDKLNDASGYKGILAYGQSKLANILRSNELSCRLKEEDAKVVVNSLHPGVVATNITRHLGIIKDILSPIAKLVLRGVEQGAATVCYLALHPQVAGVTGKYFVDFNAVELKPPATDK

SEQ ID NO: 14260 - DNA, 1564 bp, Zea mays subsp. mays
  misc_feature (1)..(1564): Ceres Seq. ID no. 12443313
  misc_feature (1)..(1564): Ortholog of  Ceres SEQ ID NO 13594604 as cited in SEQ ID NO 52106
ataaatgcacccccacttgtcccttttccctcctcctccagctcctctctgggctgtggtggctgtggctcccaagcacacggcccgcacgagcagttggaacagattcctcgaccgcgtcgccccggaacccagttcttggcatccggtgcctagcttcgtcgcccctccggcaaagaccacctccagccctccacctcccgcggtagcgcttgctgctagtgagctagtatatttctgaaaccggaaacccgcgacacgggaccgagttcttgggagcggattcggctcgctgcaggctgaggctaccggcgcgctcttctccacggcggcggagagccagccagtagttgcgaccggaggcgggcatgggcgcgggcgtgtcgggcctgccgggcgcggagcccggcggcaaggtggcgcgcggcgccgggctgggcgacctcccggagctgtgcaccgcggaggtgctgctccgcctcggcgcgccggacatatgccggctcgcgcggctcaacctagcgttccgcggcgccgcgggcgcggacttcgtgtgggaggccaagctgccggggaactacgcccggctcctgcgcttcgtggacgaggccgaggaggagggagggagtgggcgggattggagcgcggtggggaggaaagacgtctttgcgaggctcgccagacctgtgccgttcgacggtggcaaaagggaattctggctggagaagaacgaaggtgggatctgcatggccttgtcgtcgaaagcgctggtcattactgggattgacgatagaagatactggattaacatgccaacatctgaatctaggttccactccactgcatacctgcagcaaatctggtggttcgaggtggtgggagaggtggacttctgcttcccggctgggacggcctacagcctctacttcaggctccacctcggcaagtcctccacgcgcttcggccgccgggtctgcagctcggagcaggtccacggctgggacaagaagcccgtgcggttccagctctccacgtcggacggccagcacgccgtgtcccagtgctacctggacgagcctggacgctggatcctgtaccacgtcggcgatttcgacgcgccgccgagctctggtcagccgaccaggctcaagttttcgttagcgcagatcgactgcacccacacgaaaggtggcctctgtgtcgattcggtgctcgtgtatcccaaggggtttcagccggaacgggtggtcagggctcggaaatgaccgtgtgtcggcatttggtagctatagaggcactgcgcattagagcgagctgtcgagagatatgagtagcctgccatttttttttagcttgggctaattgtattctgaaagcgtttatacatagcatagtagcacactggacttttttttttgtttgatagcattagtgtgtgcgcgttactttgccatttctcatgaaggccatggcaaataaggaacctttgtacgtgtacctagctccggtacatcgcgtttgcatcggcacacaatgaagccaggaaggtctcctgttttatttc

SEQ ID NO: 14261 - protein, 298 aa, Zea mays subsp. mays
  peptide (1)..(298): Ceres Seq. ID no. 12443314
MGAGVSGLPGAEPGGKVARGAGLGDLPELCTAEVLLRLGAPDICRLARLNLAFRGAAGADFVWEAKLPGNYARLLRFVDEAEEEGGSGRDWSAVGRKDVFARLARPVPFDGGKREFWLEKNEGGICMALSSKALVITGIDDRRYWINMPTSESRFHSTAYLQQIWWFEVVGEVDFCFPAGTAYSLYFRLHLGKSSTRFGRRVCSSEQVHGWDKKPVRFQLSTSDGQHAVSQCYLDEPGRWILYHVGDFDAPPSSGQPTRLKFSLAQIDCTHTKGGLCVDSVLVYPKGFQPERVVRARK

SEQ ID NO: 14262 - protein, 172 aa, Zea mays subsp. mays
  peptide (1)..(172): Ceres Seq. ID no. 12443315
MALSSKALVITGIDDRRYWINMPTSESRFHSTAYLQQIWWFEVVGEVDFCFPAGTAYSLYFRLHLGKSSTRFGRRVCSSEQVHGWDKKPVRFQLSTSDGQHAVSQCYLDEPGRWILYHVGDFDAPPSSGQPTRLKFSLAQIDCTHTKGGLCVDSVLVYPKGFQPERVVRARK

SEQ ID NO: 14263 - protein, 151 aa, Zea mays subsp. mays
  peptide (1)..(151): Ceres Seq. ID no. 12443316
MPTSESRFHSTAYLQQIWWFEVVGEVDFCFPAGTAYSLYFRLHLGKSSTRFGRRVCSSEQVHGWDKKPVRFQLSTSDGQHAVSQCYLDEPGRWILYHVGDFDAPPSSGQPTRLKFSLAQIDCTHTKGGLCVDSVLVYPKGFQPERVVRARK

SEQ ID NO: 14264 - DNA, 2189 bp, Zea mays subsp. mays
  misc_feature (1)..(2189): Ceres Seq. ID no. 12454883
  misc_feature (1)..(2189): Ortholog of  Ceres SEQ ID NO 15170532 as cited in SEQ ID NO 55671
  misc_feature (1)..(2189): Ortholog of  Ceres SEQ ID NO 13663060 as cited in SEQ ID NO 60964
  misc_feature (1)..(2189): Ortholog of  Ceres SEQ ID NO 13598532 as cited in SEQ ID NO 65204
  misc_feature (1)..(2189): Ortholog of  Ceres SEQ ID NO 13656849 as cited in SEQ ID NO 65764
  misc_feature (1)..(2189): Ortholog of  Ceres SEQ ID NO 13656501 as cited in SEQ ID NO 69206
ggtggcttctcattcattgttgattgattgatcctccccgcctcactcctttgtctcctcgcctcgtgctcgctcgctcccctcgccctggcgaggagggcagcagaaaccctagcggctcaggccgggcgggggttagatgctccaaggttcgagagggaagggtaggttagtggtgcgccatcgactatgggctgcgtcttcggccgggcggctgcgtcgtcctctgcagcgccgaagaagaagtggggcaaggggaggtcgtccccgcagcccgaagcggggtcgccctccgcagtcgccgccaccgacggggacgggaggccgcggcggcggctcgggggccgcagggcgtcgggacccaggcagggttgcgtccccgcggctgccgcggcggagcagctcgccgccggttggccaccgtggctcgttgcagtcgctggggaggccctccgcggctgggcgccgcgccgcgccgacacgttcgagaagcttaataagataggatcgggcacgtacagcaacgtgtaccgggcgagggacaccgtctctggccggatcgtcgctcttaaaaaggtccgcttcgataacctcgagccagaaagcgtcaagtttatggcccgggaaatactgatcctaaggagactcgaccaccccaacatcatcaaattagagggcttggtcacctccaggatgtcatgcagcctttaccttgtcttcgagtacatggagcatgatcttgctggtcttgcggcaagttgtgatgtcaagttcacgttgcctcagataaaatgttacatacagcagctgttgtcagggcttgagcattgtcatgacaataatgtattgcaccgggatatcaaggggtcaaacttgttgttggataataatgggattcttaagattgcggattttgggctggcaacattctttgatccacgacataaacgaccaatgacgagccgagtggtcacgctatggtaccgtccaccagaattgttacttggtgccactgagtatagtgtaggtgttgatttgtggagtgctggatgcattcttgcagagctcctgtatggaaagcccataatgcctgggcgcactgaggtggaacagttgcacaagattttcaagctatgtggttccccttctgaggagtactggaagaagtctaaattgccacacgcaacaatattcaaacctcaacaaccctataaacgttgcatcagggagacatttaaagattttcctacatcggctctgccattggttgaaactctgcttgcaattgatccagctgagcgacaaactgcctcagctgcattacacagtgattttttttcaaccgagccttatgcttgtaacccttcaagtctgccaacatatccaccaagcaaggagatggatgccaagttaagagacgaggaggctagaagactacgagcggctgcaaaggccaagggagaacagaaaaggactcgaccacgtgatcgatctcggagggctggaccagcaccagaagctaatgcagagattcaagcaaacttagaccagaggcgacgaatgataactcatgcaaatgcaaagagtaaaagtgagaagtttcctcctccgcatcaggatggaggtacgggtaatccgcttggatcctatcatcatatggagcctatgttcgagcaccaggatgcttccttcagtacagtagtccccatagagaaggggacctcacaaacatggtccgggccgttgtttgatccagcagctctcgggcagtcgaggcggaagaagcaaactaccctagatgctaaggctgctgcttactcaaagcagctccaaaaggaaaagggagggatacgagcccgataacaaaatgtcgttttcatggcctacagatgaattttcttgttttgttcctctggtggttggaaacaggcaacaatgcgctgctgtagggtgaagtctcccggattgtgtacatgtcatgtggtagcgtttccaagtactgtttagatgcttctgaacaagctgccgtcacccggacgggactttaggggtttgagactcgtatttgtgctctttatggcaattcagttgcccatgtgtatatatggagcaattctttcttgtgtatgtaaagagacggcggtagctttgatttcttaataatgaatcaagtgtgatggcgaccttcc

SEQ ID NO: 14265 - protein, 557 aa, Zea mays subsp. mays
  peptide (1)..(557): Ceres Seq. ID no. 12454884
MGCVFGRAAASSSAAPKKKWGKGRSSPQPEAGSPSAVAATDGDGRPRRRLGGRRASGPRQGCVPAAAAAEQLAAGWPPWLVAVAGEALRGWAPRRADTFEKLNKIGSGTYSNVYRARDTVSGRIVALKKVRFDNLEPESVKFMAREILILRRLDHPNIIKLEGLVTSRMSCSLYLVFEYMEHDLAGLAASCDVKFTLPQIKCYIQQLLSGLEHCHDNNVLHRDIKGSNLLLDNNGILKIADFGLATFFDPRHKRPMTSRVVTLWYRPPELLLGATEYSVGVDLWSAGCILAELLYGKPIMPGRTEVEQLHKIFKLCGSPSEEYWKKSKLPHATIFKPQQPYKRCIRETFKDFPTSALPLVETLLAIDPAERQTASAALHSDFFSTEPYACNPSSLPTYPPSKEMDAKLRDEEARRLRAAAKAKGEQKRTRPRDRSRRAGPAPEANAEIQANLDQRRRMITHANAKSKSEKFPPPHQDGGTGNPLGSYHHMEPMFEHQDASFSTVVPIEKGTSQTWSGPLFDPAALGQSRRKKQTTLDAKAAAYSKQLQKEKGGIRAR

SEQ ID NO: 14266 - protein, 415 aa, Zea mays subsp. mays
  peptide (1)..(415): Ceres Seq. ID no. 12454885
MAREILILRRLDHPNIIKLEGLVTSRMSCSLYLVFEYMEHDLAGLAASCDVKFTLPQIKCYIQQLLSGLEHCHDNNVLHRDIKGSNLLLDNNGILKIADFGLATFFDPRHKRPMTSRVVTLWYRPPELLLGATEYSVGVDLWSAGCILAELLYGKPIMPGRTEVEQLHKIFKLCGSPSEEYWKKSKLPHATIFKPQQPYKRCIRETFKDFPTSALPLVETLLAIDPAERQTASAALHSDFFSTEPYACNPSSLPTYPPSKEMDAKLRDEEARRLRAAAKAKGEQKRTRPRDRSRRAGPAPEANAEIQANLDQRRRMITHANAKSKSEKFPPPHQDGGTGNPLGSYHHMEPMFEHQDASFSTVVPIEKGTSQTWSGPLFDPAALGQSRRKKQTTLDAKAAAYSKQLQKEKGGIRAR

SEQ ID NO: 14267 - protein, 389 aa, Zea mays subsp. mays
  peptide (1)..(389): Ceres Seq. ID no. 12454886
MSCSLYLVFEYMEHDLAGLAASCDVKFTLPQIKCYIQQLLSGLEHCHDNNVLHRDIKGSNLLLDNNGILKIADFGLATFFDPRHKRPMTSRVVTLWYRPPELLLGATEYSVGVDLWSAGCILAELLYGKPIMPGRTEVEQLHKIFKLCGSPSEEYWKKSKLPHATIFKPQQPYKRCIRETFKDFPTSALPLVETLLAIDPAERQTASAALHSDFFSTEPYACNPSSLPTYPPSKEMDAKLRDEEARRLRAAAKAKGEQKRTRPRDRSRRAGPAPEANAEIQANLDQRRRMITHANAKSKSEKFPPPHQDGGTGNPLGSYHHMEPMFEHQDASFSTVVPIEKGTSQTWSGPLFDPAALGQSRRKKQTTLDAKAAAYSKQLQKEKGGIRAR

SEQ ID NO: 14268 - DNA, 447 bp, Zea mays subsp. mays
  misc_feature (1)..(447): Ceres Seq. ID no. 3104735
  misc_feature (1)..(447): Ortholog of  Ceres SEQ ID NO 13500573 as cited in SEQ ID NO 67431
  misc_feature (1)..(447): Ortholog of  Ceres SEQ ID NO 13656501 as cited in SEQ ID NO 69206
gtctttcacgcttgaccagccctgctctgctcattgctggaggcaaaggaaggtttgcgctggaggggttcgtcagagatggacttcttcagtgaatacggcgatgcgaacagatacaaaatccaagaggtcattggcaaaggaagttatggcgttgtttgctcagctgttgaccaacataccagtgacaaggtggcaatcaagaaaatacacaatatctttgagcacttatctgatgctgcccggatcctacgtgagatcaaactgcttcggctattacgccatcctgatatagttgagatcaagcatataatgctgcctccatcaaggagggacttcaaagatatctatgttgtatttgagctgatggatacagacctccaccaagtcatcaaggcaaatgatgatttaacccgagagcatcatcagttctttctctatcagatg

SEQ ID NO: 14269 - protein, 123 aa, Zea mays subsp. mays
  peptide (1)..(123): Ceres Seq. ID no. 3104736
MDFFSEYGDANRYKIQEVIGKGSYGVVCSAVDQHTSDKVAIKKIHNIFEHLSDAARILREIKLLRLLRHPDIVEIKHIMLPPSRRDFKDIYVVFELMDTDLHQVIKANDDLTREHHQFFLYQM

SEQ ID NO: 14270 - protein, 97 aa, Zea mays subsp. mays
  peptide (1)..(97): Ceres Seq. ID no. 3104737
SFTLDQPCSAHCWRQRKVCAGGVRQRWTSSVNTAMRTDTKSKRSLAKEVMALFAQLLTNIPVTRWQSRKYTISLSTYLMLPGSYVRSNCFGYYAILI

SEQ ID NO: 14271 - protein, 63 aa, Zea mays subsp. mays
  peptide (1)..(63): Ceres Seq. ID no. 3104738
MRTDTKSKRSLAKEVMALFAQLLTNIPVTRWQSRKYTISLSTYLMLPGSYVRSNCFGYYAILI

SEQ ID NO: 14272 - DNA, 1679 bp, Zea mays subsp. mays
  misc_feature (1)..(1679): Ceres Seq. ID no. 12462479
  misc_feature (1)..(1679): Ortholog of  Ceres SEQ ID NO 13586631 as cited in SEQ ID NO 485
  misc_feature (1)..(1679): Ortholog of  Ceres SEQ ID NO 14311866 as cited in SEQ ID NO 51178
  misc_feature (1)..(1679): Ortholog of  Ceres SEQ ID NO 14310917 as cited in SEQ ID NO 53231
  misc_feature (1)..(1679): Ortholog of  Ceres SEQ ID NO 15170037 as cited in SEQ ID NO 55447
  misc_feature (1)..(1679): Ortholog of  Ceres SEQ ID NO 13582350 as cited in SEQ ID NO 56734
  misc_feature (1)..(1679): Ortholog of  Ceres SEQ ID NO 12476493 as cited in SEQ ID NO 58163
  misc_feature (1)..(1679): Ortholog of  Ceres SEQ ID NO 14310807 as cited in SEQ ID NO 58696
  misc_feature (1)..(1679): Ortholog of  Ceres SEQ ID NO 12578315 as cited in SEQ ID NO 62451
  misc_feature (1)..(1679): Ortholog of  Ceres SEQ ID NO 12615466 as cited in SEQ ID NO 62761
  misc_feature (1)..(1679): Ortholog of  Ceres SEQ ID NO 12617090 as cited in SEQ ID NO 64005
  misc_feature (1)..(1679): Ortholog of  Ceres SEQ ID NO 15226458 as cited in SEQ ID NO 64042
  misc_feature (1)..(1679): Ortholog of  Ceres SEQ ID NO 13597439 as cited in SEQ ID NO 64081
  misc_feature (1)..(1679): Ortholog of  Ceres SEQ ID NO 13597233 as cited in SEQ ID NO 64370
  misc_feature (1)..(1679): Ortholog of  Ceres SEQ ID NO 13584577 as cited in SEQ ID NO 65298
  misc_feature (1)..(1679): Ortholog of  Ceres SEQ ID NO 13600370 as cited in SEQ ID NO 0
  misc_feature (1)..(1679): Ortholog of  Ceres SEQ ID NO 13623850 as cited in SEQ ID NO 0
  misc_feature (1)..(1679): Ortholog of  Ceres SEQ ID NO 14309162 as cited in SEQ ID NO 0
actagcaaacattaataacgcaagcggcactgttgtcagtgtcagtgcacagtagatatactgctagctagcttacctggcagccagtgcaactgcactgcacgtctccaatgcgctgctattataacgacgcgaacgccgcgcaggccttccgtggtatacagcagcagaagcagcatcacgatcccggcccggcggcccgtacgtcgacgaggaggaggaggacgtacgtacgcagagcagctgctggcaccatggctcccgtgagcatcagcgctgttccgttcctcccgacggcggcggagggggagacgaacgtgcgcgcgtcgttcgtgcgcgaggaggacgagcgccccaaggtgccgcacgaccgcttcagcgacgaggtgccggtggtgtcgctcgagggcatcgacgggccgcgcaggcgggccgagatccgcggccgcgtggccgcggcctgcgaggactggggcatcttccaggtggtggaccacggcgtggacgccgcgctcgtggccgacatggcgcgcctcgcccgagacttcttcgcgctcccgcccgaggacaagctccgcttcgacatgtccggcgggaagaagggcggcttcatcgtctccagccacctccagggggaggcggtgcaggactggcgtgagatcgtgacctacttctcgtacccggtgaaggcccgcgactactcccggtggccggacaagccggcggcgtggcgggcggtggtggagcggtacagcgagcagctgatggcgctggcgtgcaggctcctgggcgtgctctccgaggccatgggcctggacacggaggcgctggccagggcctgcgtggacatggaccagaaggtggtggtcaacttctacccgaggtgcccgcagccggacctcacgctggggctcaagcgccacaccgaccccggcaccatcacgctgctgctgcaggacctggtcggcggcctccaggccacgcgcgacggcggccggacctggatcaccgtgcagcccgtggagggcgccttcgtcgtcaacctcggcgaccacggccacctcctgagcaacggcaggttcaagaacgcggaccaccaggcggtggtgaactcggagtgcagccgcctgtccatcgccacgttccagaacccggcgcccgacgcgacggtgtacccgctggccgtgcgcgacggggaggcgcccatactggaccatcccatcaccttcgccgagatgtaccgccgcaagatggcccgcgacatcgagctcgccaggctcaagaagcaggccaaggccgacaagaagcagcagcagcagagtgccaacaaggagttcgccgactccaagcctctcgacgccatttttgcctgatatggtagagggcgcgcgactaccgatccgttgttattgctgcgtgtgattaattttcatctataagaacatagctacgtgcgaccgcgcgtgtggtgattaattaaggtctgaataaaataatggctgcacaaaactaggaagcgatcgatcacccagataaatgtatgtgcgttcccttttcttctttcaagatgtgtaattttcaacgtgcggttccagatgcatggactggactggaccggagtgcattgtaattcttttgtttccccctgttgaatatgcgagaggtgtgcatgtctttgt

SEQ ID NO: 14273 - protein, 420 aa, Zea mays subsp. mays
  peptide (1)..(420): Ceres Seq. ID no. 12462480
MRCYYNDANAAQAFRGIQQQKQHHDPGPAARTSTRRRRTYVRRAAAGTMAPVSISAVPFLPTAAEGETNVRASFVREEDERPKVPHDRFSDEVPVVSLEGIDGPRRRAEIRGRVAAACEDWGIFQVVDHGVDAALVADMARLARDFFALPPEDKLRFDMSGGKKGGFIVSSHLQGEAVQDWREIVTYFSYPVKARDYSRWPDKPAAWRAVVERYSEQLMALACRLLGVLSEAMGLDTEALARACVDMDQKVVVNFYPRCPQPDLTLGLKRHTDPGTITLLLQDLVGGLQATRDGGRTWITVQPVEGAFVVNLGDHGHLLSNGRFKNADHQAVVNSECSRLSIATFQNPAPDATVYPLAVRDGEAPILDHPITFAEMYRRKMARDIELARLKKQAKADKKQQQQSANKEFADSKPLDAIFA

SEQ ID NO: 14274 - protein, 372 aa, Zea mays subsp. mays
  peptide (1)..(372): Ceres Seq. ID no. 12462481
MAPVSISAVPFLPTAAEGETNVRASFVREEDERPKVPHDRFSDEVPVVSLEGIDGPRRRAEIRGRVAAACEDWGIFQVVDHGVDAALVADMARLARDFFALPPEDKLRFDMSGGKKGGFIVSSHLQGEAVQDWREIVTYFSYPVKARDYSRWPDKPAAWRAVVERYSEQLMALACRLLGVLSEAMGLDTEALARACVDMDQKVVVNFYPRCPQPDLTLGLKRHTDPGTITLLLQDLVGGLQATRDGGRTWITVQPVEGAFVVNLGDHGHLLSNGRFKNADHQAVVNSECSRLSIATFQNPAPDATVYPLAVRDGEAPILDHPITFAEMYRRKMARDIELARLKKQAKADKKQQQQSANKEFADSKPLDAIFA

SEQ ID NO: 14275 - protein, 282 aa, Zea mays subsp. mays
  peptide (1)..(282): Ceres Seq. ID no. 12462482
MARLARDFFALPPEDKLRFDMSGGKKGGFIVSSHLQGEAVQDWREIVTYFSYPVKARDYSRWPDKPAAWRAVVERYSEQLMALACRLLGVLSEAMGLDTEALARACVDMDQKVVVNFYPRCPQPDLTLGLKRHTDPGTITLLLQDLVGGLQATRDGGRTWITVQPVEGAFVVNLGDHGHLLSNGRFKNADHQAVVNSECSRLSIATFQNPAPDATVYPLAVRDGEAPILDHPITFAEMYRRKMARDIELARLKKQAKADKKQQQQSANKEFADSKPLDAIFA

SEQ ID NO: 14276 - DNA, 1514 bp, Zea mays subsp. mays
  misc_feature (1)..(1514): Ceres Seq. ID no. 12590448
  misc_feature (1)..(1514): Ortholog of  Ceres SEQ ID NO 13648575 as cited in SEQ ID NO 20407
ccaccacaaccaccaaccaacgggcgtgcccaccacgcggcgccgttggggttggcgggcgccatgggggcgccgagcagccgcgcgctggcgctgggcgcggccttcctgctgctcctcgtcgcgctgccctccgccttcctctacctcacctcctccgcggccacccgcgccaccctcctcgacctcaagcccttctccgccaggtgcgcgcccgcagtcgcgccgctccgcgtcttcatgtacgacctgcctgcgcgcttccacgtcgccatgatgggggccgccgccggcgcggggttccccgcgtggccgccgtccgcgggcgggatcaggcgccagcacagcgtggagtactggatgatggcgtcgctccaggatgggggcgcgggaccggagcggggaagggaggccgtcagggtgcgggatcctgacgccgccgacgccttcttcgtgcccttcttctcctcgctcagcttcaacgtgcacggtcgcaacatgaccgaccctgacaccgaggccgaccgcctcctgcaggttgaacttgtggatattctctggaagtctaaatattggcaacgttctgcgggccgtgaccatgtcattcctatgcatcaccctaatgctttcagattcctgcgagcaatggtgaatgcatctattcttatagtttcagactttgggagatacacaaaggaactggcttccctgaggaaagatgttgtggcaccatatgtgcatgttgtgggttccttccttgatgacgatccacctgatccatttgaggctcgccatacactgcttttctttcgaggccgtactgtcaggaaagatgaagggaaaatccggtcaaaacttgagaagatattaaaaggcaaggaaggggtgcgctttgaggatagcattgccacgggcgacggcattaacatatctacagaaggtatgcggtcatcaaagttttgtctccaccctgctggggacactccttcctcatgccgcctgtttgatgccatagtcagtcattgtgttcctgtgatagtcagcagtcgaatcgagctcccttttgaagatgagattgattacagtgagttctcccttttcttctccgttgaagaggctctaagacctgattacttgctgaacgagctcagacaggtccccaaaaggaagtgggttgatatgtggttgaagcttaagaatgtctcccatcattatgaattccagtatccccccaggaagggcgacgcggtgaacatgatatggaggcaggtgaggcacaagatccccgcagttaaccttgctattcacaggaacagaagactgaaaattccagactggtggggataatgattggtggtgaatcgtgtacatattaccatatccactgttagtcctggttattttcggtgcgttatgatggaaacattgctcaccgtcctttgtgaaccaaagtgttcatcttaagatccaaggaccgagtccacaactatttgctgacaggaactgagattatc

SEQ ID NO: 14277 - protein, 448 aa, Zea mays subsp. mays
  peptide (1)..(448): Ceres Seq. ID no. 12590449
PPQPPTNGRAHHAAPLGLAGAMGAPSSRALALGAAFLLLLVALPSAFLYLTSSAATRATLLDLKPFSARCAPAVAPLRVFMYDLPARFHVAMMGAAAGAGFPAWPPSAGGIRRQHSVEYWMMASLQDGGAGPERGREAVRVRDPDAADAFFVPFFSSLSFNVHGRNMTDPDTEADRLLQVELVDILWKSKYWQRSAGRDHVIPMHHPNAFRFLRAMVNASILIVSDFGRYTKELASLRKDVVAPYVHVVGSFLDDDPPDPFEARHTLLFFRGRTVRKDEGKIRSKLEKILKGKEGVRFEDSIATGDGINISTEGMRSSKFCLHPAGDTPSSCRLFDAIVSHCVPVIVSSRIELPFEDEIDYSEFSLFFSVEEALRPDYLLNELRQVPKRKWVDMWLKLKNVSHHYEFQYPPRKGDAVNMIWRQVRHKIPAVNLAIHRNRRLKIPDWWG

SEQ ID NO: 14278 - protein, 427 aa, Zea mays subsp. mays
  peptide (1)..(427): Ceres Seq. ID no. 12590450
MGAPSSRALALGAAFLLLLVALPSAFLYLTSSAATRATLLDLKPFSARCAPAVAPLRVFMYDLPARFHVAMMGAAAGAGFPAWPPSAGGIRRQHSVEYWMMASLQDGGAGPERGREAVRVRDPDAADAFFVPFFSSLSFNVHGRNMTDPDTEADRLLQVELVDILWKSKYWQRSAGRDHVIPMHHPNAFRFLRAMVNASILIVSDFGRYTKELASLRKDVVAPYVHVVGSFLDDDPPDPFEARHTLLFFRGRTVRKDEGKIRSKLEKILKGKEGVRFEDSIATGDGINISTEGMRSSKFCLHPAGDTPSSCRLFDAIVSHCVPVIVSSRIELPFEDEIDYSEFSLFFSVEEALRPDYLLNELRQVPKRKWVDMWLKLKNVSHHYEFQYPPRKGDAVNMIWRQVRHKIPAVNLAIHRNRRLKIPDWWG

SEQ ID NO: 14279 - protein, 368 aa, Zea mays subsp. mays
  peptide (1)..(368): Ceres Seq. ID no. 12590451
MYDLPARFHVAMMGAAAGAGFPAWPPSAGGIRRQHSVEYWMMASLQDGGAGPERGREAVRVRDPDAADAFFVPFFSSLSFNVHGRNMTDPDTEADRLLQVELVDILWKSKYWQRSAGRDHVIPMHHPNAFRFLRAMVNASILIVSDFGRYTKELASLRKDVVAPYVHVVGSFLDDDPPDPFEARHTLLFFRGRTVRKDEGKIRSKLEKILKGKEGVRFEDSIATGDGINISTEGMRSSKFCLHPAGDTPSSCRLFDAIVSHCVPVIVSSRIELPFEDEIDYSEFSLFFSVEEALRPDYLLNELRQVPKRKWVDMWLKLKNVSHHYEFQYPPRKGDAVNMIWRQVRHKIPAVNLAIHRNRRLKIPDWWG

SEQ ID NO: 14280 - DNA, 422 bp, Zea mays subsp. mays
  misc_feature (1)..(422): Ceres Seq. ID no. 5761283
  misc_feature (1)..(422): Ortholog of  Ceres SEQ ID NO 12356503 as cited in SEQ ID NO 0
cgaaaaatctaccgtgcggagggggaagagggagaggccaggagaggaaagcctgcagccaccatgcattccgacctctggatctcgcgtctcacggccgccaagcggcagtttgcgctgcagcgcgcgcagcgccagcacgccgccccggcatcccatcacgatcggatttgggtatgatgatatcgaacctgaggatgatttgcactcagacttcccatgcccttactgttatgaagatcatgatgttgcttctctctgcgcccatttggaggacgagcaccctttcgagtctaaaattgtgtcttgcccagtttgctcagctaggatttcgaaggacttggtggatcatataacccttcagcatggctacctatttaaaatatccttcttagatgattatatctttttagacatgtttt

SEQ ID NO: 14281 - protein, 140 aa, Zea mays subsp. mays
  peptide (1)..(140): Ceres Seq. ID no. 5761284
EKSTVRRGKRERPGEESLQPPCIPTSGSRVSRPPSGSLRCSARSASTPPRHPITIGFGYDDIEPEDDLHSDFPCPYCYEDHDVASLCAHLEDEHPFESKIVSCPVCSARISKDLVDHITLQHGYLFKISFLDDYIFLDMF

SEQ ID NO: 14282 - protein, 117 aa, Zea mays subsp. mays
  peptide (1)..(117): Ceres Seq. ID no. 5761285
KNLPCGGGRGRGQERKACSHHAFRPLDLASHGRQAAVCAAARAAPARRPGIPSRSDLGMMISNLRMICTQTSHALTVMKIMMLLLSAPIWRTSTLSSLKLCLAQFAQLGFRRTWWII

SEQ ID NO: 14283 - DNA, 2939 bp, Zea mays subsp. mays
  misc_feature (1)..(2939): Ceres Seq. ID no. 12435700
  misc_feature (1)..(2939): Ortholog of  Ceres SEQ ID NO 15168506 as cited in SEQ ID NO 57671
  misc_feature (1)..(2939): Ortholog of  Ceres SEQ ID NO 15180420 as cited in SEQ ID NO 0
ccaggacgacaactcccaggtcccgactcccccaaatttcccccttcccttccgcctcgcctccagccaccgcgtccgcctcgcctccagccaccgcgtccgcctccgatggcgtcggcggcggggtcctcgaacgtgatgctcgcgatcaacgagaagaaaacgatcaccactgacctctaccgcccgctgcgcctctacatcgcctccacctactcggaacgcgaggccgctgcggccgacgacgaccttagcgtggtgtgcgacctccgcgctgctgtcgagaagccctccctcccggatccgtcctccctcgagcagcgccgcgacgcgctcctcgcctacgcgcgggctctggcactcgtggagccccgcttccccatctcccccgatcgcgcccacgtccactccctcaccttcacctggcacgacgcattcaaggggaacaagaagtgcgccctcgcctccatccacctcgagaaggcatccgtgctctttaacctcggcgccgtctactcccagatcgcgctcgccgcggaccgctcgactgacgtcgggatcaggatcgcgtgcggcgccttccagagtgcggcgggggcgttcgcgtggctcagggagagcggggccgcggcgaaggctgtcgctgcggggaccaccaccgtggacatcacgcccgagtgcgccggcatgctggagaaactcatgctcgcgcaggcgcaagaatgcttcttcgagaaggtcataggtggagggaagccacccgcgctgtgctccaaggtggcgcggcaggttggcatactctatgaagaagcatacacagctctcagtgcatctcctctaagtcagcactttgataagacatgggtgtcccatgtccagcttaaagctgctcaattctacgccgatgcttgctacaggtattcactggatcttcatgagaaagaagaaattgctgaggaaattgcacgtttaaagattggtatgagtgccttggcagatgctaagaagactacgaagggagttgctgcccaacttctggattccgtcaacaagctggaaagtaacatgaaaaccaacttggaaagggctatgaaggagaatgatcgtgtttacttgatgcgggttccagctgctggttccttgggtgccctccctgcagcgtcccttgtaaaacctacctctttggctgaagttttagatgccagcaaggaaaggcttttttcatcacttgtgcctgatggcagcatgaaagcactttctaagtacacagagatggtagataatagtatccggacccaggctgagaaattgcagcaagctagtgagatcactagagtcaggctgaaggaaatggacttaccagattctattctttcattggaaggaaatataaccttgcccatggatctgaaggaagacgtagaggctgtgcagataagcggtggccctgctggcttagaatctgagttgcagcaacttagggatttgagcagggtcaatcaggaactacttgtccagactgaagagcttctacagaaggaggcgaatgaagacgctcaatttcgtacacaatttgggagtcgttggactagacctcaatcaagcaccctaacaaagaatattcaggatagattgaatctgtttgcttctaatttgaagagagctgctgatagtgattctctgattgaacgaggcgtgaaggagaactattcattgatgtctatccttgacaaaagaccgatagagtcttcacttccaagtatttccaggcctatcatgtccttggatggaaatgaagatgccattgttggagccctgaaacaaagcttgagacaactggagtctcttggcgcacaaagggcaggtcttgaagacatgctcaaagaaatgaaaagaaaggatgatatattgcctaagttgatggttggcgtgggatcacatgatgatcttttcaagaaggagattgctaagtatgatcctatatgtgctgatattgctgataacattgtggcacaggaacaattgttgctacaaatacaggcacaaaacgagcaatttgctgctgtattcaacctagaggattacaaagctgcccgtgagagatgttacaagcaaatcgctgctgctgttgtgaaataccaggagtttaaaaagaacatcaacgagggcctaaacttttatgtgactttacaggaagcaattggcaaaataaaacagcagtgcagcgacttcataatgacccgaaacattcagtgccgtgaaatgatggaagatgtgcagaggaagctacccggcttcagattctcgtcgtccagccgctcctctatgcagaggaatgctgcttctgtgccacctgacgagagcagcccatcaccgccaccgccgcatgcccaggctccctatgcctctccaccaggggtagactcgaggcatggatattctcaaccggaggcaagacctgcatactcgcagccataccccccatcctatggcgcgacaccgcaacagccgacgtatggtgcacaacaccccgggcagtaccagccgcctcctggccatgactgcggtcagccggcatatcctggatggcgcgggccatacccatactacaatgccccccagccgcagcaatctgtgccatgtccacaggcgccgtacaatgccactggggcttaccctccgcaccagagcaactattaccgacctcaataagtgctgcaactatttcttattattttgcttcttttttttccattgggtcttaccattctggtgtactactactgcatacgagagagttcgggtagtgtaatagcaggtatagctttgtatgatttagtggcggacccagaaagacccggaccgaagcgaccataaactataatatagtagcatataaaaaattgtacggttaaacaatgttgtcatagatgttaaag

SEQ ID NO: 14284 - protein, 903 aa, Zea mays subsp. mays
  peptide (1)..(903): Ceres Seq. ID no. 12435701
PGRQLPGPDSPKFPPSLPPRLQPPRPPRLQPPRPPPMASAAGSSNVMLAINEKKTITTDLYRPLRLYIASTYSEREAAAADDDLSVVCDLRAAVEKPSLPDPSSLEQRRDALLAYARALALVEPRFPISPDRAHVHSLTFTWHDAFKGNKKCALASIHLEKASVLFNLGAVYSQIALAADRSTDVGIRIACGAFQSAAGAFAWLRESGAAAKAVAAGTTTVDITPECAGMLEKLMLAQAQECFFEKVIGGGKPPALCSKVARQVGILYEEAYTALSASPLSQHFDKTWVSHVQLKAAQFYADACYRYSLDLHEKEEIAEEIARLKIGMSALADAKKTTKGVAAQLLDSVNKLESNMKTNLERAMKENDRVYLMRVPAAGSLGALPAASLVKPTSLAEVLDASKERLFSSLVPDGSMKALSKYTEMVDNSIRTQAEKLQQASEITRVRLKEMDLPDSILSLEGNITLPMDLKEDVEAVQISGGPAGLESELQQLRDLSRVNQELLVQTEELLQKEANEDAQFRTQFGSRWTRPQSSTLTKNIQDRLNLFASNLKRAADSDSLIERGVKENYSLMSILDKRPIESSLPSISRPIMSLDGNEDAIVGALKQSLRQLESLGAQRAGLEDMLKEMKRKDDILPKLMVGVGSHDDLFKKEIAKYDPICADIADNIVAQEQLLLQIQAQNEQFAAVFNLEDYKAARERCYKQIAAAVVKYQEFKKNINEGLNFYVTLQEAIGKIKQQCSDFIMTRNIQCREMMEDVQRKLPGFRFSSSSRSSMQRNAASVPPDESSPSPPPPHAQAPYASPPGVDSRHGYSQPEARPAYSQPYPPSYGATPQQPTYGAQHPGQYQPPPGHDCGQPAYPGWRGPYPYYNAPQPQQSVPCPQAPYNATGAYPPHQSNYYRPQ

SEQ ID NO: 14285 - protein, 867 aa, Zea mays subsp. mays
  peptide (1)..(867): Ceres Seq. ID no. 12435702
MASAAGSSNVMLAINEKKTITTDLYRPLRLYIASTYSEREAAAADDDLSVVCDLRAAVEKPSLPDPSSLEQRRDALLAYARALALVEPRFPISPDRAHVHSLTFTWHDAFKGNKKCALASIHLEKASVLFNLGAVYSQIALAADRSTDVGIRIACGAFQSAAGAFAWLRESGAAAKAVAAGTTTVDITPECAGMLEKLMLAQAQECFFEKVIGGGKPPALCSKVARQVGILYEEAYTALSASPLSQHFDKTWVSHVQLKAAQFYADACYRYSLDLHEKEEIAEEIARLKIGMSALADAKKTTKGVAAQLLDSVNKLESNMKTNLERAMKENDRVYLMRVPAAGSLGALPAASLVKPTSLAEVLDASKERLFSSLVPDGSMKALSKYTEMVDNSIRTQAEKLQQASEITRVRLKEMDLPDSILSLEGNITLPMDLKEDVEAVQISGGPAGLESELQQLRDLSRVNQELLVQTEELLQKEANEDAQFRTQFGSRWTRPQSSTLTKNIQDRLNLFASNLKRAADSDSLIERGVKENYSLMSILDKRPIESSLPSISRPIMSLDGNEDAIVGALKQSLRQLESLGAQRAGLEDMLKEMKRKDDILPKLMVGVGSHDDLFKKEIAKYDPICADIADNIVAQEQLLLQIQAQNEQFAAVFNLEDYKAARERCYKQIAAAVVKYQEFKKNINEGLNFYVTLQEAIGKIKQQCSDFIMTRNIQCREMMEDVQRKLPGFRFSSSSRSSMQRNAASVPPDESSPSPPPPHAQAPYASPPGVDSRHGYSQPEARPAYSQPYPPSYGATPQQPTYGAQHPGQYQPPPGHDCGQPAYPGWRGPYPYYNAPQPQQSVPCPQAPYNATGAYPPHQSNYYRPQ

SEQ ID NO: 14286 - protein, 857 aa, Zea mays subsp. mays
  peptide (1)..(857): Ceres Seq. ID no. 12435703
MLAINEKKTITTDLYRPLRLYIASTYSEREAAAADDDLSVVCDLRAAVEKPSLPDPSSLEQRRDALLAYARALALVEPRFPISPDRAHVHSLTFTWHDAFKGNKKCALASIHLEKASVLFNLGAVYSQIALAADRSTDVGIRIACGAFQSAAGAFAWLRESGAAAKAVAAGTTTVDITPECAGMLEKLMLAQAQECFFEKVIGGGKPPALCSKVARQVGILYEEAYTALSASPLSQHFDKTWVSHVQLKAAQFYADACYRYSLDLHEKEEIAEEIARLKIGMSALADAKKTTKGVAAQLLDSVNKLESNMKTNLERAMKENDRVYLMRVPAAGSLGALPAASLVKPTSLAEVLDASKERLFSSLVPDGSMKALSKYTEMVDNSIRTQAEKLQQASEITRVRLKEMDLPDSILSLEGNITLPMDLKEDVEAVQISGGPAGLESELQQLRDLSRVNQELLVQTEELLQKEANEDAQFRTQFGSRWTRPQSSTLTKNIQDRLNLFASNLKRAADSDSLIERGVKENYSLMSILDKRPIESSLPSISRPIMSLDGNEDAIVGALKQSLRQLESLGAQRAGLEDMLKEMKRKDDILPKLMVGVGSHDDLFKKEIAKYDPICADIADNIVAQEQLLLQIQAQNEQFAAVFNLEDYKAARERCYKQIAAAVVKYQEFKKNINEGLNFYVTLQEAIGKIKQQCSDFIMTRNIQCREMMEDVQRKLPGFRFSSSSRSSMQRNAASVPPDESSPSPPPPHAQAPYASPPGVDSRHGYSQPEARPAYSQPYPPSYGATPQQPTYGAQHPGQYQPPPGHDCGQPAYPGWRGPYPYYNAPQPQQSVPCPQAPYNATGAYPPHQSNYYRPQ

SEQ ID NO: 14287 - DNA, 1329 bp, Zea mays subsp. mays
  misc_feature (1)..(1329): Ceres Seq. ID no. 13503166
  misc_feature (1)..(1329): Ortholog of  Ceres SEQ ID NO 13581804 as cited in SEQ ID NO 51424
  misc_feature (1)..(1329): Ortholog of  Ceres SEQ ID NO 14307797 as cited in SEQ ID NO 54802
  misc_feature (1)..(1329): Ortholog of  Ceres SEQ ID NO 15168374 as cited in SEQ ID NO 55652
  misc_feature (1)..(1329): Ortholog of  Ceres SEQ ID NO 15169703 as cited in SEQ ID NO 59628
  misc_feature (1)..(1329): Ortholog of  Ceres SEQ ID NO 13663874 as cited in SEQ ID NO 67003
  misc_feature (1)..(1329): Ortholog of  Ceres SEQ ID NO 13624654 as cited in SEQ ID NO 0
gctttaaatccgcctcctcccagcgtctccctcctcccggcctgtcccctcacctccctccccctatctctccaccgccgcagctagctgcgacgtcatgcactcgccggcgccaccgccaccgcatactatctacaattagccagccgtaggcttacctatcctgtgtcaagcaagcctctcgcaagcaacaaggaaggaagctagctagttttatagctgctgtcggcggcggcggctgaagcgacgtgcctgagctaggatttaggttgagatcaggagagggagaaggcggcggcgatggggcgcgggaaggtgcagctgaagcggatcgagaacaagatcaaccgccaggtgacattctccaagcgccgctcggggctactcaagaaggcgcacgagatctccgtgctctgcgacgccgaggtcgcgctcatcatcttctccaccaagggcaagctctacgagtactctaccgattcatgtatggacaaaattcttgaacggtatgagcgctactcctatgcagaaaaggttctcatttccgcagaatatgaaactcagggcaattggtgccatgaatatagaaaactaaaggcgaaggtcgagacaatacagaaatgtcaaaagcacctcatgggagaggatcttgaaactttgaatctcaaagagcttcagcaactagagcagcagctggagagttcactgaaacatatcagaacaaggaagagccagcttatggtcgagtcaatttcagcgctccaacggaaggagaagtcactgcaggaggagaacaaggttctgcagaaggagctcgcggagaagcagaaagaccagcggcagcaagtgcaacgggaccaaactcaacagcagaccagttcgtcttccacgtccttcatgttaagggaagctgccccaacaacaaatgtcagcatcttccctgtggcagcaggcgggagggtggtggaaggggcagcagcgcagccgcaggctcgcgttggactgccaccatggatgcttagccatctgagctgctgaaggtttgccctcaccgtcgcgatgtgatagcccaaaatccagcaagtcttccccggaccccggactgtccccgcttctccgcctggtgcagtatcgtcgtgatcgcgagaagcagcagcagcggtttgccgtattttttaccactgtgtataagtagcatatctgcaatgtgtatattttgttcaccgttcctgctggggcggccgcacggtactttacgcatgtaatatatgtgcttcatcaaatcactttcactaccatagcatgtgccggtttgtggtagtttcatgt

SEQ ID NO: 14288 - protein, 245 aa, Zea mays subsp. mays
  peptide (1)..(245): Ceres Seq. ID no. 13503167
MGRGKVQLKRIENKINRQVTFSKRRSGLLKKAHEISVLCDAEVALIIFSTKGKLYEYSTDSCMDKILERYERYSYAEKVLISAEYETQGNWCHEYRKLKAKVETIQKCQKHLMGEDLETLNLKELQQLEQQLESSLKHIRTRKSQLMVESISALQRKEKSLQEENKVLQKELAEKQKDQRQQVQRDQTQQQTSSSSTSFMLREAAPTTNVSIFPVAAGGRVVEGAAAQPQARVGLPPWMLSHLSC

SEQ ID NO: 14289 - protein, 183 aa, Zea mays subsp. mays
  peptide (1)..(183): Ceres Seq. ID no. 13503168
MDKILERYERYSYAEKVLISAEYETQGNWCHEYRKLKAKVETIQKCQKHLMGEDLETLNLKELQQLEQQLESSLKHIRTRKSQLMVESISALQRKEKSLQEENKVLQKELAEKQKDQRQQVQRDQTQQQTSSSSTSFMLREAAPTTNVSIFPVAAGGRVVEGAAAQPQARVGLPPWMLSHLSC

SEQ ID NO: 14290 - protein, 133 aa, Zea mays subsp. mays
  peptide (1)..(133): Ceres Seq. ID no. 13503169
MGEDLETLNLKELQQLEQQLESSLKHIRTRKSQLMVESISALQRKEKSLQEENKVLQKELAEKQKDQRQQVQRDQTQQQTSSSSTSFMLREAAPTTNVSIFPVAAGGRVVEGAAAQPQARVGLPPWMLSHLSC

SEQ ID NO: 14291 - DNA, 2088 bp, Zea mays subsp. mays
  misc_feature (1)..(2088): Ceres Seq. ID no. 12435689
  misc_feature (1)..(2088): Ortholog of  Ceres SEQ ID NO 14313288 as cited in SEQ ID NO 67419
tacaaaaaagtgctgcgcatatgcacacaaagggcaggaggaggaacggcacgcgcgccaggaccgcaggagcacacacctcagtgcgccagcgttctgcacctcgctagctcgtcgtgtcttgcctgcgctgtcgtcgctgacccttgagatctgcagactccatggaggctgcagcagcgacgacggcggcggcgcttcttcctcccgctcggaaggtgttcatcctgcccttgcttctcctcctggctgcatcacgagcttcgtctgatggagtgcaatatgattatagagcttacactgagtgcaaacctcaccctgagcctgctctgtacaacggtggcgtcctccgctgggcgagcaaaataacggacttcagaacggaggacgaaggcaactactccccggcatttgtgctctacaacatgtcggcggcgactgcgtacagcttctcttgctgggtgaaaatcgacgggccagaaagcgcacatgtgaaggcgaagatactgaccgtggagaacgcagcgtcgcagtgcgtcggcaccgctatcgcgcgcaacgactgctggtcttttctcaagggtggctttactctcaactccacgtctcaaacctcggtgctctatttgcagactgcgagcccaaatgcttcgacgatctcaatcagaagcccctccttgcagccattctcacccgatgagtggaatcagcacagggaggagcgtatccaacagattcggaagcgtttcgtgaacctgcatgtctccgacggcaacggcagccgcgtggtcggggcggacgtggccgtgcaccagatcaccagagacttccccttcggctccgccatcagcaagagcatcctcgggaacaggccgtaccaggactggttcaacgcgcggttcaacgcggcggtgttcgagaacgagctcaagtggtacgcgacggagccgtcgcctgggaaggaggagtacgcggcggcggaccagctgctgcggttcgtgcagtccaacgacgtgacggcgcgcgggcacaacatcttctgggaggaccccaggtacacgccggcgtgggtgaagaacctgacgggcccgcagctgcgcgccgcggtggcaggccgcgtccagagcctgctgtcgcggtacaagggcgacttcgngcactgggacgtgagcaacgagatgctgcacttcgacttctacgaggaccggctgggcggcaacgccacggccgacttcttcagcacggccaggcgcgccgacccgctggccacgctcttcctcaacgacttcaacgtggtggaggcgtgcgacgacctcagctccagcgccgactcctacgtgtccaggcttcgccagctcgccgacgacgccggggtcaccttcgagggcatcgggctggagggccacttcgccaagcccaacgtcccctacgtgcgcgccgtgctcgacaagctgggcacgctccgcctgcccgtctggctcaccgaggtcgacgtcagcgccgccttcgaccacgccacgcaggccgcgtacctagaggacgtcctccgcgaaggcttcgcgcacccggccgtcgacggcatcgtgctgtggacggccatgggcgccaacgccacctgctaccagatgtgcctcacggacgccgacttcaccaacctcccggccggagacgtcgtcgacaggctgctgggggagtggcagaccaaggaggtgctgggagccaccgatgaccgcggctccttcaacttcagcgccttccacggcgagtacaggctctccgtcacctatctcaaccgcactgccgacgccaccttctcgctgcctcgcagcgacgacaccaagcacatcaacatccgcctaccgcctggacctgcagcctgatctcattattagaaatgtactactagaatttaagaactaaatatactgtggtgcatcagctgtgttaattggtacgtgtccgtggattgatacaactactactatacgcgcgcaactatctcgacctcttatgatgaaactagtacaatgagtgtgttgtgatggtacacaaattacgcatagtatctttaaaaactctattgtagtt

SEQ ID NO: 14292 - protein, 571 aa, Zea mays subsp. mays
  peptide (1)..(571): Ceres Seq. ID no. 12435690
  misc_feature (331)..(331): Xaa is any aa, unknown or other
MEAAAATTAAALLPPARKVFILPLLLLLAASRASSDGVQYDYRAYTECKPHPEPALYNGGVLRWASKITDFRTEDEGNYSPAFVLYNMSAATAYSFSCWVKIDGPESAHVKAKILTVENAASQCVGTAIARNDCWSFLKGGFTLNSTSQTSVLYLQTASPNASTISIRSPSLQPFSPDEWNQHREERIQQIRKRFVNLHVSDGNGSRVVGADVAVHQITRDFPFGSAISKSILGNRPYQDWFNARFNAAVFENELKWYATEPSPGKEEYAAADQLLRFVQSNDVTARGHNIFWEDPRYTPAWVKNLTGPQLRAAVAGRVQSLLSRYKGDFXHWDVSNEMLHFDFYEDRLGGNATADFFSTARRADPLATLFLNDFNVVEACDDLSSSADSYVSRLRQLADDAGVTFEGIGLEGHFAKPNVPYVRAVLDKLGTLRLPVWLTEVDVSAAFDHATQAAYLEDVLREGFAHPAVDGIVLWTAMGANATCYQMCLTDADFTNLPAGDVVDRLLGEWQTKEVLGATDDRGSFNFSAFHGEYRLSVTYLNRTADATFSLPRSDDTKHINIRLPPGPAA

SEQ ID NO: 14293 - protein, 484 aa, Zea mays subsp. mays
  peptide (1)..(484): Ceres Seq. ID no. 12435691
  misc_feature (244)..(244): Xaa is any aa, unknown or other
MSAATAYSFSCWVKIDGPESAHVKAKILTVENAASQCVGTAIARNDCWSFLKGGFTLNSTSQTSVLYLQTASPNASTISIRSPSLQPFSPDEWNQHREERIQQIRKRFVNLHVSDGNGSRVVGADVAVHQITRDFPFGSAISKSILGNRPYQDWFNARFNAAVFENELKWYATEPSPGKEEYAAADQLLRFVQSNDVTARGHNIFWEDPRYTPAWVKNLTGPQLRAAVAGRVQSLLSRYKGDFXHWDVSNEMLHFDFYEDRLGGNATADFFSTARRADPLATLFLNDFNVVEACDDLSSSADSYVSRLRQLADDAGVTFEGIGLEGHFAKPNVPYVRAVLDKLGTLRLPVWLTEVDVSAAFDHATQAAYLEDVLREGFAHPAVDGIVLWTAMGANATCYQMCLTDADFTNLPAGDVVDRLLGEWQTKEVLGATDDRGSFNFSAFHGEYRLSVTYLNRTADATFSLPRSDDTKHINIRLPPGPAA

SEQ ID NO: 14294 - DNA, 555 bp, Zea mays subsp. mays
  misc_feature (1)..(555): Ceres Seq. ID no. 3315214
  misc_feature (1)..(555): Ortholog of  Ceres SEQ ID NO 13655108 as cited in SEQ ID NO 62996
gctcattcacggcaaattaagcgagcgccggccgaggcagacacaaccagcagcaacttgcatcggcacggacgaccgattgagagcctcggcgttcgtacgccacgccaccaagagactctgtgcaaaggagcaagaatgtatccggccaagcccgccgcctccgccagcgagccggtggtcggcatccccatcagcagccccggcgcggttgcggtcgggccggtcgtcggcaagtggtcctccggcctctgcgcctgctccgacgactgcggcctctgctgcctgacgtgctggtgcccgtgcatcacgttcggccgcgtcgcggagatcgtggaccgcggcgcgacgtcgttcggcgtggcggggaccatctacacgctgctggcctgcttcacgggctgccactggatctactcctgcacgtaccgctccaggatgcgcgcgcagctcggcctccccgaagcctgctgctgcgactgctgcgtccacttctgctgcgagccctgcgcgctctcccagcagtacagggagctcaaggcccgcggattcgac

SEQ ID NO: 14295 - protein, 185 aa, Zea mays subsp. mays
  peptide (1)..(185): Ceres Seq. ID no. 3315215
AHSRQIKRAPAEADTTSSNLHRHGRPIESLGVRTPRHQETLCKGARMYPAKPAASASEPVVGIPISSPGAVAVGPVVGKWSSGLCACSDDCGLCCLTCWCPCITFGRVAEIVDRGATSFGVAGTIYTLLACFTGCHWIYSCTYRSRMRAQLGLPEACCCDCCVHFCCEPCALSQQYRELKARGFD

SEQ ID NO: 14296 - protein, 139 aa, Zea mays subsp. mays
  peptide (1)..(139): Ceres Seq. ID no. 3315216
MYPAKPAASASEPVVGIPISSPGAVAVGPVVGKWSSGLCACSDDCGLCCLTCWCPCITFGRVAEIVDRGATSFGVAGTIYTLLACFTGCHWIYSCTYRSRMRAQLGLPEACCCDCCVHFCCEPCALSQQYRELKARGFD

SEQ ID NO: 14297 - protein, 95 aa, Zea mays subsp. mays
  peptide (1)..(95): Ceres Seq. ID no. 3315217
LIHGKLSERRPRQTQPAATCIGTDDRLRASAFVRHATKRLCAKEQECIRPSPPPPPASRWSASPSAAPARLRSGRSSASGPPASAPAPTTAASAA

SEQ ID NO: 14298 - DNA, 642 bp, Zea mays subsp. mays
  misc_feature (1)..(642): Ceres Seq. ID no. 14306056
  misc_feature (1)..(642): Ortholog of  Ceres SEQ ID NO 13597798 as cited in SEQ ID NO 64311
aatgcctcaccacgccggttatgtgaacgggcactaagagagcttccaaagaagactggtgaacagttagttatcctatctcaggttctaatggatgatatcaatgtcggttatgaaaggcttgctgaactacaggtaaagaaggtaaatgatgtggaggttgaaaacctgaagcacctgtgcagcctcgtggaaggctgcaccgaagaaaacttaaggtttgacttggacgatgaaagagtcattgtcctgaagtaccagaacgcaaggcttgccacatcccgggtcctcaaacggcacaggataccgtcagccatatcgagcgaccttgtcgaagatcaagtaactgatggcgaggttgagacgtcatgcaccagctaatgctagactcttttttagacctaattgggagttccctgctgtagctcagctcaagaagcgagctgcattgttggcgaggcaagcgcacctgcctgcctgcctgcctggagtacatggtatcacttcctccctttagggcggctttagttttgacataaggaggagtgtctttagaaaataagattatgagctccggggcttttcagtctgaatgtaacggtaacataaccattctttactagaacatttattttttccgtc

SEQ ID NO: 14299 - protein, 126 aa, Zea mays subsp. mays
  peptide (1)..(126): Ceres Seq. ID no. 14306057
NASPRRLCERALRELPKKTGEQLVILSQVLMDDINVGYERLAELQVKKVNDVEVENLKHLCSLVEGCTEENLRFDLDDERVIVLKYQNARLATSRVLKRHRIPSAISSDLVEDQVTDGEVETSCTS

SEQ ID NO: 14300 - protein, 96 aa, Zea mays subsp. mays
  peptide (1)..(96): Ceres Seq. ID no. 14306058
MDDINVGYERLAELQVKKVNDVEVENLKHLCSLVEGCTEENLRFDLDDERVIVLKYQNARLATSRVLKRHRIPSAISSDLVEDQVTDGEVETSCTS

SEQ ID NO: 14301 - DNA, 958 bp, Zea mays subsp. mays
  misc_feature (1)..(958): Ceres Seq. ID no. 15180611
  misc_feature (1)..(958): Ortholog of  Ceres SEQ ID NO 15180650 as cited in SEQ ID NO 0
atcccgcacatgcacgtgatgcatgtattgttaagagccaccttctatgcttctttgtaccatttggatgcggttcagtggtgcatattgtttgagctgtttctgttttgaactactgatacgctgtgaactttaatgttcgtggttctcagataaactagaaaacctatgctaacgaaacatctagcacatcttggatcagccctgcgatctcaaatggttaatgtatttccggcagctagaaacaccccaaactctgttctctgatttaacaaaaaaaaaccagttacccaccacccagcatgagcggacatgtgcatttgttggcatttgagctctcgtccaatgattgttgcgcaggtgacggagaacgggaagcaggagcggcatctagtggcgacggtggggaagtacagcgtggtgtggaacttcctgcaggtgaagaacagccaccacgagtgctaccagtaccaggaggggctgaagagctgctattgctacaaggtgatccccaaggacgagtccatcgtggccagccgcttcatgcacgacaagtactcggtcagcgactccccggaggctccactggtggtggccacgcccatgaaggtcacctccttcagcatatccagcaggcactaactagcctccttgctccgccccgcaacttcgctgccggccgacgcgttccccttggctcctcggcctccggtgatctggtaacattttgttaagcaattgtttgtgcgacggttgcctgttccattgccttctaagttggttcaaattaattagtgatttgctgtgttgagtcgatacgcaacgttgaagaggggatggtagtgtctgttgggttagctacatattgctgaacaatctgatttagctgtgaggaagtggctaatggttgtaagaaagctgaaagttgtttgattaaaataattgttaactaaaaaag

SEQ ID NO: 14302 - protein, 143 aa, Zea mays subsp. mays
  peptide (1)..(143): Ceres Seq. ID no. 15180612
MSGHVHLLAFELSSNDCCAGDGEREAGAASSGDGGEVQRGVELPAGEEQPPRVLPVPGGAEELLLLQGDPQGRVHRGQPLHARQVLGQRLPGGSTGGGHAHEGHLLQHIQQALTSLLAPPRNFAAGRRVPLGSSASGDLVTFC

SEQ ID NO: 14303 - protein, 109 aa, Zea mays subsp. mays
  peptide (1)..(109): Ceres Seq. ID no. 15180613
MCICWHLSSRPMIVAQVTENGKQERHLVATVGKYSVVWNFLQVKNSHHECYQYQEGLKSCYCYKVIPKDESIVASRFMHDKYSVSDSPEAPLVVATPMKVTSFSISSRH

SEQ ID NO: 14304 - protein, 98 aa, Zea mays subsp. mays
  peptide (1)..(98): Ceres Seq. ID no. 15180614
MIVAQVTENGKQERHLVATVGKYSVVWNFLQVKNSHHECYQYQEGLKSCYCYKVIPKDESIVASRFMHDKYSVSDSPEAPLVVATPMKVTSFSISSRH

SEQ ID NO: 14305 - DNA, 543 bp, Zea mays subsp. mays
  misc_feature (1)..(543): Ceres Seq. ID no. 3424909
  misc_feature (1)..(543): Ortholog of  Ceres SEQ ID NO 13594465 as cited in SEQ ID NO 51233
  misc_feature (1)..(543): Ortholog of  Ceres SEQ ID NO 13585110 as cited in SEQ ID NO 60647
tgtccatgctgctgctcatccgcaggtccgtactactgggtgragwrcaagcctgacaagcccataccagttagtcagccgaaccaagggagcgtgcgagggaggaaggagaagaagcggatcaagcagcacgaggactttatcatggatgagaagaagaagcgcatagctcagtattctgctgctgttaagataaaggaggtagaacaaacagaaaggaagatggctgttgtggcaagagagcgagcatgggcagcaaggttgatagagctaaaatagcttgaggaagaaattaaagctgtaatggcataagggcctgctctggaaaatggcaaggcgtctaacctgtttctgctactctattttctcctcctttgttcctacatagtttaaattgtcacaattcttgtgatggaatggaagaccagtaccacttctttcaacagtaatatcaaatgctggaactgttttttaatacaagactctcattagaccatgtttggaggttccgtttacttttgatgtaatttaraacaagtgatg

SEQ ID NO: 14306 - protein, 92 aa, Zea mays subsp. mays
  peptide (1)..(92): Ceres Seq. ID no. 3424910
  misc_feature (15)..(15): Xaa is any aa, unknown or other
  misc_feature (16)..(16): Xaa is any aa, unknown or other
CPCCCSSAGPYYWVXXKPDKPIPVSQPNQGSVRGRKEKKRIKQHEDFIMDEKKKRIAQYSAAVKIKEVEQTERKMAVVARERAWAARLIELK

SEQ ID NO: 14307 - protein, 55 aa, Zea mays subsp. mays
  peptide (1)..(55): Ceres Seq. ID no. 3424911
  misc_feature (14)..(14): Xaa is any aa, unknown or other
  misc_feature (15)..(15): Xaa is any aa, unknown or other
  misc_feature (16)..(16): Xaa is any aa, unknown or other
VHAAAHPQVRTTGXXXSLTSPYQLVSRTKGACEGGRRRSGSSSTRTLSWMRRRSA

SEQ ID NO: 14308 - protein, 44 aa, Zea mays subsp. mays
  peptide (1)..(44): Ceres Seq. ID no. 4910235
MDEKKKRIAQYSAAVKIKEVEQTERKMAVVARERAWAARLIELK

SEQ ID NO: 14309 - DNA, 741 bp, Zea mays subsp. mays
  misc_feature (1)..(741): Ceres Seq. ID no. 12468867
  misc_feature (1)..(741): Ortholog of  Ceres SEQ ID NO 13599779 as cited in SEQ ID NO 0
tgacttgcttattggcaccccagattcggcatccaagaactatgtggagcagcagtacgagtactgtgtgaaggtggtcagatggttggagcatgaagggcacatggacaatgacttccgtgtgaagttcctcacttggttcagtctgaaggcaacagcgcaggacaggcgaatcgttggcgccttagtagatgttcttatcggtgatcctgcaagcttggttgcccaactggttgatgcattcaaggatatcatctacaccaaggagaagccctttcaaacacaacagaaggatgcacgctgcaagatttggcactagaaaccttcataactgctctgtgtcgctgtgtgacatcatttttctggtaattttctggcgactgaatgatgaactactgaagttatatcacctagcagattgcgtgcggattctgttgagatggatattgtgcactctcttaaaggttataagatgctgtagatgcttcatttggcattcaggtccatcagatctctcatttgttcattcaaattcagtcggtaggcagactattaatccatgaagacaatcatggtggaaccatgtgctggtaatcatgaatcggttntgagtttaggtttcgactagtaagtagttgaagcttgttagcagacaagcaactgtattcatatgtggaatgctatggtggatntgcaagctaactattgtgaattcatatcatgacttaanagatgtttatt

SEQ ID NO: 14310 - protein, 123 aa, Zea mays subsp. mays
  peptide (1)..(123): Ceres Seq. ID no. 12468868
MFLSVILQAWLPNWLMHSRISSTPRRSPFKHNRRMHAARFGTRNLHNCSVSLCDIIFLVIFWRLNDELLKLYHLADCVRILLRWILCTLLKVIRCCRCFIWHSGPSDLSFVHSNSVGRQTINP

SEQ ID NO: 14311 - protein, 108 aa, Zea mays subsp. mays
  peptide (1)..(108): Ceres Seq. ID no. 12468869
MHSRISSTPRRSPFKHNRRMHAARFGTRNLHNCSVSLCDIIFLVIFWRLNDELLKLYHLADCVRILLRWILCTLLKVIRCCRCFIWHSGPSDLSFVHSNSVGRQTINP

SEQ ID NO: 14312 - protein, 105 aa, Zea mays subsp. mays
  peptide (1)..(105): Ceres Seq. ID no. 12468870
DLLIGTPDSASKNYVEQQYEYCVKVVRWLEHEGHMDNDFRVKFLTWFSLKATAQDRRIVGALVDVLIGDPASLVAQLVDAFKDIIYTKEKPFQTQQKDARCKIWH

SEQ ID NO: 14313 - DNA, 482 bp, Zea mays subsp. mays
  misc_feature (1)..(482): Ceres Seq. ID no. 12468860
  misc_feature (1)..(482): Ortholog of  Ceres SEQ ID NO 13599900 as cited in SEQ ID NO 531
  misc_feature (1)..(482): Ortholog of  Ceres SEQ ID NO 13659971 as cited in SEQ ID NO 67565
  misc_feature (1)..(482): Ortholog of  Ceres SEQ ID NO 13500385 as cited in SEQ ID NO 67583
taagtgcatttgcaccacaaacaaaagaggatgggcttctgcatactgcctgtggaactccaaactatgtagcgcctgaggtgctcgctgataaaggctatgatggtatggctgcagatgtatggtcctgtggcataatcttgtttgttcttatggccggatacttacccttcgatgatgccaatctgatgagactgtacaaactgatctgccatgcaactttttcttgcccaccatggttttcttctggagcaaggaagtttattaagcgcattctcgatcctaaccctgataccaggataaaaattgcagaaattttggaagatgaatggttcaaaaaaggctataaaccaccacattttgaacaaggcgaagatgttaaccttgacgacgttgatgctgcattcaatgattcagaggaccgtcttgtagcagagaaaagagaaaagccagaatcaatgaatgcatttgctcttatttcg

SEQ ID NO: 14314 - protein, 160 aa, Zea mays subsp. mays
  peptide (1)..(160): Ceres Seq. ID no. 12468861
SAFAPQTKEDGLLHTACGTPNYVAPEVLADKGYDGMAADVWSCGIILFVLMAGYLPFDDANLMRLYKLICHATFSCPPWFSSGARKFIKRILDPNPDTRIKIAEILEDEWFKKGYKPPHFEQGEDVNLDDVDAAFNDSEDRLVAEKREKPESMNAFALIS

SEQ ID NO: 14315 - protein, 125 aa, Zea mays subsp. mays
  peptide (1)..(125): Ceres Seq. ID no. 12468862
MAADVWSCGIILFVLMAGYLPFDDANLMRLYKLICHATFSCPPWFSSGARKFIKRILDPNPDTRIKIAEILEDEWFKKGYKPPHFEQGEDVNLDDVDAAFNDSEDRLVAEKREKPESMNAFALIS

SEQ ID NO: 14316 - protein, 110 aa, Zea mays subsp. mays
  peptide (1)..(110): Ceres Seq. ID no. 12468863
MAGYLPFDDANLMRLYKLICHATFSCPPWFSSGARKFIKRILDPNPDTRIKIAEILEDEWFKKGYKPPHFEQGEDVNLDDVDAAFNDSEDRLVAEKREKPESMNAFALIS

SEQ ID NO: 14317 - DNA, 828 bp, Zea mays subsp. mays
  misc_feature (1)..(828): Ceres Seq. ID no. 12468845
  misc_feature (1)..(828): Ortholog of  Ceres SEQ ID NO 12617887 as cited in SEQ ID NO 65526
gaagaaccatgccatcttccgttttngcgcaattccccagataatggcaattggaacatgtgctctttgctacaataacgtgcatgtctttagaggagttgtaaagatgagacgtggtctcacggcacgaataattgacgagacaaattcaatgtcagacgtctataccgctttctatgagttttcttcattgatagagtcaaagattgatgacaatgatccaaatgctgctctaacacggagacacgtgaattcaataaagcaaacttgcaagtcatctggtttggtaaagaggagggggtaccatttggacacatcaccttacaggcctatgctggtgagtaacccgtaatcaggaaattcatgttagcactcttctatataatttgtcgatattcttctgtgatcccctcagatcatgattgtcctcctgctggtggctatccttttcggggcactgtataccaagtgatgcacttgtagctggcctttttcccctatggagacgagacaaactctgccaatctgatccttttcgtactctgtagtccccaatggctgcaggaagttcgaaattactggctgtagaagtgtagatcatacggcagcatgctactgcttccatgactccgttactgctctcgattcgtttcttcattatgttttctcgcgcgttgtatcgtttgaagctgttttaagcaacggaaaaaaataccatgtgacacgtgtatcctacgaacatgggtttctgtttagttagcagtgggcgcactgtattatgttgtcttgttgacatgtcatgttttcaaagctgacgtgtttgtgttt

SEQ ID NO: 14318 - protein, 116 aa, Zea mays subsp. mays
  peptide (1)..(116): Ceres Seq. ID no. 12468846
  misc_feature (9)..(9): Xaa is any aa, unknown or other
KNHAIFRFXAIPQIMAIGTCALCYNNVHVFRGVVKMRRGLTARIIDETNSMSDVYTAFYEFSSLIESKIDDNDPNAALTRRHVNSIKQTCKSSGLVKRRGYHLDTSPYRPMLVSNP

SEQ ID NO: 14319 - protein, 102 aa, Zea mays subsp. mays
  peptide (1)..(102): Ceres Seq. ID no. 12468847
MAIGTCALCYNNVHVFRGVVKMRRGLTARIIDETNSMSDVYTAFYEFSSLIESKIDDNDPNAALTRRHVNSIKQTCKSSGLVKRRGYHLDTSPYRPMLVSNP

SEQ ID NO: 14320 - protein, 81 aa, Zea mays subsp. mays
  peptide (1)..(81): Ceres Seq. ID no. 12468848
MRRGLTARIIDETNSMSDVYTAFYEFSSLIESKIDDNDPNAALTRRHVNSIKQTCKSSGLVKRRGYHLDTSPYRPMLVSNP

SEQ ID NO: 14321 - DNA, 1749 bp, Zea mays subsp. mays; identical to SEQ ID NO: 11078
  misc_feature (1)..(1749): Ceres Seq. ID no. 12390530
  misc_feature (1)..(1749): Ortholog of  Ceres SEQ ID NO 13658584 as cited in SEQ ID NO 66428
  misc_feature (1)..(1749): Ortholog of  Ceres SEQ ID NO 14303259 as cited in SEQ ID NO 0

SEQ ID NO: 14322 - protein, 174 aa, Zea mays subsp. mays; identical to SEQ ID NO: 11079
  peptide (1)..(174): Ceres Seq. ID no. 12390531

SEQ ID NO: 14323 - protein, 172 aa, Zea mays subsp. mays; identical to SEQ ID NO: 11080
  peptide (1)..(172): Ceres Seq. ID no. 12390532

SEQ ID NO: 14324 - protein, 94 aa, Zea mays subsp. mays; identical to SEQ ID NO: 11081
  peptide (1)..(94): Ceres Seq. ID no. 12390533

SEQ ID NO: 14325 - DNA, 667 bp, Zea mays subsp. mays
  misc_feature (1)..(667): Ceres Seq. ID no. 12468824
  misc_feature (1)..(667): Ortholog of  Ceres SEQ ID NO 15169072 as cited in SEQ ID NO 53955
  misc_feature (1)..(667): Ortholog of  Ceres SEQ ID NO 15224912 as cited in SEQ ID NO 63475
  misc_feature (1)..(667): Ortholog of  Ceres SEQ ID NO 13659394 as cited in SEQ ID NO 67049
gttcaccgagaccttggactactattcggccatgttcgagtcaatcgacacgaacctgccacgggacaacaaggagcggatcaacgtggagcagcactgtcttgccaaggacatcgtgaacatcatcgcctgcgaggggaaggaccgggtggagcgtcacgagctcctgggcaaatggcggtcgaggctgaccatggccgggttcagaccatacccgctgagctcgtacgtgaactcggtgatcaggaagctccttgcctgctactcggacaagtacaccctggaagagaaggatggcgcgatgctgctcggctggaagaacaggaagttgatatctgcttctgcttggcactgacagtaacgttttcagaagaccggaagtacacgtcaactcttacatatatatatgtatgtatgcataatgaattacctggtctgctttccgcaaaaaaggacgccctttgttgnacatgtacatgatgctgtacccttagttttcctgaagtgcagaccagagaagagaacattgacattagattgtagctgntaagctgtatggtaattacagttttnttttgctntcatgtattcacccctgtcatggacttttccaagngtatttttagntaatcagcatgcatacatgctgagatgctttttagtnttc

SEQ ID NO: 14326 - protein, 159 aa, Zea mays subsp. mays
  peptide (1)..(159): Ceres Seq. ID no. 12468825
  misc_feature (156)..(156): Xaa is any aa, unknown or other
VHRDLGLLFGHVRVNRHEPATGQQGADQRGAALSCQGHREHHRLRGEGPGGASRAPGQMAVEADHGRVQTIPAELVRELGDQEAPCLLLGQVHPGREGWRDAARLEEQEVDICFCLALTVTFSEDRKYTSTLTYIYVCMHNELPGLLSAKKDALCXTCT

SEQ ID NO: 14327 - protein, 117 aa, Zea mays subsp. mays
  peptide (1)..(117): Ceres Seq. ID no. 12468826
FTETLDYYSAMFESIDTNLPRDNKERINVEQHCLAKDIVNIIACEGKDRVERHELLGKWRSRLTMAGFRPYPLSSYVNSVIRKLLACYSDKYTLEEKDGAMLLGWKNRKLISASAWH

SEQ ID NO: 14328 - protein, 107 aa, Zea mays subsp. mays
  peptide (1)..(107): Ceres Seq. ID no. 12468827
MFESIDTNLPRDNKERINVEQHCLAKDIVNIIACEGKDRVERHELLGKWRSRLTMAGFRPYPLSSYVNSVIRKLLACYSDKYTLEEKDGAMLLGWKNRKLISASAWH

SEQ ID NO: 14329 - DNA, 383 bp, Zea mays subsp. mays
  misc_feature (1)..(383): Ceres Seq. ID no. 3477243
  misc_feature (1)..(383): Ortholog of  Ceres SEQ ID NO 15169142 as cited in SEQ ID NO 58748
tttttataacatatacaatggktgatggttgggctggggtasctggtgagatattgagattgaagccactagtgatcttccacctgaaaaactttttcttggtcaagactgagaaagacagggaagaggcaatggaccctggaagtattggttttgactcaagcgaacctcaaattcagctgtatttcttacttggtcttgtctatgcggcagtgacaccatttttgctcccttttgtattgatattctttgggtttgcgtacgttgtataccgccaccagataataaatgtgtataatcaagaatacgagagtgcagcagcattttggccaagtgttcatggacgcataatcacagcgttgattgtatcacagctgcttctc

SEQ ID NO: 14330 - protein, 127 aa, Zea mays subsp. mays
  peptide (1)..(127): Ceres Seq. ID no. 3477244
  misc_feature (7)..(7): Xaa is any aa, unknown or other
  misc_feature (14)..(14): Xaa is any aa, unknown or other
FITYTMXDGWAGVXGEILRLKPLVIFHLKNFFLVKTEKDREEAMDPGSIGFDSSEPQIQLYFLLGLVYAAVTPFLLPFVLIFFGFAYVVYRHQIINVYNQEYESAAAFWPSVHGRIITALIVSQLLL

SEQ ID NO: 14331 - protein, 122 aa, Zea mays subsp. mays
  peptide (1)..(122): Ceres Seq. ID no. 3477245
  misc_feature (2)..(2): Xaa is any aa, unknown or other
  misc_feature (9)..(9): Xaa is any aa, unknown or other
MXDGWAGVXGEILRLKPLVIFHLKNFFLVKTEKDREEAMDPGSIGFDSSEPQIQLYFLLGLVYAAVTPFLLPFVLIFFGFAYVVYRHQIINVYNQEYESAAAFWPSVHGRIITALIVSQLLL

SEQ ID NO: 14332 - protein, 84 aa, Zea mays subsp. mays
  peptide (1)..(84): Ceres Seq. ID no. 3477246
MDPGSIGFDSSEPQIQLYFLLGLVYAAVTPFLLPFVLIFFGFAYVVYRHQIINVYNQEYESAAAFWPSVHGRIITALIVSQLLL

SEQ ID NO: 14333 - DNA, 566 bp, Zea mays subsp. mays
  misc_feature (1)..(566): Ceres Seq. ID no. 13564026
  misc_feature (1)..(566): Ortholog of  Ceres SEQ ID NO 12586556 as cited in SEQ ID NO 64667
agcagaggcggtggagctgttctggaggatgagaaaggcgagggttaaggatgacgcagtgactatggttgccctgctataaaagcctgtgcggagctgggtgacctagaacttgggcggtgggtgcatgcacgagtggacttggaagggtggcagcggaggactgtgttgctggacaatgctctcatccatatgtatgtgaagtgtggtgctgtggaagatgcacatcgcttgtttgggatgatgccaaggcggagctccgtttcttggactactatgatctcgggtcttgcaatgcatggtcacccccaggaggcgctggacttgttccagagaatgcaggatcggcctgatggtgccacgctgctggcagttctgcgggcatgcagtctggcagggaggattgatgatgcacggtggtactttgaaagtatggaaagagtttacgggataaatccagagatacaacactatggatgcatggttgacatgctctgttgctggagacggttgaatgaarcacttgagcttgkggagaaaatgccattccagccaaacgagggtgc

SEQ ID NO: 14334 - protein, 124 aa, Zea mays subsp. mays
  peptide (1)..(124): Ceres Seq. ID no. 13564027
  misc_feature (110)..(110): Xaa is any aa, unknown or other
  misc_feature (114)..(114): Xaa is any aa, unknown or other
MYVKCGAVEDAHRLFGMMPRRSSVSWTTMISGLAMHGHPQEALDLFQRMQDRPDGATLLAVLRACSLAGRIDDARWYFESMERVYGINPEIQHYGCMVDMLCCWRRLNEXLELXEKMPFQPNEG

SEQ ID NO: 14335 - protein, 108 aa, Zea mays subsp. mays
  peptide (1)..(108): Ceres Seq. ID no. 13564028
  misc_feature (94)..(94): Xaa is any aa, unknown or other
  misc_feature (98)..(98): Xaa is any aa, unknown or other
MMPRRSSVSWTTMISGLAMHGHPQEALDLFQRMQDRPDGATLLAVLRACSLAGRIDDARWYFESMERVYGINPEIQHYGCMVDMLCCWRRLNEXLELXEKMPFQPNEG

SEQ ID NO: 14336 - protein, 107 aa, Zea mays subsp. mays
  peptide (1)..(107): Ceres Seq. ID no. 13564029
  misc_feature (93)..(93): Xaa is any aa, unknown or other
  misc_feature (97)..(97): Xaa is any aa, unknown or other
MPRRSSVSWTTMISGLAMHGHPQEALDLFQRMQDRPDGATLLAVLRACSLAGRIDDARWYFESMERVYGINPEIQHYGCMVDMLCCWRRLNEXLELXEKMPFQPNEG

SEQ ID NO: 14337 - DNA, 496 bp, Zea mays subsp. mays
  misc_feature (1)..(496): Ceres Seq. ID no. 3477512
  misc_feature (1)..(496): Ortholog of  Ceres SEQ ID NO 15224473 as cited in SEQ ID NO 66479
agcgtcgccctcgtcgacgaggtcaccgtmrtccgcgacagggtcaccagggtctcgcgaggctgctgcttcgtgatctgcccatcaagggaggaggctgataaggctgtgactacataccacaacaagcgcacactacctggggcctcaagtccattgcaagtaaaatatgccgatggggagttggaaagattggagcacaagctcttcgttggaatgctccccaaaaatgtaacacatgctgaaatgacggatttattttcaaaatatggaaatataaaggatttacagattctgagaggctctcagcaaacgagcaaagctggttgtgcctttctaaaatatgaaacaaaagagcaagctgtggctgctatagaagctctaaatggaacacacaaaatagagggttcaagtgttcccttggttgtcaaatgggctgacactgaaaaggaaaggcaggctcgaaaagcacaaaaagctcaanttccagtcttct

SEQ ID NO: 14338 - protein, 165 aa, Zea mays subsp. mays
  peptide (1)..(165): Ceres Seq. ID no. 3477513
  misc_feature (10)..(10): Xaa is any aa, unknown or other
  misc_feature (11)..(11): Xaa is any aa, unknown or other
  misc_feature (162)..(162): Xaa is any aa, unknown or other
SVALVDEVTXXRDRVTRVSRGCCFVICPSREEADKAVTTYHNKRTLPGASSPLQVKYADGELERLEHKLFVGMLPKNVTHAEMTDLFSKYGNIKDLQILRGSQQTSKAGCAFLKYETKEQAVAAIEALNGTHKIEGSSVPLVVKWADTEKERQARKAQKAQXPVF

SEQ ID NO: 14339 - protein, 93 aa, Zea mays subsp. mays
  peptide (1)..(93): Ceres Seq. ID no. 3477514
  misc_feature (90)..(90): Xaa is any aa, unknown or other
MLPKNVTHAEMTDLFSKYGNIKDLQILRGSQQTSKAGCAFLKYETKEQAVAAIEALNGTHKIEGSSVPLVVKWADTEKERQARKAQKAQXPVF

SEQ ID NO: 14340 - protein, 83 aa, Zea mays subsp. mays
  peptide (1)..(83): Ceres Seq. ID no. 3477515
  misc_feature (80)..(80): Xaa is any aa, unknown or other
MTDLFSKYGNIKDLQILRGSQQTSKAGCAFLKYETKEQAVAAIEALNGTHKIEGSSVPLVVKWADTEKERQARKAQKAQXPVF

SEQ ID NO: 14341 - DNA, 1144 bp, Zea mays subsp. mays; identical to SEQ ID NO: 13990
  misc_feature (1)..(1144): Ceres Seq. ID no. 13598993
  misc_feature (1)..(1144): Ortholog of  Ceres SEQ ID NO 14315410 as cited in SEQ ID NO 57189

SEQ ID NO: 14342 - protein, 238 aa, Zea mays subsp. mays; identical to SEQ ID NO: 13991
  peptide (1)..(238): Ceres Seq. ID no. 13598994

SEQ ID NO: 14343 - protein, 190 aa, Zea mays subsp. mays; identical to SEQ ID NO: 13992
  peptide (1)..(190): Ceres Seq. ID no. 13598995

SEQ ID NO: 14344 - protein, 133 aa, Zea mays subsp. mays; identical to SEQ ID NO: 13993
  peptide (1)..(133): Ceres Seq. ID no. 13598996

SEQ ID NO: 14345 - DNA, 1094 bp, Zea mays subsp. mays
  misc_feature (1)..(1094): Ceres Seq. ID no. 13504098
  misc_feature (1)..(1094): Ortholog of  Ceres SEQ ID NO 15169466 as cited in SEQ ID NO 66135
cccagctccgcgccgtgtacgggcacaccttctcgtactgcctggtggagcacggcagcgacgccggcagcaaggtggtgttcggggaggactacttggtgctggcgcatccgcagctcaagtacacggcgttcgcgcccacgtcgtcgccggcggacacattctattacgtgaagctcaagggcgtgctggtgggcggcgacctgctgaacatcagctcggacacgtgggacgtgggcaaggacgggtccggcggcacgatcatcgactccggcacgacgctgagctacttcgtggagccggcgtaccaggtgatccggcaagcgttcgtcgatcgcatgagcaggctgtaccctctgatcccggacttcccggtgctgaacccgtgctacaacgtctctggcgtggagcgacccgaggtgccggagatgtcgctgctgttcgccgacggtgccgtgtgggacttccccgcggagaactacttngtccggctggacccggacggcatcatgtgcctggcggtccggggcaccccgcgcaccggcatgtccatcatcggtaacttccagcagcagaactttcacgtcgtgtacgacctgcagaacaaccggctgggcttcgcgccgcggcggtgcgccgaggtgtagtgtatagccgccggcgaggcctcctgagactgagaggacgaacaattcgaactcagtcctcgcttgattgattggattgggaggcaaattgggtgtagaaatttttggttgggaaggacggtggcacgtacgcaagctctaatacatagttttttttgttgcatttatctccaaggagagaaggttagggatattttattaaggaccgttcaggtgggttgtaacgggaaaatactgattttgttcccatgtacaatacctgtttcttcactcaaattttagaaattgtaagttgtagattaagaatgagagtgcacacaatcttttttttaagtaattgctcatgaagatatgattacaactacggaatagattccatcttttagaatatcatgcacaaattattcttattctatcaaatgctatgtaaggccctatttcaatgtc

SEQ ID NO: 14346 - protein, 214 aa, Zea mays subsp. mays
  peptide (1)..(214): Ceres Seq. ID no. 13504099
  misc_feature (161)..(161): Xaa is any aa, unknown or other
QLRAVYGHTFSYCLVEHGSDAGSKVVFGEDYLVLAHPQLKYTAFAPTSSPADTFYYVKLKGVLVGGDLLNISSDTWDVGKDGSGGTIIDSGTTLSYFVEPAYQVIRQAFVDRMSRLYPLIPDFPVLNPCYNVSGVERPEVPEMSLLFADGAVWDFPAENYXVRLDPDGIMCLAVRGTPRTGMSIIGNFQQQNFHVVYDLQNNRLGFAPRRCAEV

SEQ ID NO: 14347 - protein, 186 aa, Zea mays subsp. mays
  peptide (1)..(186): Ceres Seq. ID no. 13504100
  misc_feature (162)..(162): Xaa is any aa, unknown or other
PAPRRVRAHLLVLPGGARQRRRQQGGVRGGLLGAGASAAQVHGVRAHVVAGGHILLREAQGRAGGRRPAEHQLGHVGRGQGRVRRHDHRLRHDAELLRGAGVPGDPASVRRSHEQAVPSDPGLPGAEPVLQRLWRGATRGAGDVAAVRRRCRVGLPRGELLXPAGPGRHHVPGGPGHPAHRHVHHR

SEQ ID NO: 14348 - DNA, 503 bp, Zea mays subsp. mays
  misc_feature (1)..(503): Ceres Seq. ID no. 3477685
  misc_feature (1)..(503): Ortholog of  Ceres SEQ ID NO 12781552 as cited in SEQ ID NO 51997
  misc_feature (1)..(503): Ortholog of  Ceres SEQ ID NO 15169228 as cited in SEQ ID NO 55423
  misc_feature (1)..(503): Ortholog of  Ceres SEQ ID NO 13597237 as cited in SEQ ID NO 64136
  misc_feature (1)..(503): Ortholog of  Ceres SEQ ID NO 13598601 as cited in SEQ ID NO 69129
actttgttgatcctgagagaattgagcatggtagcccattaaggttacctggccacccagtgaatggtcagccgatggatctggagggctggtcagggattcaaacagaggcttctcagcatatgggggttctacaagcatcatcaatgggctggaatggtgctcctgtacttgctgccactcctgttgtcaagaaagtcatgaggctggatgttccagtagacaagtatcctaactacaactttgttggtcgtttattggggccgcgaggtaactccctgaaaagggttgaagcttcaacccaatgtagagtttacattcgaggacggggttctgtgaaagactctgttaaggaagacaagctgagggataaacctgggtatgaacaccttaatgaacaactgcatgtgcttgtggaagcagagtttccagcagatatggttgatgtgcgtcttaatcaagctgtgtccatcctaraggatcttcttaaaccaattgacgag

SEQ ID NO: 14349 - protein, 167 aa, Zea mays subsp. mays
  peptide (1)..(167): Ceres Seq. ID no. 3477686
  misc_feature (159)..(159): Xaa is any aa, unknown or other
FVDPERIEHGSPLRLPGHPVNGQPMDLEGWSGIQTEASQHMGVLQASSMGWNGAPVLAATPVVKKVMRLDVPVDKYPNYNFVGRLLGPRGNSLKRVEASTQCRVYIRGRGSVKDSVKEDKLRDKPGYEHLNEQLHVLVEAEFPADMVDVRLNQAVSILXDLLKPIDE

SEQ ID NO: 14350 - protein, 143 aa, Zea mays subsp. mays
  peptide (1)..(143): Ceres Seq. ID no. 3477687
  misc_feature (135)..(135): Xaa is any aa, unknown or other
MDLEGWSGIQTEASQHMGVLQASSMGWNGAPVLAATPVVKKVMRLDVPVDKYPNYNFVGRLLGPRGNSLKRVEASTQCRVYIRGRGSVKDSVKEDKLRDKPGYEHLNEQLHVLVEAEFPADMVDVRLNQAVSILXDLLKPIDE

SEQ ID NO: 14351 - protein, 127 aa, Zea mays subsp. mays
  peptide (1)..(127): Ceres Seq. ID no. 3477688
  misc_feature (119)..(119): Xaa is any aa, unknown or other
MGVLQASSMGWNGAPVLAATPVVKKVMRLDVPVDKYPNYNFVGRLLGPRGNSLKRVEASTQCRVYIRGRGSVKDSVKEDKLRDKPGYEHLNEQLHVLVEAEFPADMVDVRLNQAVSILXDLLKPIDE

SEQ ID NO: 14352 - DNA, 520 bp, Zea mays subsp. mays
  misc_feature (1)..(520): Ceres Seq. ID no. 3477628
  misc_feature (1)..(520): Ortholog of  Ceres SEQ ID NO 12566921 as cited in SEQ ID NO 0
gacctgaccggcgggatcaagttctgctctaagttacctgtccagaagaagcagcagcagcagcaggctgcctgccagaagctgatcataaagcacggcgccctgaagaagctcagcctgtggggctgttcagcgatcgacgccttgtacgtgaactgcccggagctggtcgatctgaacctcaacgcgtgcacgaaccttcatccagagcggctgctgatccagtgccccaagctgaaggacgtgcacgtcagcgggtgccgcgacatgctgatcggcgccgtcaggaaccaggtcctgaacgagttcgcggccgccgagccccggctgccctgcaagcggctggccgacgggtcgaagcgcgtgcacgtgccccacttcatgatcgagcagctggaggagcaggagaaatggggcgggccgcggaagagccagtgcaccgtccacctcacataggcagataggctaggccggccgctgggcgctggcgagtgctactgstggcctgtgaagtgaggcc

SEQ ID NO: 14353 - protein, 151 aa, Zea mays subsp. mays
  peptide (1)..(151): Ceres Seq. ID no. 3477629
DLTGGIKFCSKLPVQKKQQQQQAACQKLIIKHGALKKLSLWGCSAIDALYVNCPELVDLNLNACTNLHPERLLIQCPKLKDVHVSGCRDMLIGAVRNQVLNEFAAAEPRLPCKRLADGSKRVHVPHFMIEQLEEQEKWGGPRKSQCTVHLT

SEQ ID NO: 14354 - DNA, 583 bp, Zea mays subsp. mays
  misc_feature (1)..(583): Ceres Seq. ID no. 3477594
  misc_feature (1)..(583): Ortholog of  Ceres SEQ ID NO 13592961 as cited in SEQ ID NO 20522
attatatcttgcaatctttcagagccaaaaagaggattactatgaggaacaaacaggctgcattaagtggctcaatgattttgctgagtaccataataagatgcttcaggaggagttggagaaactcaggaatcttcaccctgatgtgaccatcatttatgctgattactatggtgctgcattgaacatattccgtgccccactccagtttggtttcacagtcccattgaatgcgtgttgtggaagtgatgccccatacaactgttccccttcaatattgtgcgggcgtcctggatctacagtgtgtcctgacccatcaaaatacatctcatgggacggcttacacttcactgaggcgagttacaaagttgtcattcaaggagtacttggggggtatgccaagcctcccctttcaraaacctgcaagggtgcggaattcaaagtttctcagcttcaccaatgtacagataatccaacaaacactgtgtcatacgatgctttgagctcttttatttgatctgctcgtaaaagaagtgcatttagagttacagtgggcagcataratgatgttgcaggaccgaac

SEQ ID NO: 14355 - protein, 171 aa, Zea mays subsp. mays
  peptide (1)..(171): Ceres Seq. ID no. 3477595
  misc_feature (139)..(139): Xaa is any aa, unknown or other
LYLAIFQSQKEDYYEEQTGCIKWLNDFAEYHNKMLQEELEKLRNLHPDVTIIYADYYGAALNIFRAPLQFGFTVPLNACCGSDAPYNCSPSILCGRPGSTVCPDPSKYISWDGLHFTEASYKVVIQGVLGGYAKPPLSXTCKGAEFKVSQLHQCTDNPTNTVSYDALSSFI

SEQ ID NO: 14356 - protein, 138 aa, Zea mays subsp. mays
  peptide (1)..(138): Ceres Seq. ID no. 3477596
  misc_feature (106)..(106): Xaa is any aa, unknown or other
MLQEELEKLRNLHPDVTIIYADYYGAALNIFRAPLQFGFTVPLNACCGSDAPYNCSPSILCGRPGSTVCPDPSKYISWDGLHFTEASYKVVIQGVLGGYAKPPLSXTCKGAEFKVSQLHQCTDNPTNTVSYDALSSFI

SEQ ID NO: 14357 - protein, 90 aa, Zea mays subsp. mays
  peptide (1)..(90): Ceres Seq. ID no. 3477597
  misc_feature (62)..(62): Xaa is any aa, unknown or other
MRVVEVMPHTTVPLQYCAGVLDLQCVLTHQNTSHGTAYTSLRRVTKLSFKEYLGGMPSLPFXKPARVRNSKFLSFTNVQIIQQTLCHTML

SEQ ID NO: 14358 - DNA, 1127 bp, Zea mays subsp. mays
  misc_feature (1)..(1127): Ceres Seq. ID no. 14305770
  misc_feature (1)..(1127): Ortholog of  Ceres SEQ ID NO 15225244 as cited in SEQ ID NO 66088
gaaaaaccacgatcccaagtggtggctaggggagccgctctgggccaccgctgccgcccagggggtcctgcctgccacattcttctggccgggttcggaggttacgaagggttcctggaactgccccgacaagtactgccgccactacaatggctcggtgccgtttgaggagagggtcgacaccatccttggctattttgatctcccgcctaaccaaatgccacagttcctgacgctgtactttgaggatcctgatcaccaggggcaccaggtgggtcctgacgatccttcaatcaccgatgcggtcgtacatatcgatgagatgctcgggaggctcattgctggtttggaggctaggggaatgtttgaggatgtgaacattatattggtaggtgaccatggtatggttgggacctgcgataggaagcttgtgtttctcgaagagttggctccatggatcgagttgaagtcagattgggttctgtcaatgactccattgctggcaatcaggccgccagatggtgtgtcgccagctgaggttgtggccaagatgaatgaggggcttggatctgggaaggtgaagaatggggaatatttgaagatgtacttaaaagaggatttgcctactcgcctgcattattcagagagttacaggatcccgccaatcatcgggctggttggggaagggtataagatcgagatgaagcgctccaagagaaatgagtgtggaggagcccatgggtacgacaatgccttcttctcaatgaggaccatattcgccgcacatggacctcgttttcagggtggtagaactgtgccctcatttgagaatgtggagatatacaatgtcatggcttccattctcaatttgaagcctgctccaaacaatggttcagcttctttccctggcacgattctgttgccgaacaaatgatgttggattggttttgtaggagtaagggcacatggatgtatgatggtgttctcatttggttattgtattgtacctcttaaattagacttctgccacatcactgtatctgagcaaaaatgctgctagtagagagttgcttctctctagtgacaacatttggaaacatgttccacatcaaacgtttggctgctcg

SEQ ID NO: 14359 - protein, 310 aa, Zea mays subsp. mays
  peptide (1)..(310): Ceres Seq. ID no. 14305771
KNHDPKWWLGEPLWATAAAQGVLPATFFWPGSEVTKGSWNCPDKYCRHYNGSVPFEERVDTILGYFDLPPNQMPQFLTLYFEDPDHQGHQVGPDDPSITDAVVHIDEMLGRLIAGLEARGMFEDVNIILVGDHGMVGTCDRKLVFLEELAPWIELKSDWVLSMTPLLAIRPPDGVSPAEVVAKMNEGLGSGKVKNGEYLKMYLKEDLPTRLHYSESYRIPPIIGLVGEGYKIEMKRSKRNECGGAHGYDNAFFSMRTIFAAHGPRFQGGRTVPSFENVEIYNVMASILNLKPAPNNGSASFPGTILLPNK

SEQ ID NO: 14360 - protein, 238 aa, Zea mays subsp. mays
  peptide (1)..(238): Ceres Seq. ID no. 14305772
MPQFLTLYFEDPDHQGHQVGPDDPSITDAVVHIDEMLGRLIAGLEARGMFEDVNIILVGDHGMVGTCDRKLVFLEELAPWIELKSDWVLSMTPLLAIRPPDGVSPAEVVAKMNEGLGSGKVKNGEYLKMYLKEDLPTRLHYSESYRIPPIIGLVGEGYKIEMKRSKRNECGGAHGYDNAFFSMRTIFAAHGPRFQGGRTVPSFENVEIYNVMASILNLKPAPNNGSASFPGTILLPNK

SEQ ID NO: 14361 - protein, 203 aa, Zea mays subsp. mays
  peptide (1)..(203): Ceres Seq. ID no. 14305773
MLGRLIAGLEARGMFEDVNIILVGDHGMVGTCDRKLVFLEELAPWIELKSDWVLSMTPLLAIRPPDGVSPAEVVAKMNEGLGSGKVKNGEYLKMYLKEDLPTRLHYSESYRIPPIIGLVGEGYKIEMKRSKRNECGGAHGYDNAFFSMRTIFAAHGPRFQGGRTVPSFENVEIYNVMASILNLKPAPNNGSASFPGTILLPNK

SEQ ID NO: 14362 - DNA, 763 bp, Zea mays subsp. mays
  misc_feature (1)..(763): Ceres Seq. ID no. 15169969
  misc_feature (1)..(763): Ortholog of  Ceres SEQ ID NO 15172970 as cited in SEQ ID NO 51736
  misc_feature (1)..(763): Ortholog of  Ceres SEQ ID NO 15224985 as cited in SEQ ID NO 55771
  misc_feature (1)..(763): Ortholog of  Ceres SEQ ID NO 13598157 as cited in SEQ ID NO 61570
  misc_feature (1)..(763): Ortholog of  Ceres SEQ ID NO 15173774 as cited in SEQ ID NO 61771
atcacaagcgcttagtgatcagttaatactaagggcaggcacacctctgcttcgcgctagtgatcaagcaagtgctttctgtactctgcagcaatggcaggcaaggcctcggtcgcgctgttcctcgccgtgaacctggtggtgttcgccatggccagcgcctgcggtggcaactgccccacgccgaccccgtccaccccgtcgacgccgaccccgacgccggcctcgttcggcaagtgcccccgcgacgcgctcaagctgggcgtgtgcgccaacgtgctgggactgatcaaggccaaggtgggcgtgccgcccacggagccatgctgcccgctgctgaagggactcgtcgacctcgaggccgccgtgtgcctctgcaccgccatcaagggcgaggtcctcggaatcaagctcaacctgcccgtcgacctcagcctcatcctcaaccactgcggcaagaccgtgcccaccggattcaaatgcctctaagctagccgcgagcatgcggatatatatgtgttcttttggttgccattcgcctgcagacttcttgtcgtttgctacttattaagcgagtgctagctctgcatgcatgactacgtcctttgcatgttgatgagcaactttcgatacttttgggtgtttgttttatgtaagtgcttcgtcctttacatcgacagtgtcccagaactatttgtactgttattcttttatttgtacccagcaatctgctcgatgaaataaagcttattatatttattgg

SEQ ID NO: 14363 - protein, 131 aa, Zea mays subsp. mays
  peptide (1)..(131): Ceres Seq. ID no. 15169970
MAGKASVALFLAVNLVVFAMASACGGNCPTPTPSTPSTPTPTPASFGKCPRDALKLGVCANVLGLIKAKVGVPPTEPCCPLLKGLVDLEAAVCLCTAIKGEVLGIKLNLPVDLSLILNHCGKTVPTGFKCL

SEQ ID NO: 14364 - protein, 112 aa, Zea mays subsp. mays
  peptide (1)..(112): Ceres Seq. ID no. 15169971
MASACGGNCPTPTPSTPSTPTPTPASFGKCPRDALKLGVCANVLGLIKAKVGVPPTEPCCPLLKGLVDLEAAVCLCTAIKGEVLGIKLNLPVDLSLILNHCGKTVPTGFKCL

SEQ ID NO: 14365 - DNA, 437 bp, Zea mays subsp. mays
  misc_feature (1)..(437): Ceres Seq. ID no. 3477340
  misc_feature (1)..(437): Ortholog of  Ceres SEQ ID NO 14308099 as cited in SEQ ID NO 58651
  misc_feature (1)..(437): Ortholog of  Ceres SEQ ID NO 13596893 as cited in SEQ ID NO 62932
gtggctctcaacttggatttcgatcaagtcaaggagtttgtcaaggascggctgggggttgaggttgagatgggtggctgcaaggctccaatcacgaccttcatcgtcgagccatttgtgccacatgatcaagagtactacctttcgattgtctcagagaggttgggcagcaccatcagcttctcagagtgtggagggattgagatcgaggagaactgggacaaggttaagactattttccttcctactgagaagccaatgacgtctgattcatgtgctcctttgattgcaacccttccattggaggcacscggaaaaawtggtgacttcattaaaggagtgtttgccgtcttcctagacttggatttctcattttyttgaratgaatccgttcaccatggtcaatggggagccatatcctctggacatgagaggag

SEQ ID NO: 14366 - protein, 126 aa, Zea mays subsp. mays
  peptide (1)..(126): Ceres Seq. ID no. 3477341
  misc_feature (16)..(16): Xaa is any aa, unknown or other
  misc_feature (104)..(104): Xaa is any aa, unknown or other
  misc_feature (107)..(107): Xaa is any aa, unknown or other
  misc_feature (126)..(126): Xaa is any aa, unknown or other
VALNLDFDQVKEFVKXRLGVEVEMGGCKAPITTFIVEPFVPHDQEYYLSIVSERLGSTISFSECGGIEIEENWDKVKTIFLPTEKPMTSDSCAPLIATLPLEAXGKXGDFIKGVFAVFLDLDFSFX

SEQ ID NO: 14367 - protein, 103 aa, Zea mays subsp. mays
  peptide (1)..(103): Ceres Seq. ID no. 3477342
  misc_feature (81)..(81): Xaa is any aa, unknown or other
  misc_feature (84)..(84): Xaa is any aa, unknown or other
  misc_feature (103)..(103): Xaa is any aa, unknown or other
MGGCKAPITTFIVEPFVPHDQEYYLSIVSERLGSTISFSECGGIEIEENWDKVKTIFLPTEKPMTSDSCAPLIATLPLEAXGKXGDFIKGVFAVFLDLDFSFX

SEQ ID NO: 14368 - protein, 86 aa, Zea mays subsp. mays
  peptide (1)..(86): Ceres Seq. ID no. 3477343
  misc_feature (16)..(16): Xaa is any aa, unknown or other
WLSTWISIKSRSLSRXGWGLRLRWVAARLQSRPSSSSHLCHMIKSTTFRLSQRGWAAPSASQSVEGLRSRRTGTRLRLFSFLLRSQ

SEQ ID NO: 14369 - DNA, 1080 bp, Zea mays subsp. mays
  misc_feature (1)..(1080): Ceres Seq. ID no. 12634491
  misc_feature (1)..(1080): Ortholog of  Ceres SEQ ID NO 13590780 as cited in SEQ ID NO 68149
actcaattatcaaaaccaaactagggacattcaaatggttggcttactttttgctacagagttgcctcttcgcatggctgatttcggagtgcttcatagaaatgagcttagtggtgcacttactggtttgacacgggttagaagattccagcaggatgatgctcatatcttctgcagagaggaccaaatcaaggacgaggttaaggctgttttggaattcatcaattatgtttacgagatatttggcttcaaatatgagttggagttgtctacgagaccagagaagtatctaggtgaagttgaaacttggaacaaagctgaacaacaattgacagaagctttaaatgagtttgggaagccatggaagattaatgaaggggatggtgctttctacggcccaaaaattgatattggtgtgtttgatgcccttaagaggaaatttcagtgtgcaaccctacagctggattttcagctgcccattcggttcaagctggcttattctgctgaggatgaagccaaaattgaaaggcctgtgatgatacacagggcaatcctaggttcggttgaaaggatgcttgccattcttttggagcattacaatggtaaatggcccttatggctaagccctcgccaggccattgtttgctcggtatcttctggttcagtggaatatgcgaaacaggttcttgccactctacatgaagctggttttcatgttgatattgacgcgagtgacaggacaatacaaaagaaggtacgggaagctcaactggcccaattcaactacattcttgtcgtaggtgcacaagaggccgagactggaaatatatgcgttagggtaagagacaatgctgacctggtcacaacgagtgtagatggcttcatcacacgtttgagggacgaaatcgcagccttcaaatgattttgatgctgcataatttcctactactcgtttgtgattttgacgagtttttagtgaccagcatcgagttcctcgtgttactgttcttgtttgtatgaagctaaaaggttgtctttttgttattaattacagatgcgaagttaaatactgccgctagt

SEQ ID NO: 14370 - protein, 306 aa, Zea mays subsp. mays
  peptide (1)..(306): Ceres Seq. ID no. 12634492
LNYQNQTRDIQMVGLLFATELPLRMADFGVLHRNELSGALTGLTRVRRFQQDDAHIFCREDQIKDEVKAVLEFINYVYEIFGFKYELELSTRPEKYLGEVETWNKAEQQLTEALNEFGKPWKINEGDGAFYGPKIDIGVFDALKRKFQCATLQLDFQLPIRFKLAYSAEDEAKIERPVMIHRAILGSVERMLAILLEHYNGKWPLWLSPRQAIVCSVSSGSVEYAKQVLATLHEAGFHVDIDASDRTIQKKVREAQLAQFNYILVVGAQEAETGNICVRVRDNADLVTTSVDGFITRLRDEIAAFK

SEQ ID NO: 14371 - protein, 295 aa, Zea mays subsp. mays
  peptide (1)..(295): Ceres Seq. ID no. 12634493
MVGLLFATELPLRMADFGVLHRNELSGALTGLTRVRRFQQDDAHIFCREDQIKDEVKAVLEFINYVYEIFGFKYELELSTRPEKYLGEVETWNKAEQQLTEALNEFGKPWKINEGDGAFYGPKIDIGVFDALKRKFQCATLQLDFQLPIRFKLAYSAEDEAKIERPVMIHRAILGSVERMLAILLEHYNGKWPLWLSPRQAIVCSVSSGSVEYAKQVLATLHEAGFHVDIDASDRTIQKKVREAQLAQFNYILVVGAQEAETGNICVRVRDNADLVTTSVDGFITRLRDEIAAFK

SEQ ID NO: 14372 - protein, 282 aa, Zea mays subsp. mays
  peptide (1)..(282): Ceres Seq. ID no. 12634494
MADFGVLHRNELSGALTGLTRVRRFQQDDAHIFCREDQIKDEVKAVLEFINYVYEIFGFKYELELSTRPEKYLGEVETWNKAEQQLTEALNEFGKPWKINEGDGAFYGPKIDIGVFDALKRKFQCATLQLDFQLPIRFKLAYSAEDEAKIERPVMIHRAILGSVERMLAILLEHYNGKWPLWLSPRQAIVCSVSSGSVEYAKQVLATLHEAGFHVDIDASDRTIQKKVREAQLAQFNYILVVGAQEAETGNICVRVRDNADLVTTSVDGFITRLRDEIAAFK

SEQ ID NO: 14373 - DNA, 480 bp, Zea mays subsp. mays
  misc_feature (1)..(480): Ceres Seq. ID no. 13571785
  misc_feature (1)..(480): Ortholog of  Ceres SEQ ID NO 15226728 as cited in SEQ ID NO 1302
tttactgaactgcactgaccactattcagcattaggtttccgtcsmtatgagaacatagatgtatcatctcttaagagagaatacaagaaaaaggctatgttagtccatcctgataagaatatgggcaatgataaagctgctgatgcatttaaaaagcttcaaaatgcatatgagattcttcttgattcactgaaacgcaagacatatgatgatgagttgaggagggaagacctcttgaactacttcaggcagagtgtttctcaaaagaatggaagaaacagtactttccaacatgggttcagcccttcagaaggtgttgatgaaggtccttatggtctttccagaagaatagcttgtaaaaagtgcagcgactttcatctttggatttatactggaagagctaaatcacaagcgagatggtgtcaggactgcaaggagttccatcaagctaaagatggcgatggatgggtcgaacagtc

SEQ ID NO: 14374 - protein, 159 aa, Zea mays subsp. mays
  peptide (1)..(159): Ceres Seq. ID no. 13571786
  misc_feature (15)..(15): Xaa is any aa, unknown or other
LLNCTDHYSALGFRXYENIDVSSLKREYKKKAMLVHPDKNMGNDKAADAFKKLQNAYEILLDSLKRKTYDDELRREDLLNYFRQSVSQKNGRNSTFQHGFSPSEGVDEGPYGLSRRIACKKCSDFHLWIYTGRAKSQARWCQDCKEFHQAKDGDGWVEQ

SEQ ID NO: 14375 - protein, 127 aa, Zea mays subsp. mays
  peptide (1)..(127): Ceres Seq. ID no. 13571787
MLVHPDKNMGNDKAADAFKKLQNAYEILLDSLKRKTYDDELRREDLLNYFRQSVSQKNGRNSTFQHGFSPSEGVDEGPYGLSRRIACKKCSDFHLWIYTGRAKSQARWCQDCKEFHQAKDGDGWVEQ

SEQ ID NO: 14376 - protein, 119 aa, Zea mays subsp. mays
  peptide (1)..(119): Ceres Seq. ID no. 13571788
MGNDKAADAFKKLQNAYEILLDSLKRKTYDDELRREDLLNYFRQSVSQKNGRNSTFQHGFSPSEGVDEGPYGLSRRIACKKCSDFHLWIYTGRAKSQARWCQDCKEFHQAKDGDGWVEQ

SEQ ID NO: 14377 - DNA, 1458 bp, Zea mays subsp. mays
  misc_feature (1)..(1458): Ceres Seq. ID no. 13586374
  misc_feature (1)..(1458): Ortholog of  Ceres SEQ ID NO 13502952 as cited in SEQ ID NO 62271
  misc_feature (1)..(1458): Ortholog of  Ceres SEQ ID NO 13502973 as cited in SEQ ID NO 68052
  misc_feature (1)..(1458): Ortholog of  Ceres SEQ ID NO 13596000 as cited in SEQ ID NO 68188
aaaaaacaacaactacttcctagtataaagtgacagtagcgggggagaagggaacgaaccaagcaacccaatccaaaccagacaagcaaggaatcccccgatggctcatcgcgttctcctcctcctctctctcgcgtcggccgccgcggttgccgccgccgtcgacgcggaggacccgctgatccggcaggtggttcccggtggagatgacaacgatctggagctgaacgcggagtcccacttcctgagcttcgtgcagcggttcggcaagtcctacaaggacgccgacgagcacgcgtaccggctgtccgttttcaaggacaacctgcgccgcgcgcgccggcaccagctgctggacccgtcggcggagcacggcgtcactaagttctccgacctcacgccggcagagttccgccggacctacctcggcctccgcaagtcccggcgcgctctcctcagagaactcggggagtcggcgcacgaggcgcccgtgctccccaccgatggtctccccgacgatttcgactggagggaccacggtgccgtcggccccgtcaagaaccagggttcgtgcgggtcgtgctggtcgttcagcgcgtctggagcgctggagggtgcgcactacctcgcaactggcaagctggaggtgctttcggagcagcagttcgtcgactgtgaccacgagtgtgattcatcggagcctgattcatgtgattcgggttgcaatggtgggctaatgacgacggcattcagttatctccagaaggccggtggccttgagagtgagaaggattacccttacactgggagtgatggcaaatgcaagtttgacaagtccaagattgttgcttcagttcagaacttcagtgttgtgtctgtggacgaggctcaaatttctgctaacctcatcaaacatgggccattggcaatcggcatcaatgctgcctacatgcagacatacatcggaggcgtgtcatgcccatacatctgtggcaggcaccttgaccatggtgttctccttgttggatatggtgcttctggtttcgcccccattcgcctgaaggacaagccttactggatcatcaagaactcgtggggcgagaactggggggagaacggatactacaagatatgcaggggttccaacgttcgcaacaagtgcggcgtcgattccatggtctctaccgtgtccgcagtccacgcctcgaaggagtagactctggtcagcggtgataatcgtgattccatatattgtagaactataatccctgctagtaatccatttgtgctgtttatgtatcgaaggcagcaaagatgtgtgaaagcggcaatgggatgcttgctgtaaggtaatatgtttggcttgctaggcatgctacacgctatttggatgtagcaacgttatcaccagctgtatacgctttttaatcgacaacatttgaataatatgtacataac

SEQ ID NO: 14378 - protein, 371 aa, Zea mays subsp. mays
  peptide (1)..(371): Ceres Seq. ID no. 13586375
MAHRVLLLLSLASAAAVAAAVDAEDPLIRQVVPGGDDNDLELNAESHFLSFVQRFGKSYKDADEHAYRLSVFKDNLRRARRHQLLDPSAEHGVTKFSDLTPAEFRRTYLGLRKSRRALLRELGESAHEAPVLPTDGLPDDFDWRDHGAVGPVKNQGSCGSCWSFSASGALEGAHYLATGKLEVLSEQQFVDCDHECDSSEPDSCDSGCNGGLMTTAFSYLQKAGGLESEKDYPYTGSDGKCKFDKSKIVASVQNFSVVSVDEAQISANLIKHGPLAIGINAAYMQTYIGGVSCPYICGRHLDHGVLLVGYGASGFAPIRLKDKPYWIIKNSWGENWGENGYYKICRGSNVRNKCGVDSMVSTVSAVHASKE

SEQ ID NO: 14379 - DNA, 520 bp, Zea mays subsp. mays
  misc_feature (1)..(520): Ceres Seq. ID no. 3604118
  misc_feature (1)..(520): Ortholog of  Ceres SEQ ID NO 14312293 as cited in SEQ ID NO 58744
  misc_feature (1)..(520): Ortholog of  Ceres SEQ ID NO 15177596 as cited in SEQ ID NO 59731
gtgttcatgcaatggaagcagkcatggcttgttgggagctcsaacaaactttacaaagccttacaggtgcatctcctggtgagggcactggggcaactatgtctgacgatgaagacaatcaggtggacagtgagagcaacatgtttgatggaaatgaggggtcagatggaatgggatttggcccattaatgttgactgagggtgagagatccttagttgagcgtgtccggcaggagctaaagcatgagcttaagcaggggtacagagacaaacttgtggatattcgggaagagatattgcggaagcgaagagctgggaaactccctggcgacactgcttctaccttaaaagcctggtggcaagctcattctaagtggccgtacccaaccgaggaagacaaggctcgactggtgcaggaaacagggctacaactgaagcagatcaataactggtttatcaaccagcgtaagcggaactggcacaacaattcggcgtcatcctygtcggacaaaagcaagag

SEQ ID NO: 14380 - protein, 172 aa, Zea mays subsp. mays
  peptide (1)..(172): Ceres Seq. ID no. 3604119
  misc_feature (7)..(7): Xaa is any aa, unknown or other
  misc_feature (14)..(14): Xaa is any aa, unknown or other
  misc_feature (167)..(167): Xaa is any aa, unknown or other
VHAMEAXMACWELXQTLQSLTGASPGEGTGATMSDDEDNQVDSESNMFDGNEGSDGMGFGPLMLTEGERSLVERVRQELKHELKQGYRDKLVDIREEILRKRRAGKLPGDTASTLKAWWQAHSKWPYPTEEDKARLVQETGLQLKQINNWFINQRKRNWHNNSASSXSDKSK

SEQ ID NO: 14381 - protein, 169 aa, Zea mays subsp. mays
  peptide (1)..(169): Ceres Seq. ID no. 3604120
  misc_feature (4)..(4): Xaa is any aa, unknown or other
  misc_feature (11)..(11): Xaa is any aa, unknown or other
  misc_feature (164)..(164): Xaa is any aa, unknown or other
MEAXMACWELXQTLQSLTGASPGEGTGATMSDDEDNQVDSESNMFDGNEGSDGMGFGPLMLTEGERSLVERVRQELKHELKQGYRDKLVDIREEILRKRRAGKLPGDTASTLKAWWQAHSKWPYPTEEDKARLVQETGLQLKQINNWFINQRKRNWHNNSASSXSDKSK

SEQ ID NO: 14382 - protein, 165 aa, Zea mays subsp. mays
  peptide (1)..(165): Ceres Seq. ID no. 3604121
  misc_feature (7)..(7): Xaa is any aa, unknown or other
  misc_feature (160)..(160): Xaa is any aa, unknown or other
MACWELXQTLQSLTGASPGEGTGATMSDDEDNQVDSESNMFDGNEGSDGMGFGPLMLTEGERSLVERVRQELKHELKQGYRDKLVDIREEILRKRRAGKLPGDTASTLKAWWQAHSKWPYPTEEDKARLVQETGLQLKQINNWFINQRKRNWHNNSASSXSDKSK

SEQ ID NO: 14383 - DNA, 717 bp, Zea mays subsp. mays
  misc_feature (1)..(717): Ceres Seq. ID no. 12469010
  misc_feature (1)..(717): Ortholog of  Ceres SEQ ID NO 13660597 as cited in SEQ ID NO 67655
gaagctagccggcgattgaaaactgagctattaatacagatggatgggttgactaagacagatgagcttgtttttgttctagcagcaacaaatttaccatgggagttggatgcagcaatgctgcgtcggctggagaagcgtattcttgttccattgccagagccggatgctagacatgctatgtttgaagagctcctgccatatacacctggcacaatggagattccctatgatgttcttgtggagaaaactgaagggtattctggctctgatattcgcctggtatgcaaggaagcagcaatgcagcccctaagacgggtaatggcagttcttgaaggcaggaaagaagaggtccctgagagtgagttgcctgaagttggcccagtaactacagaagatattgaacttgctttgaggaatacaagaccgtctgctcatcttcacgcacatagatacgaaaagttcaaccaagattatggcagtcatgtacatggctaaaggggagaagcttgttgtagggtttaatttgtatgctcatgcgtgggccattaggtgactactgaattcatcgacatgctgaggtatccttgtaaacactatgcttatccttgtatgctatacactatcattcatttgatgagcaataagctgtttggtaactcagtctcacctggataaggagaaactacgattttccctgcatttggctcgatttat

SEQ ID NO: 14384 - protein, 165 aa, Zea mays subsp. mays
  peptide (1)..(165): Ceres Seq. ID no. 12469011
EASRRLKTELLIQMDGLTKTDELVFVLAATNLPWELDAAMLRRLEKRILVPLPEPDARHAMFEELLPYTPGTMEIPYDVLVEKTEGYSGSDIRLVCKEAAMQPLRRVMAVLEGRKEEVPESELPEVGPVTTEDIELALRNTRPSAHLHAHRYEKFNQDYGSHVHG

SEQ ID NO: 14385 - protein, 152 aa, Zea mays subsp. mays
  peptide (1)..(152): Ceres Seq. ID no. 12469012
MDGLTKTDELVFVLAATNLPWELDAAMLRRLEKRILVPLPEPDARHAMFEELLPYTPGTMEIPYDVLVEKTEGYSGSDIRLVCKEAAMQPLRRVMAVLEGRKEEVPESELPEVGPVTTEDIELALRNTRPSAHLHAHRYEKFNQDYGSHVHG

SEQ ID NO: 14386 - protein, 126 aa, Zea mays subsp. mays
  peptide (1)..(126): Ceres Seq. ID no. 12469013
MLRRLEKRILVPLPEPDARHAMFEELLPYTPGTMEIPYDVLVEKTEGYSGSDIRLVCKEAAMQPLRRVMAVLEGRKEEVPESELPEVGPVTTEDIELALRNTRPSAHLHAHRYEKFNQDYGSHVHG

SEQ ID NO: 14387 - DNA, 651 bp, Zea mays subsp. mays
  misc_feature (1)..(651): Ceres Seq. ID no. 13501289
  misc_feature (1)..(651): Ortholog of  Ceres SEQ ID NO 12609898 as cited in SEQ ID NO 51808
tgccaagtcccaacatcttgagctcgatcgcaaaccctcagacacttcttcccccagccgacgtacatgaagcacccgagagacgccggcgccatgccgctctccctcgcgctgtccctcggcgccggcgtggcccccgggcacggcagcagcaagcggccccggcgcgcggcgggcggcggggacggcgagttggtctgcaagacgtgcagccgcgccttcgtctcgttccaggcgctgggcgggcaccggacaagccacctgagggccggccggcacggccttgcgctcgggatgcccgcgccggcgccggcgaangaggcgccgccgcccgcgacgacccacctgtgccacgtctgcgggctcggcttccagatgggccangcgctaggcggccacatgcggcgccaccgcgaggaggctgccgccaccaccgcgcaggcgccgcccgtcctcctccagctcttcgtgtagagttttgcccgtccacggagtctagctagtagaggaattcttcgcgttcctgtcgtcactcgtgagtctgctgcgcatcgtagattcacagtacagttgttggcgtcaattcattcattcattcatttagttgtatacatgtaaataactgattagttattttattgttcctaatct

SEQ ID NO: 14388 - protein, 166 aa, Zea mays subsp. mays
  peptide (1)..(166): Ceres Seq. ID no. 13501290
  misc_feature (106)..(106): Xaa is any aa, unknown or other
  misc_feature (128)..(128): Xaa is any aa, unknown or other
PSPNILSSIANPQTLLPPADVHEAPERRRRHAALPRAVPRRRRGPRARQQQAAPARGGRRGRRVGLQDVQPRLRLVPGAGRAPDKPPEGRPARPCARDARAGAGEXGAAARDDPPVPRLRARLPDGPXARRPHAAPPRGGCRHHRAGAARPPPALRVEFCPSTESS

SEQ ID NO: 14389 - protein, 135 aa, Zea mays subsp. mays
  peptide (1)..(135): Ceres Seq. ID no. 13501291
  misc_feature (84)..(84): Xaa is any aa, unknown or other
  misc_feature (106)..(106): Xaa is any aa, unknown or other
MKHPRDAGAMPLSLALSLGAGVAPGHGSSKRPRRAAGGGDGELVCKTCSRAFVSFQALGGHRTSHLRAGRHGLALGMPAPAPAXEAPPPATTHLCHVCGLGFQMGXALGGHMRRHREEAAATTAQAPPVLLQLFV

SEQ ID NO: 14390 - protein, 126 aa, Zea mays subsp. mays
  peptide (1)..(126): Ceres Seq. ID no. 13501292
  misc_feature (75)..(75): Xaa is any aa, unknown or other
  misc_feature (97)..(97): Xaa is any aa, unknown or other
MPLSLALSLGAGVAPGHGSSKRPRRAAGGGDGELVCKTCSRAFVSFQALGGHRTSHLRAGRHGLALGMPAPAPAXEAPPPATTHLCHVCGLGFQMGXALGGHMRRHREEAAATTAQAPPVLLQLFV

SEQ ID NO: 14391 - DNA, 497 bp, Zea mays subsp. mays
  misc_feature (1)..(497): Ceres Seq. ID no. 6405274
  misc_feature (1)..(497): Ortholog of  Ceres SEQ ID NO 14307424 as cited in SEQ ID NO 54228
  misc_feature (1)..(497): Ortholog of  Ceres SEQ ID NO 13664279 as cited in SEQ ID NO 61603
  misc_feature (1)..(497): Ortholog of  Ceres SEQ ID NO 13584254 as cited in SEQ ID NO 63465
tttctgtgcaagcaaccttcccttataaattcgttgtgagcaagttcttgcagcctggagcttatgatctggttggttacatagtgtatgagatcgaccagcacccttaccagaatgtattctacaatggcactattgaggtcgttgaggctggaggcttactcagtgttgagtctgtgttcctcatcacccttggaatcgctctttttggtctctttggattatgggcatatggccaggttcagcagctctcgaagaaaacgaagaaggcccccaaggtggagctcggaactggaacaactgatgccaacatcgatgagtggctggagggcacttcgtttgtgcagagaagcaaatccaagaagaagcagacctgaagctagctctccagagtagttaatccttggaggatctagaatgaggcatttgagggtagcccttcacaagtgacttctgcagaaagataratgcctaaggaggkgctgaaaaatgtagtt

SEQ ID NO: 14392 - protein, 124 aa, Zea mays subsp. mays
  peptide (1)..(124): Ceres Seq. ID no. 6405275
SVQATFPYKFVVSKFLQPGAYDLVGYIVYEIDQHPYQNVFYNGTIEVVEAGGLLSVESVFLITLGIALFGLFGLWAYGQVQQLSKKTKKAPKVELGTGTTDANIDEWLEGTSFVQRSKSKKKQT

SEQ ID NO: 14393 - protein, 102 aa, Zea mays subsp. mays
  peptide (1)..(102): Ceres Seq. ID no. 6405276
MRSTSTLTRMYSTMALLRSLRLEAYSVLSLCSSSPLESLFLVSLDYGHMARFSSSRRKRRRPPRWSSELEQLMPTSMSGWRALRLCREANPRRSRPEASSPE

SEQ ID NO: 14394 - protein, 93 aa, Zea mays subsp. mays
  peptide (1)..(93): Ceres Seq. ID no. 6405277
MYSTMALLRSLRLEAYSVLSLCSSSPLESLFLVSLDYGHMARFSSSRRKRRRPPRWSSELEQLMPTSMSGWRALRLCREANPRRSRPEASSPE

SEQ ID NO: 14395 - DNA, 1222 bp, Zea mays subsp. mays
  misc_feature (1)..(1222): Ceres Seq. ID no. 13623625
  misc_feature (1)..(1222): Ortholog of  Ceres SEQ ID NO 12578784 as cited in SEQ ID NO 20729
  misc_feature (1)..(1222): Ortholog of  Ceres SEQ ID NO 13658847 as cited in SEQ ID NO 66674
actaccgctgcgagtggccgctcccgcaggttctgctctccgccttctccatccacaacgagaccctcaacgtctggacgcatcttataggatttttcatctttctcgctctgaccatatacacagcaacacaagttccaaatgcagtagatatccggagcttgcagcatttgccagatgtactgagaaaggctgatattcataagattcaggcagagcttgtgtcatgtcttccgtcgttacctcacctttcagatctacaaaagctgaaggatgagctgaagacctcttggaattctatggaggttcttccatctctgtcccgttggcatctcttggagttactcgcaaattgtctgccacacagatttacccatcccaatgaaacaagtttgtctgttcttcaaagcatgaaggaggatctagcaagcctgattgcaccgcaactgatcagaccaattgcgcggtggccattctatgccttcttgggaggagccatgttctgcctccttgccagcagcacttgccaccttctctcctgccattctcgccgcctagcatacattatgcttcggcttgattacgcaggcatcgcagctctaatcgccacgtccttctaccctccagtatactattctttcatgtgctaccccttcttttgcaacctgtacctcagtttcataaccatcctaggagtggcaactatcgcgttctctctacttccggtcttccagaatccggagttcagaaccatcagagcatgcctcttctttggcatgggtgcatctggcgtgatacctgttcttcacaagctggtcctcttctggcaccaaccggaggcattgcacacgaccggatacgaaattctgatggggctcttctacgggctgggagcattggtatatgcggcacgggtacctgagcgctggatgcctgggaagtttgacatcgccgggcacagccaccagctgttccacgtcttggttgttgccggagcctacacacactaccacgcagggcttgtgtacctcaagtggagagacctgcaaggctgctgaaaggtgctgcatcgttgaggatgtggatagattgtagattccgtgaattcaggctgaaggtcatggtctgttgtaaattgtaacagtaatcatgaaacaattgctacaagtctaccaggtagtcgggcttccattaataatcaattgaagactagtatttatgc

SEQ ID NO: 14396 - protein, 351 aa, Zea mays subsp. mays
  peptide (1)..(351): Ceres Seq. ID no. 13623626
YRCEWPLPQVLLSAFSIHNETLNVWTHLIGFFIFLALTIYTATQVPNAVDIRSLQHLPDVLRKADIHKIQAELVSCLPSLPHLSDLQKLKDELKTSWNSMEVLPSLSRWHLLELLANCLPHRFTHPNETSLSVLQSMKEDLASLIAPQLIRPIARWPFYAFLGGAMFCLLASSTCHLLSCHSRRLAYIMLRLDYAGIAALIATSFYPPVYYSFMCYPFFCNLYLSFITILGVATIAFSLLPVFQNPEFRTIRACLFFGMGASGVIPVLHKLVLFWHQPEALHTTGYEILMGLFYGLGALVYAARVPERWMPGKFDIAGHSHQLFHVLVVAGAYTHYHAGLVYLKWRDLQGC

SEQ ID NO: 14397 - protein, 252 aa, Zea mays subsp. mays
  peptide (1)..(252): Ceres Seq. ID no. 13623627
MEVLPSLSRWHLLELLANCLPHRFTHPNETSLSVLQSMKEDLASLIAPQLIRPIARWPFYAFLGGAMFCLLASSTCHLLSCHSRRLAYIMLRLDYAGIAALIATSFYPPVYYSFMCYPFFCNLYLSFITILGVATIAFSLLPVFQNPEFRTIRACLFFGMGASGVIPVLHKLVLFWHQPEALHTTGYEILMGLFYGLGALVYAARVPERWMPGKFDIAGHSHQLFHVLVVAGAYTHYHAGLVYLKWRDLQGC

SEQ ID NO: 14398 - protein, 215 aa, Zea mays subsp. mays
  peptide (1)..(215): Ceres Seq. ID no. 13623628
MKEDLASLIAPQLIRPIARWPFYAFLGGAMFCLLASSTCHLLSCHSRRLAYIMLRLDYAGIAALIATSFYPPVYYSFMCYPFFCNLYLSFITILGVATIAFSLLPVFQNPEFRTIRACLFFGMGASGVIPVLHKLVLFWHQPEALHTTGYEILMGLFYGLGALVYAARVPERWMPGKFDIAGHSHQLFHVLVVAGAYTHYHAGLVYLKWRDLQGC

SEQ ID NO: 14399 - DNA, 454 bp, Zea mays subsp. mays
  misc_feature (1)..(454): Ceres Seq. ID no. 3603843
  misc_feature (1)..(454): Ortholog of  Ceres SEQ ID NO 12618436 as cited in SEQ ID NO 64280
agagagtcttactttagaarkgaaactgacagctggaccmcmbaaagcagcactagagcatctgaggaagaagattgaaatatcaacagagaaaatacgtttagctaaggtgaaagaggaacatgcaaaaaagacttgggaagttgctgcmcaakttgttaargacgaakaggatgctaagcagaaattatgtgatgacctaaaccatstaktccaggagagtgctgctycccaatatgcawgattkgaggagctgaagaaacgttkagaatctctaaatcccataagggattctgttattgtgtcaggkgtttatactgcacarcatgctactctgaattcagtacctcascaaccaactgcacaaaatcctgcagatgtaactggccgtcagaatattgccacaaagcctgcttctatgcaacagcagcctatacctgcggaggcagaaaag

SEQ ID NO: 14400 - protein, 151 aa, Zea mays subsp. mays
  peptide (1)..(151): Ceres Seq. ID no. 3603844
  misc_feature (7)..(7): Xaa is any aa, unknown or other
  misc_feature (13)..(13): Xaa is any aa, unknown or other
  misc_feature (14)..(14): Xaa is any aa, unknown or other
  misc_feature (50)..(50): Xaa is any aa, unknown or other
  misc_feature (52)..(52): Xaa is any aa, unknown or other
  misc_feature (54)..(54): Xaa is any aa, unknown or other
  misc_feature (57)..(57): Xaa is any aa, unknown or other
  misc_feature (70)..(70): Xaa is any aa, unknown or other
  misc_feature (71)..(71): Xaa is any aa, unknown or other
  misc_feature (77)..(77): Xaa is any aa, unknown or other
  misc_feature (81)..(81): Xaa is any aa, unknown or other
  misc_feature (82)..(82): Xaa is any aa, unknown or other
  misc_feature (89)..(89): Xaa is any aa, unknown or other
  misc_feature (103)..(103): Xaa is any aa, unknown or other
  misc_feature (108)..(108): Xaa is any aa, unknown or other
  misc_feature (117)..(117): Xaa is any aa, unknown or other
ESLTLEXKLTAGXXKAALEHLRKKIEISTEKIRLAKVKEEHAKKTWEVAXQXVXDEXDAKQKLCDDLNHXXQESAAXQYAXXEELKKRXESLNPIRDSVIVSXVYTAXHATLNSVPXQPTAQNPADVTGRQNIATKPASMQQQPIPAEAEK

SEQ ID NO: 14401 - DNA, 665 bp, Zea mays subsp. mays
  misc_feature (1)..(665): Ceres Seq. ID no. 12420368
  misc_feature (1)..(665): Ortholog of  Ceres SEQ ID NO 12617253 as cited in SEQ ID NO 64065
ttggtactatgtgggagcgttgcgctgcgagtggcggcttcttatcatgttgggcttgggtggtttctcaaggcccatctgtactgtaacggctcattgttaggtgagaagtaaggaagagtaacagacctacgcgcttcgcacgagacgctcgacgcacgaaactggtgctttaatagagtagagattaaaagatttcatgcaaagttttgatttactgattctgttcaataagcttttctatttttccaacagattgtgagtaggattaagaaagagtgccctaatgtaccccttgtgttgtatataaatggaaatggaggtttacttgagcgcatgaagaacacaggagctgatgttattgggcttgactggacagtggacatgactgatggaaggaggcgccttggtaatggcattagtgtacaagggaatgtggatccagcatttttgttctcaccattaccagtactgactgatgaaattcataggttagtaaaggctcaaagatttccatttaatttacgttattttgtgtttttgcttaatgctcatgtgcaattcattaatgagatcacctaaagtgttgcttgagcagtgtactatacatcttcatgtcaggtatgattggttgcctgcactatgataaacctgcattacacccc

SEQ ID NO: 14402 - protein, 81 aa, Zea mays subsp. mays
  peptide (1)..(81): Ceres Seq. ID no. 12420369
MKNTGADVIGLDWTVDMTDGRRRLGNGISVQGNVDPAFLFSPLPVLTDEIHRLVKAQRFPFNLRYFVFLLNAHVQFINEIT

SEQ ID NO: 14403 - protein, 65 aa, Zea mays subsp. mays
  peptide (1)..(65): Ceres Seq. ID no. 12420370
MTDGRRRLGNGISVQGNVDPAFLFSPLPVLTDEIHRLVKAQRFPFNLRYFVFLLNAHVQFINEIT

SEQ ID NO: 14404 - DNA, 578 bp, Zea mays subsp. mays
  misc_feature (1)..(578): Ceres Seq. ID no. 12361361
  misc_feature (1)..(578): Ortholog of  Ceres SEQ ID NO 13596465 as cited in SEQ ID NO 62133
catgtcccaatgcacaaggttccagtcggacagttcaaagtccccaagttcaagatatcctttggatttgaggcatctgagttgctcaaaggtctcgggctccagcttccgtttagtgctgaagcggacctgtcggggttagttgattcaccagagggacggaacttgtctgtttcgtccgtattccacaagtcatttgtcgaagtgaacgaggaaggaacggaggccgctgccgcatctgctgcaacagttgtgctccggtcgttcacgatgcctcaggatttcgtcgcagatcaccctttcatgttcctgattcgcgaagacttgactggtgtggtgttgtttgtcggccacgtggtgaatcccctccttgctccatagtgtgttgttcagaagtgtggccttggtgcggttccatccccttacagatgtgtggctttgacagctgatcaagctttatgtgtaatctgccatgttttgtttttgaataaatagatgcttgatcgatgtatgtaaggctgcgagatgatagttcagaattggtatgtgtggtcatggactcatggtacttactgtgt

SEQ ID NO: 14405 - protein, 126 aa, Zea mays subsp. mays
  peptide (1)..(126): Ceres Seq. ID no. 12361362
HVPMHKVPVGQFKVPKFKISFGFEASELLKGLGLQLPFSAEADLSGLVDSPEGRNLSVSSVFHKSFVEVNEEGTEAAAASAATVVLRSFTMPQDFVADHPFMFLIREDLTGVVLFVGHVVNPLLAP

SEQ ID NO: 14406 - protein, 123 aa, Zea mays subsp. mays
  peptide (1)..(123): Ceres Seq. ID no. 12361363
MHKVPVGQFKVPKFKISFGFEASELLKGLGLQLPFSAEADLSGLVDSPEGRNLSVSSVFHKSFVEVNEEGTEAAAASAATVVLRSFTMPQDFVADHPFMFLIREDLTGVVLFVGHVVNPLLAP

SEQ ID NO: 14407 - DNA, 610 bp, Zea mays subsp. mays
  misc_feature (1)..(610): Ceres Seq. ID no. 3609410
  misc_feature (1)..(610): Ortholog of  Ceres SEQ ID NO 15176051 as cited in SEQ ID NO 53434
  misc_feature (1)..(610): Ortholog of  Ceres SEQ ID NO 12465091 as cited in SEQ ID NO 65947
ttgacgtggttacgttgtgtgcgtgcgttcagaggtgtggctgtgccggaccagtcaagcccatatggtgtccgactgctgatcaaggactacccctatgccgttgacgggctcgtcatctggtgggcgatcgagcggtgggtcaaggagtacctggacatctactaccctaacgacggcgagctccagcgtgacgtggagctgcaggcgtggtggaaggaggtgcgtgaggaggcgcacggcgacctcaaggaccgagactggtggcccaggatggacaccgtccagcagctggctagggcgtgcacgaccatcatctgggtggcatccgcgctgcacgcggctgtcaactttgggcagtacccatacgccgggtacctcccgaaccggccgacggtcagccggcgcccgatgccggagccaggcagccacgactacaagaagctgggagcggggcaraaggaggcggacatggtgttcatccgcaccatcaccagccagttccagaccatcctgggcatctcgctcatcgaagatcctctccaagcactcctncgacgaggtgtacctcggccagcgtgacgagcctgagcgctggacgtcaracgcc

SEQ ID NO: 14408 - protein, 193 aa, Zea mays subsp. mays
  peptide (1)..(193): Ceres Seq. ID no. 3609411
  misc_feature (153)..(153): Xaa is any aa, unknown or other
  misc_feature (185)..(185): Xaa is any aa, unknown or other
LTWLRCVRAFRGVAVPDQSSPYGVRLLIKDYPYAVDGLVIWWAIERWVKEYLDIYYPNDGELQRDVELQAWWKEVREEAHGDLKDRDWWPRMDTVQQLARACTTIIWVASALHAAVNFGQYPYAGYLPNRPTVSRRPMPEPGSHDYKKLGAGXKEADMVFIRTITSQFQTILGISLIEDPLQALXRRGVPRPA

SEQ ID NO: 14409 - protein, 171 aa, Zea mays subsp. mays
  peptide (1)..(171): Ceres Seq. ID no. 3609412
  misc_feature (121)..(121): Xaa is any aa, unknown or other
  misc_feature (153)..(153): Xaa is any aa, unknown or other
  misc_feature (170)..(170): Xaa is any aa, unknown or other
MPLTGSSSGGRSSGGSRSTWTSTTLTTASSSVTWSCRRGGRRCVRRRTATSRTETGGPGWTPSSSWLGRARPSSGWHPRCTRLSTLGSTHTPGTSRTGRRSAGARCRSQAATTTRSWERGXRRRTWCSSAPSPASSRPSWASRSSKILSKHSXDEVYLGQRDEPERWTSXA

SEQ ID NO: 14410 - protein, 102 aa, Zea mays subsp. mays
  peptide (1)..(102): Ceres Seq. ID no. 3609413
  misc_feature (62)..(62): Xaa is any aa, unknown or other
  misc_feature (94)..(94): Xaa is any aa, unknown or other
MDTVQQLARACTTIIWVASALHAAVNFGQYPYAGYLPNRPTVSRRPMPEPGSHDYKKLGAGXKEADMVFIRTITSQFQTILGISLIEDPLQALXRRGVPRPA

SEQ ID NO: 14411 - DNA, 1621 bp, Zea mays subsp. mays
  misc_feature (1)..(1621): Ceres Seq. ID no. 13491087
  misc_feature (1)..(1621): Ortholog of  Ceres SEQ ID NO 15175898 as cited in SEQ ID NO 57344
gactctcctcagtaactatagtttttttgttccttgggaggatagaaaaaatatatccttggttttcttgaacagataacatttcaggtgtgcttctgaagggagatttcgttgaacaggatgaatgcattggcagcaaccagcaggaacttcaagcaggcagctaagctgctgggcctcgactccaagctggagaagagcttgctcattccattcagggagatcaaggttgaatgcacaatcccaaaagatgatggaactttggcatcctatgttggatttagggttcaacatgataatgctaggggacctatgaagggtggaatcagataccaccatgaggttgatcctgatgaagttaatgccttggcacaattgatgacttggaaaacagcagtagctaacataccatatggaggagccaaaggtggaattggatgtagccctggagacctgagcatctctgagcttgagaggcttacccgagtttttactcagaaaatccatgacttgattggcatccatactgacgttccagctccagatatgggcaccaactcacagacaatggcatggatacttgacgaatactcaaagttccatggttactcacctgctgttgtgacaggaaagcctgtggacctcggaggatcattgggaagagacgccgctactggaaggggagttctgtttgctactgaagctttgcttgcagagcatggcaaaggcattgcaggccagcgtttcgtcatacagggattcggtaacgttggttcctgggcagctcagctgataagtgaagccggtggcaaggtgattgctatcagtgacgtcacaggcgccgtcaaaaacgtcgatggcctcgacatcgcgcagctagtgaagcactcggcggagaacaaggggatcaagggcttcaaggggggagacgccatcgctccagactcgttgctcactgaagagtgcgacgtcctcatcccggcagcgcttgggggagtcataaacaaggataatgctaacgacataaaggcaaagtacatcatcgaggctgccaatcaccccacagatccagaggcagacgagatcctgtcaaagaaaggcgtcctcatcctccccgacatactggccaactctggcggcgtcacagtgagctacttcgagtgggtacaaaacatccaggggttcatgtgggacgaggagaaggtaaacgcggagctgcggacgtacatcacgcgcgcctttggaaacgtgaagcagatgtgccggagccacagctgcgacctccgcatgggcgccttcacgctgggcgtcaaccgcgtcgcgcgcgccaccgtcctcaggggatgggaagcatgacctccctccgtgtcgtccgtgtgcccctccctgttgtatcctcttggtcttggtcttgggcccttgtttttctttggttaattattatcgatcaacggagatccgagaaaaaacgggctcagttaataattccaagaagtgcgtcttcttggagataaatagcggaaggagagttataataagtctgtaactgtaacccatagctgagatgctgtctgcaagcaacaatggcaatggcaatggcaatgccatctggatttcgtgc

SEQ ID NO: 14412 - protein, 411 aa, Zea mays subsp. mays
  peptide (1)..(411): Ceres Seq. ID no. 13491088
MNALAATSRNFKQAAKLLGLDSKLEKSLLIPFREIKVECTIPKDDGTLASYVGFRVQHDNARGPMKGGIRYHHEVDPDEVNALAQLMTWKTAVANIPYGGAKGGIGCSPGDLSISELERLTRVFTQKIHDLIGIHTDVPAPDMGTNSQTMAWILDEYSKFHGYSPAVVTGKPVDLGGSLGRDAATGRGVLFATEALLAEHGKGIAGQRFVIQGFGNVGSWAAQLISEAGGKVIAISDVTGAVKNVDGLDIAQLVKHSAENKGIKGFKGGDAIAPDSLLTEECDVLIPAALGGVINKDNANDIKAKYIIEAANHPTDPEADEILSKKGVLILPDILANSGGVTVSYFEWVQNIQGFMWDEEKVNAELRTYITRAFGNVKQMCRSHSCDLRMGAFTLGVNRVARATVLRGWEA

SEQ ID NO: 14413 - protein, 347 aa, Zea mays subsp. mays
  peptide (1)..(347): Ceres Seq. ID no. 13491089
MKGGIRYHHEVDPDEVNALAQLMTWKTAVANIPYGGAKGGIGCSPGDLSISELERLTRVFTQKIHDLIGIHTDVPAPDMGTNSQTMAWILDEYSKFHGYSPAVVTGKPVDLGGSLGRDAATGRGVLFATEALLAEHGKGIAGQRFVIQGFGNVGSWAAQLISEAGGKVIAISDVTGAVKNVDGLDIAQLVKHSAENKGIKGFKGGDAIAPDSLLTEECDVLIPAALGGVINKDNANDIKAKYIIEAANHPTDPEADEILSKKGVLILPDILANSGGVTVSYFEWVQNIQGFMWDEEKVNAELRTYITRAFGNVKQMCRSHSCDLRMGAFTLGVNRVARATVLRGWEA

SEQ ID NO: 14414 - protein, 325 aa, Zea mays subsp. mays
  peptide (1)..(325): Ceres Seq. ID no. 13491090
MTWKTAVANIPYGGAKGGIGCSPGDLSISELERLTRVFTQKIHDLIGIHTDVPAPDMGTNSQTMAWILDEYSKFHGYSPAVVTGKPVDLGGSLGRDAATGRGVLFATEALLAEHGKGIAGQRFVIQGFGNVGSWAAQLISEAGGKVIAISDVTGAVKNVDGLDIAQLVKHSAENKGIKGFKGGDAIAPDSLLTEECDVLIPAALGGVINKDNANDIKAKYIIEAANHPTDPEADEILSKKGVLILPDILANSGGVTVSYFEWVQNIQGFMWDEEKVNAELRTYITRAFGNVKQMCRSHSCDLRMGAFTLGVNRVARATVLRGWEA

SEQ ID NO: 14415 - DNA, 1113 bp, Zea mays subsp. mays
  misc_feature (1)..(1113): Ceres Seq. ID no. 13635288
  misc_feature (1)..(1113): Ortholog of  Ceres SEQ ID NO 14304209 as cited in SEQ ID NO 56460
  misc_feature (1)..(1113): Ortholog of  Ceres SEQ ID NO 12586351 as cited in SEQ ID NO 64028
  misc_feature (1)..(1113): Ortholog of  Ceres SEQ ID NO 13654441 as cited in SEQ ID NO 67814
  misc_feature (1)..(1113): Ortholog of  Ceres SEQ ID NO 15177482 as cited in SEQ ID NO 0
atcaaccaaaccctctaatccatttcggcatttccaacgccttcgccctaccagccacgtcgcttcgaggccgatcgaccgagcagctggtggcaatggcggcggcggcggaggtcgtgctgctggacttctgggtgagccccttcgggcagcgctgccggatcgcgctggcggagaagggcgtggcctacgagtaccgcgagcaggacctcctggacaagggcgagctgctcctccgctccaaccccatccacaagaagatccccgtcctgctccacgccggcaggcccgtctgcgagtcgctcgtcatcctccagtacatcgacgaggcctggccggacgtcgcgccgctcctccccaaggacgacccctacgcccgcgcgcaggcgcgtttctgggccgattacatcgacaagaagatctatgacagccagactcggctgtggaagttcgagggcgaggcgcgggagcaggcgaagaaggacctggtggaggtcctggagaccctggagggggagctcgccgacaagcctttcttcggcggcggcgccctcggcttcgtggacgtggctctggtgcccttcacgtcctggttcctcgcctacgagaagctgggcgggttcagcgtccaggagcactgccccaggatcgtggcctgggccgcgcgctgcagggagcgggagagcgtggccaaggccatgtccgaccctgccaaggtgctcgagttcgtccagttcctccagagcaagttcggggccaagtgatcggaagcattgcgtgtgctgctagcctgatatgccctatgcaggccaggctggtgctttgatctgctcgatcagctctatgcccatgctagcgttgcatagcgcagttgatgtgtgatgtgtctggttggttgtagctgctctttgcctggtttcgtacgtcagtgtaaggtttcaggttttcagtgtctggggtagctctgcgttgcccttgcccctgccccctacctagcggctcttgagctcttcggctcgccagcaataaagttgcagaggctttagctaaaagtttctgtattttttagttgacgattattggtccaatgtattcgggaattttgttctctct

SEQ ID NO: 14416 - protein, 253 aa, Zea mays subsp. mays
  peptide (1)..(253): Ceres Seq. ID no. 13635289
QPNPLIHFGISNAFALPATSLRGRSTEQLVAMAAAAEVVLLDFWVSPFGQRCRIALAEKGVAYEYREQDLLDKGELLLRSNPIHKKIPVLLHAGRPVCESLVILQYIDEAWPDVAPLLPKDDPYARAQARFWADYIDKKIYDSQTRLWKFEGEAREQAKKDLVEVLETLEGELADKPFFGGGALGFVDVALVPFTSWFLAYEKLGGFSVQEHCPRIVAWAARCRERESVAKAMSDPAKVLEFVQFLQSKFGAK

SEQ ID NO: 14417 - protein, 222 aa, Zea mays subsp. mays
  peptide (1)..(222): Ceres Seq. ID no. 13635290
MAAAAEVVLLDFWVSPFGQRCRIALAEKGVAYEYREQDLLDKGELLLRSNPIHKKIPVLLHAGRPVCESLVILQYIDEAWPDVAPLLPKDDPYARAQARFWADYIDKKIYDSQTRLWKFEGEAREQAKKDLVEVLETLEGELADKPFFGGGALGFVDVALVPFTSWFLAYEKLGGFSVQEHCPRIVAWAARCRERESVAKAMSDPAKVLEFVQFLQSKFGAK

SEQ ID NO: 14418 - protein, 141 aa, Zea mays subsp. mays
  peptide (1)..(141): Ceres Seq. ID no. 13635291
STKPSNPFRHFQRLRPTSHVASRPIDRAAGGNGGGGGGRAAGLLGEPLRAALPDRAGGEGRGLRVPRAGPPGQGRAAPPLQPHPQEDPRPAPRRQARLRVARHPPVHRRGLAGRRAAPPQGRPLRPRAGAFLGRLHRQEDL

SEQ ID NO: 14419 - DNA, 626 bp, Zea mays subsp. mays
  misc_feature (1)..(626): Ceres Seq. ID no. 3609334
  misc_feature (1)..(626): Ortholog of  Ceres SEQ ID NO 14308851 as cited in SEQ ID NO 55618
aagaactcgagaccgccaagagcagctcatcagttgagaagagctatgaactgcctgatggacaagtgatcacaataggcgcagagcgcttcagatgcccggaggttctcttccagccatccttcattggtatggaagctccaggaatccacgagacgacctacaactccatcatgaagtgtgacgttgatatcaggaaggacctgtatggcaacattgtcctcagtggtggatccaccatgttccctggcatcgccgaccgaatgagcaaggagatcactgcgctcgcgccaagcagcatgaagatcaaggtcgtcgctccaccagagaggaagtacagtgtctggatcggaggatcaatccttgcatccctgagcacatttcagcagatgtggatctcaagggctgagtatgaggagtctggtccagctattgtccacaggaagtgcttctagacgtcacctagccttaattctcctctggaaataccttcgtttgatgacatatctatgggtggttgctctgctatagctcgcagtttttgkgtttgccaatatatccggtaacattgkggagtcagccgtccactgtatgaagtatgtagtttgggttatatatatattgat

SEQ ID NO: 14420 - protein, 150 aa, Zea mays subsp. mays
  peptide (1)..(150): Ceres Seq. ID no. 3609335
ELETAKSSSSVEKSYELPDGQVITIGAERFRCPEVLFQPSFIGMEAPGIHETTYNSIMKCDVDIRKDLYGNIVLSGGSTMFPGIADRMSKEITALAPSSMKIKVVAPPERKYSVWIGGSILASLSTFQQMWISRAEYEESGPAIVHRKCF

SEQ ID NO: 14421 - protein, 107 aa, Zea mays subsp. mays
  peptide (1)..(107): Ceres Seq. ID no. 3609336
MEAPGIHETTYNSIMKCDVDIRKDLYGNIVLSGGSTMFPGIADRMSKEITALAPSSMKIKVVAPPERKYSVWIGGSILASLSTFQQMWISRAEYEESGPAIVHRKCF

SEQ ID NO: 14422 - protein, 93 aa, Zea mays subsp. mays
  peptide (1)..(93): Ceres Seq. ID no. 3609337
MKCDVDIRKDLYGNIVLSGGSTMFPGIADRMSKEITALAPSSMKIKVVAPPERKYSVWIGGSILASLSTFQQMWISRAEYEESGPAIVHRKCF

SEQ ID NO: 14423 - DNA, 1073 bp, Zea mays subsp. mays
  misc_feature (1)..(1073): Ceres Seq. ID no. 12595306
  misc_feature (1)..(1073): Ortholog of  Ceres SEQ ID NO 15174082 as cited in SEQ ID NO 61896
  misc_feature (1)..(1073): Ortholog of  Ceres SEQ ID NO 13655598 as cited in SEQ ID NO 64077
  misc_feature (1)..(1073): Ortholog of  Ceres SEQ ID NO 15179351 as cited in SEQ ID NO 0
aacatatcaagctcagagcctcagagcgccagccaagtcttgcggtcgcgaagagcaacgcaacaagatggtgaagctcgcattcggaagcgtcggcgactccttcagcgtcacctccatcaaggcctacgtggcggagttcatcgccaccctcctcttcgtcttcgccggcgtgggttccgccatcgccttcgggcaactgacgaatggcggcgcgctggaccctgcgggactggtggcgatcgcggtggcgcacgcgctggccctcttcgtgggcgtctccgtggccgcgaacacctccggcggccacctgaaccccgccgtgacgttcggcctggccgtgggcggccacatcaccgtcctcaccggcctcttctactgggtggcccagctgctgggcgcgtccgtggcgtgcctgctcctcaggttcgtgacccacggcaaggccatcccgacccacggcgtctccggcggcaccaccgagctggagggcgtcgtgttcgagatcgtcatcaccttcgcgctcgtctacaccgtgtacgccaccgccgccgaccccaagaagggctccctcggcaccatcgcgcccatcgccatcggcttcatcgtcggcgccaacatcctcgccgcggggcccttcagcggcggctccatgaaccccgcccgctccttcggccccgccgtcgccgcggccgacttcgccggcaactgggtctactgggtcggcccgctcatcggcggcggactcgctggcctcgtctacggcgacgtcttcatcggcggctcctaccagcaggtcgccgaccaggactacgcctaagtagtgtgctccgttcgtctggattcagctcatccaacgcaggcgcgcgtttcgatcggcgtcgtcatttgctttgctcttcatttcatcacgttatgtaacgtgccaatgatgtgtgtcgtcctggtctgttccattccgtccttgtattcatttcccttcttttttcggggtaaaatcgatgtaaagatctcatccgatctgccgttttcgatcgccttggagtgggaaaaaacaggtgattttcgtttcg

SEQ ID NO: 14424 - protein, 306 aa, Zea mays subsp. mays
  peptide (1)..(306): Ceres Seq. ID no. 12595307
NISSSEPQSASQVLRSRRATQQDGEARIRKRRRLLQRHLHQGLRGGVHRHPPLRLRRRGFRHRLRATDEWRRAGPCGTGGDRGGARAGPLRGRLRGREHLRRPPEPRRDVRPGRGRPHHRPHRPLLLGGPAAGRVRGVPAPQVRDPRQGHPDPRRLRRHHRAGGRRVRDRHHLRARLHRVRHRRRPQEGLPRHHRAHRHRLHRRRQHPRRGALQRRLHEPRPLLRPRRRRGRLRRQLGLLGRPAHRRRTRWPRLRRRLHRRLLPAGRRPGLRLSSVLRSSGFSSSNAGARFDRRRHLLCSSFHHVM

SEQ ID NO: 14425 - protein, 272 aa, Zea mays subsp. mays
  peptide (1)..(272): Ceres Seq. ID no. 12595308
TYQAQSLRAPAKSCGREEQRNKMVKLAFGSVGDSFSVTSIKAYVAEFIATLLFVFAGVGSAIAFGQLTNGGALDPAGLVAIAVAHALALFVGVSVAANTSGGHLNPAVTFGLAVGGHITVLTGLFYWVAQLLGASVACLLLRFVTHGKAIPTHGVSGGTTELEGVVFEIVITFALVYTVYATAADPKKGSLGTIAPIAIGFIVGANILAAGPFSGGSMNPARSFGPAVAAADFAGNWVYWVGPLIGGGLAGLVYGDVFIGGSYQQVADQDYA

SEQ ID NO: 14426 - protein, 250 aa, Zea mays subsp. mays
  peptide (1)..(250): Ceres Seq. ID no. 12595309
MVKLAFGSVGDSFSVTSIKAYVAEFIATLLFVFAGVGSAIAFGQLTNGGALDPAGLVAIAVAHALALFVGVSVAANTSGGHLNPAVTFGLAVGGHITVLTGLFYWVAQLLGASVACLLLRFVTHGKAIPTHGVSGGTTELEGVVFEIVITFALVYTVYATAADPKKGSLGTIAPIAIGFIVGANILAAGPFSGGSMNPARSFGPAVAAADFAGNWVYWVGPLIGGGLAGLVYGDVFIGGSYQQVADQDYA

SEQ ID NO: 14427 - DNA, 542 bp, Zea mays subsp. mays
  misc_feature (1)..(542): Ceres Seq. ID no. 12468596
  misc_feature (1)..(542): Ortholog of  Ceres SEQ ID NO 15169533 as cited in SEQ ID NO 67374
gctagtgtttgagggcataagcgtggatgaatctgggaagcagcatttccttgatgcgtcagttgcttacaagcgtgcagtcctgaacgccattgagtacattgctagatttgggtactcgaaggagcaggtgtatctcttactatcatgctgtccctgtgagggtaggatctctggaatagttgactctcctaatgcagtggcaactcttgccatccctacagcaatatttgatcaggatataaagccaaaacacctgagaggaagaccgggaccaaagttgataaggcttccagatctcctgagctgttcaaacaatgggcatattcctgtcacccaagaccaaagtggtacaagggcgtcctaggggcgtatatgatctggaagctgatgccgtatccttctacctatacacacaaataatcgtgttggtgtttccaacaatgtagatcttttatttgttgggcagtcatcatgtatgaggaatagagacacctgagtggtgccatattttcagtgcctgtattgctacaaagttgttc

SEQ ID NO: 14428 - protein, 121 aa, Zea mays subsp. mays
  peptide (1)..(121): Ceres Seq. ID no. 12468597
LVFEGISVDESGKQHFLDASVAYKRAVLNAIEYIARFGYSKEQVYLLLSCCPCEGRISGIVDSPNAVATLAIPTAIFDQDIKPKHLRGRPGPKLIRLPDLLSCSNNGHIPVTQDQSGTRAS

SEQ ID NO: 14429 - DNA, 2328 bp, Zea mays subsp. mays
  misc_feature (1)..(2328): Ceres Seq. ID no. 13635296
  misc_feature (1)..(2328): Ortholog of  Ceres SEQ ID NO 14315309 as cited in SEQ ID NO 53998
  misc_feature (1)..(2328): Ortholog of  Ceres SEQ ID NO 13638213 as cited in SEQ ID NO 57275
aaaatcgacgacgacgtctaatctatttaaggctgaaatccaccttgcctgcgtggccctcctccccatcgcgtctgtccgctacccctccccgaccagatcgctacgagacgccgcgcgatccgacccaggccgacgccgacgacccctctcgccgccggcggccatggcgtacggcgaccgcgtcaccaccttcgaggactccgagaaggagagcgagtacggctatgtccgcaaggtctctggacctgtggttgtggctgatggaatgggtggtgctgccatgtatgaacttgttcgtgtcggacatgataacctcattggggaaattatccgtcttgagggcgattcgagctacaatccaagtttatgaggaaacagctggactgatggttaatgaccctgtattgagaacaagaaagcctctttcagttgaattgggacctggaattcttggaaacatttttgacggtatccagcgrcctctaaaaaccatcgctattaagtcaggagatgtgtatattcctcgtggtgtttcagttcctgcccttgacaaagatgtattgtgggaatttcagccaacgaagctaggtgttggagatgtcatcacaggtggagatctatacgctactgtttttgagaacacattgatgcagcaccatgttgctcttccaccgggttctatggggaaaataagttacattgcaccagctggccagtacaacctgcaggacacagtgctagaattggaatttcagggcataaaaaagaaatttaccatgcttcagacatggcctgtgcgttcaccaaggcctgttgcatcgaagcttgctgcggatacacctcttctgacagggcagcgtgtactggatgcactattcccctcggttctgggaggcacttgtgctattccaggagcatttggctgtggaaaaactgtcattagtcaggcactttccaagtactccaattccgaagctgtggtttatgtgggctgtggtgaacgaggaaatgagatggctgaggttctcatggactttccccagttgacgatgacattgcctgatggccgtgaggagtctgtcatgaagagaacaacactggtggctaacacatcaaacatgcctgtcgctgctcgtgaagcttccatttacactggaattacaattgctgagtatttccgtgatatgggctacaacgtcagtatgatggctgactccacctcccggtgggctgaggcattgcgtgagatctcagggcgtttggctgaaatgcctgctgatagtggttacccagcttacttggctgcrcgtttggcatccttttatgaacgtgctggtaaggtraaatgyctgggaagtccagacaggamtggcagtgtcacaattgttggagcygtctctcctccwggtggtgatttttcagaccctgttacctcygcaaccctcagtattgttcaggtcttctggggtttagataaaaagctcgctcaaaggaagcatttcccatctgtgaattggctcatttcctattcgaaatactccaaggcccttgagtcyttttaygagaarttygatccagatttcattgatattaggacaaaagcacgygaggtgttgcagagggaggacgatctraatgaaattgtgcagcttgttggtaaagaygcgctggcagaatctgacaagattacrctggagacagcaaagctwytgagagaagattatttggcacaaaatgcattyaccccatatgataagttctgcccattctacaaatccgtttggatgatgcgcaacattattcacttcaacacattggcaaatcaggctgtggagcgggcagctggtactgacggccataagataacatacagtgtcataaagcatcggttgggggatctattttatcgcctagtatcccaaaagttcgaggatcctgcagaaggygaagaagctttggtcggcaagtttaagaaactktaygaygaccttaccactgggttccgcaacctagaagatgaggcacrgtgaactgctgtagattttgtgtaagacaataatggctgccaaatgttttataaggtacggaagttgtagattgmgaccatgtatgagaattttccccaccgctactcatytctttgcccaccactattttagtcatcagtgctggatgggcayyytgtttatttcgacgtaccctttattgctatagcattgtaataagcgatgggcatgcttgtagttgaataagtacaatgtccatgtattcaaacatcagcgtcatgtttatttgnttgttgaaaaaactatgttgcctttttgg

SEQ ID NO: 14430 - protein, 676 aa, Zea mays subsp. mays
  peptide (1)..(676): Ceres Seq. ID no. 15220344
  misc_feature (160)..(160): Xaa is any aa, unknown or other
  misc_feature (436)..(436): Xaa is any aa, unknown or other
  misc_feature (448)..(448): Xaa is any aa, unknown or other
  misc_feature (450)..(450): Xaa is any aa, unknown or other
  misc_feature (457)..(457): Xaa is any aa, unknown or other
  misc_feature (465)..(465): Xaa is any aa, unknown or other
  misc_feature (469)..(469): Xaa is any aa, unknown or other
  misc_feature (479)..(479): Xaa is any aa, unknown or other
  misc_feature (519)..(519): Xaa is any aa, unknown or other
  misc_feature (521)..(521): Xaa is any aa, unknown or other
  misc_feature (523)..(523): Xaa is any aa, unknown or other
  misc_feature (524)..(524): Xaa is any aa, unknown or other
  misc_feature (536)..(536): Xaa is any aa, unknown or other
  misc_feature (545)..(545): Xaa is any aa, unknown or other
  misc_feature (555)..(555): Xaa is any aa, unknown or other
  misc_feature (564)..(564): Xaa is any aa, unknown or other
  misc_feature (570)..(570): Xaa is any aa, unknown or other
  misc_feature (571)..(571): Xaa is any aa, unknown or other
  misc_feature (581)..(581): Xaa is any aa, unknown or other
  misc_feature (649)..(649): Xaa is any aa, unknown or other
  misc_feature (660)..(660): Xaa is any aa, unknown or other
  misc_feature (661)..(661): Xaa is any aa, unknown or other
  misc_feature (662)..(662): Xaa is any aa, unknown or other
  misc_feature (676)..(676): Xaa is any aa, unknown or other
NRRRRLIYLRLKSTLPAWPSSPSRLSATPPRPDRYETPRDPTQADADDPSRRRRPWRTATASPPSRTPRRRASTAMSARSLDLWLWLMEWVVLPCMNLFVSDMITSLGKLSVLRAIRATIQVYEETAGLMVNDPVLRTRKPLSVELGPGILGNIFDGIQXPLKTIAIKSGDVYIPRGVSVPALDKDVLWEFQPTKLGVGDVITGGDLYATVFENTLMQHHVALPPGSMGKISYIAPAGQYNLQDTVLELEFQGIKKKFTMLQTWPVRSPRPVASKLAADTPLLTGQRVLDALFPSVLGGTCAIPGAFGCGKTVISQALSKYSNSEAVVYVGCGERGNEMAEVLMDFPQLTMTLPDGREESVMKRTTLVANTSNMPVAAREASIYTGITIAEYFRDMGYNVSMMADSTSRWAEALREISGRLAEMPADSGYPAYLAXRLASFYERAGKXKXLGSPDRXGSVTIVGXVSPXGGDFSDPVTXATLSIVQVFWGLDKKLAQRKHFPSVNWLISYSKYSKALEXFXEXXDPDFIDIRTKAXEVLQREDDXNEIVQLVGKXALAESDKIXLETAKXXREDYLAQNAXTPYDKFCPFYKSVWMMRNIIHFNTLANQAVERAAGTDGHKITYSVIKHRLGDLFYRLVSQKFEDPAEXEEALVGKFKKXXXDLTTGFRNLEDEAX

SEQ ID NO: 14431 - protein, 601 aa, Zea mays subsp. mays
  peptide (1)..(601): Ceres Seq. ID no. 15220345
  misc_feature (85)..(85): Xaa is any aa, unknown or other
  misc_feature (361)..(361): Xaa is any aa, unknown or other
  misc_feature (373)..(373): Xaa is any aa, unknown or other
  misc_feature (375)..(375): Xaa is any aa, unknown or other
  misc_feature (382)..(382): Xaa is any aa, unknown or other
  misc_feature (390)..(390): Xaa is any aa, unknown or other
  misc_feature (394)..(394): Xaa is any aa, unknown or other
  misc_feature (404)..(404): Xaa is any aa, unknown or other
  misc_feature (444)..(444): Xaa is any aa, unknown or other
  misc_feature (446)..(446): Xaa is any aa, unknown or other
  misc_feature (448)..(448): Xaa is any aa, unknown or other
  misc_feature (449)..(449): Xaa is any aa, unknown or other
  misc_feature (461)..(461): Xaa is any aa, unknown or other
  misc_feature (470)..(470): Xaa is any aa, unknown or other
  misc_feature (480)..(480): Xaa is any aa, unknown or other
  misc_feature (489)..(489): Xaa is any aa, unknown or other
  misc_feature (495)..(495): Xaa is any aa, unknown or other
  misc_feature (496)..(496): Xaa is any aa, unknown or other
  misc_feature (506)..(506): Xaa is any aa, unknown or other
  misc_feature (574)..(574): Xaa is any aa, unknown or other
  misc_feature (585)..(585): Xaa is any aa, unknown or other
  misc_feature (586)..(586): Xaa is any aa, unknown or other
  misc_feature (587)..(587): Xaa is any aa, unknown or other
  misc_feature (601)..(601): Xaa is any aa, unknown or other
MSARSLDLWLWLMEWVVLPCMNLFVSDMITSLGKLSVLRAIRATIQVYEETAGLMVNDPVLRTRKPLSVELGPGILGNIFDGIQXPLKTIAIKSGDVYIPRGVSVPALDKDVLWEFQPTKLGVGDVITGGDLYATVFENTLMQHHVALPPGSMGKISYIAPAGQYNLQDTVLELEFQGIKKKFTMLQTWPVRSPRPVASKLAADTPLLTGQRVLDALFPSVLGGTCAIPGAFGCGKTVISQALSKYSNSEAVVYVGCGERGNEMAEVLMDFPQLTMTLPDGREESVMKRTTLVANTSNMPVAAREASIYTGITIAEYFRDMGYNVSMMADSTSRWAEALREISGRLAEMPADSGYPAYLAXRLASFYERAGKXKXLGSPDRXGSVTIVGXVSPXGGDFSDPVTXATLSIVQVFWGLDKKLAQRKHFPSVNWLISYSKYSKALEXFXEXXDPDFIDIRTKAXEVLQREDDXNEIVQLVGKXALAESDKIXLETAKXXREDYLAQNAXTPYDKFCPFYKSVWMMRNIIHFNTLANQAVERAAGTDGHKITYSVIKHRLGDLFYRLVSQKFEDPAEXEEALVGKFKKXXXDLTTGFRNLEDEAX

SEQ ID NO: 14432 - protein, 589 aa, Zea mays subsp. mays
  peptide (1)..(589): Ceres Seq. ID no. 15220346
  misc_feature (73)..(73): Xaa is any aa, unknown or other
  misc_feature (349)..(349): Xaa is any aa, unknown or other
  misc_feature (361)..(361): Xaa is any aa, unknown or other
  misc_feature (363)..(363): Xaa is any aa, unknown or other
  misc_feature (370)..(370): Xaa is any aa, unknown or other
  misc_feature (378)..(378): Xaa is any aa, unknown or other
  misc_feature (382)..(382): Xaa is any aa, unknown or other
  misc_feature (392)..(392): Xaa is any aa, unknown or other
  misc_feature (432)..(432): Xaa is any aa, unknown or other
  misc_feature (434)..(434): Xaa is any aa, unknown or other
  misc_feature (436)..(436): Xaa is any aa, unknown or other
  misc_feature (437)..(437): Xaa is any aa, unknown or other
  misc_feature (449)..(449): Xaa is any aa, unknown or other
  misc_feature (458)..(458): Xaa is any aa, unknown or other
  misc_feature (468)..(468): Xaa is any aa, unknown or other
  misc_feature (477)..(477): Xaa is any aa, unknown or other
  misc_feature (483)..(483): Xaa is any aa, unknown or other
  misc_feature (484)..(484): Xaa is any aa, unknown or other
  misc_feature (494)..(494): Xaa is any aa, unknown or other
  misc_feature (562)..(562): Xaa is any aa, unknown or other
  misc_feature (573)..(573): Xaa is any aa, unknown or other
  misc_feature (574)..(574): Xaa is any aa, unknown or other
  misc_feature (575)..(575): Xaa is any aa, unknown or other
  misc_feature (589)..(589): Xaa is any aa, unknown or other
MEWVVLPCMNLFVSDMITSLGKLSVLRAIRATIQVYEETAGLMVNDPVLRTRKPLSVELGPGILGNIFDGIQXPLKTIAIKSGDVYIPRGVSVPALDKDVLWEFQPTKLGVGDVITGGDLYATVFENTLMQHHVALPPGSMGKISYIAPAGQYNLQDTVLELEFQGIKKKFTMLQTWPVRSPRPVASKLAADTPLLTGQRVLDALFPSVLGGTCAIPGAFGCGKTVISQALSKYSNSEAVVYVGCGERGNEMAEVLMDFPQLTMTLPDGREESVMKRTTLVANTSNMPVAAREASIYTGITIAEYFRDMGYNVSMMADSTSRWAEALREISGRLAEMPADSGYPAYLAXRLASFYERAGKXKXLGSPDRXGSVTIVGXVSPXGGDFSDPVTXATLSIVQVFWGLDKKLAQRKHFPSVNWLISYSKYSKALEXFXEXXDPDFIDIRTKAXEVLQREDDXNEIVQLVGKXALAESDKIXLETAKXXREDYLAQNAXTPYDKFCPFYKSVWMMRNIIHFNTLANQAVERAAGTDGHKITYSVIKHRLGDLFYRLVSQKFEDPAEXEEALVGKFKKXXXDLTTGFRNLEDEAX

SEQ ID NO: 14433 - DNA, 1152 bp, Zea mays subsp. mays
  misc_feature (1)..(1152): Ceres Seq. ID no. 12436476
  misc_feature (1)..(1152): Ortholog of  Ceres SEQ ID NO 13659643 as cited in SEQ ID NO 67106
aggctccactgctaaacgccggtaatggcccaggctccggcgcgcgccgcttccgccgtacgtctcttcgacgcgcactgccacctgcaagacccccgcatcgcggccgtcgcccctgcccttatacgagccgccggcgcatccggcgtcgcacgcttcgctgtcaacggcacctccgagaaggactggcacctggtgaagcagatggccgaggatcacccagccgtcgtcccctgcttcggcctgcacccttggtgggtacccgagaggtcgccggattggatgaatttgctccggcggttcttcgccgaaaccccggaggcggctgttggggagattggtctggacaaaggttcacatggaaaaaccatcaacttcggagaacaggttgaagtgttccagcgacagctcgaactagctaaggaattggagagacctgtttctgttcattgtgtgcgggcatttggtgatcttctggaagtattgaagcaaactggacctttcccagcaggcgtgttgttacattcttatatgggatctgcagaaatggtgtctgcccttgcaaatttaggctgttacttttcactatctggcttcttgacaggcatgaaatccactaaagctaagcacatgctgaagtcgattcccctggataggattcttttagagacagatgcacctgatgcattaccaagattggacaatgtttctgtatcaccagtccatgttcacagttcagatgcagatactgaaaagcgtcacatggattcagagtcacaggctgctaatgcatcaaatgagtccttgaaccatccagaaaatatccatattgttttggagtatgtcgcatcactccttgaaatgacagagtcagaattggcggagttgagttacaagaatgctaccaagctgttttcttatcctggctccaaagttcaacatgaacctgaagacatctaaatcgggttcaacactaccttactcactggtcagcaaatctgaaacctgttctttttagttttgactcctggtttttctcctcttcttaatgctgtttgtgtaccggattgtagggtcctcccagacacaatgtttgagaaactgaaatggctgtacatcactgttaatattggtgaaataaaacagataccg

SEQ ID NO: 14434 - protein, 311 aa, Zea mays subsp. mays
  peptide (1)..(311): Ceres Seq. ID no. 12436477
MAQAPARAASAVRLFDAHCHLQDPRIAAVAPALIRAAGASGVARFAVNGTSEKDWHLVKQMAEDHPAVVPCFGLHPWWVPERSPDWMNLLRRFFAETPEAAVGEIGLDKGSHGKTINFGEQVEVFQRQLELAKELERPVSVHCVRAFGDLLEVLKQTGPFPAGVLLHSYMGSAEMVSALANLGCYFSLSGFLTGMKSTKAKHMLKSIPLDRILLETDAPDALPRLDNVSVSPVHVHSSDADTEKRHMDSESQAANASNESLNHPENIHIVLEYVASLLEMTESELAELSYKNATKLFSYPGSKVQHEPEDI

SEQ ID NO: 14435 - protein, 251 aa, Zea mays subsp. mays
  peptide (1)..(251): Ceres Seq. ID no. 12436478
MAEDHPAVVPCFGLHPWWVPERSPDWMNLLRRFFAETPEAAVGEIGLDKGSHGKTINFGEQVEVFQRQLELAKELERPVSVHCVRAFGDLLEVLKQTGPFPAGVLLHSYMGSAEMVSALANLGCYFSLSGFLTGMKSTKAKHMLKSIPLDRILLETDAPDALPRLDNVSVSPVHVHSSDADTEKRHMDSESQAANASNESLNHPENIHIVLEYVASLLEMTESELAELSYKNATKLFSYPGSKVQHEPEDI

SEQ ID NO: 14436 - protein, 225 aa, Zea mays subsp. mays
  peptide (1)..(225): Ceres Seq. ID no. 12436479
MNLLRRFFAETPEAAVGEIGLDKGSHGKTINFGEQVEVFQRQLELAKELERPVSVHCVRAFGDLLEVLKQTGPFPAGVLLHSYMGSAEMVSALANLGCYFSLSGFLTGMKSTKAKHMLKSIPLDRILLETDAPDALPRLDNVSVSPVHVHSSDADTEKRHMDSESQAANASNESLNHPENIHIVLEYVASLLEMTESELAELSYKNATKLFSYPGSKVQHEPEDI

SEQ ID NO: 14437 - DNA, 1320 bp, Zea mays subsp. mays
  misc_feature (1)..(1320): Ceres Seq. ID no. 13505046
  misc_feature (1)..(1320): Ortholog of  Ceres SEQ ID NO 13600310 as cited in SEQ ID NO 5086
  misc_feature (1)..(1320): Ortholog of  Ceres SEQ ID NO 15172491 as cited in SEQ ID NO 58719
  misc_feature (1)..(1320): Ortholog of  Ceres SEQ ID NO 15180362 as cited in SEQ ID NO 0
ggaactgaaaggaaacattagggttttttgtagagttcgaccacttcttcgatttgagggtgattccaatggtccggaaggtgcctctatctcttttccaacatctgtagagtctactggacgtagcattgatttgataaaccaagggcaaaagctctccttctcatatgacaaggtttttgaccatggtgcgtcacaggaagatgtgtttgtggaaatatcgcaactagtccaaagtgcccttgatgggtacaaggtatgcatatttgcatatggtcaaactggatctggtaaaacttatacaatgatgggtaaaccaggaaatgatcaaaaagggataatacctcgttctttggagcaaattttcaagaccagtcggtttctagaatctcaaggatggaattattccatgcaagcatcaatgttggaaatatacaatgagaccattcgtgatttgttagcacctggtcggtctaacagttttgagtctagtaaacaatgcactataaagcatgaccctcatgggaatattgtgtcggaccttacaattattgatgtctttggtattgctgatgtgactagtctactagagaaagcatcccagagtaggtctgtgggtaagactcagatgaatgaacagtcgtccagaagtcattttgtattcacattaaagatatctggatctaacgagaacacaggccaaaatgtccaaggagtccttaacttgattgatttagctgggagtgagcgtcttgctaaaagtggctccacaggtgatcgcttgaaggaaactcagtcaatcaataaaagcttgtcggctttgagcgatgtaatcttcgcgatcgcaaaaggagatgaccacgttccgttcagaaattcaaaacttacatacctattgcagccttgccttggaggtgactcgaaagctctcatgtttgtcaacatttcaccggaggcatcctccgttggtgagacgatatgctcgttgaggtttgcttcaagggtgaatgcttgtgagattggaataccaagacgtcacacataagcccgtcccttcgttctaggctgaattatgggtgaaggtagctgtagggatcatggtaatgtgatatataatgtgttggtttgtgccgcatttggccacaaaggtgatgcccaacagaattcttgtaacttgtacagtgtaggtgatggtgttttgctgagagcagcatatgtacgagtgctgacatcttgtcatgctttccttactttttggtgtagcagacttgggtcatgttaattgtgatcgtgggttcgaatgtgaaactaccttttctc

SEQ ID NO: 14438 - protein, 347 aa, Zea mays subsp. mays
  peptide (1)..(347): Ceres Seq. ID no. 13505047
ELKGNIRVFCRVRPLLRFEGDSNGPEGASISFPTSVESTGRSIDLINQGQKLSFSYDKVFDHGASQEDVFVEISQLVQSALDGYKVCIFAYGQTGSGKTYTMMGKPGNDQKGIIPRSLEQIFKTSRFLESQGWNYSMQASMLEIYNETIRDLLAPGRSNSFESSKQCTIKHDPHGNIVSDLTIIDVFGIADVTSLLEKASQSRSVGKTQMNEQSSRSHFVFTLKISGSNENTGQNVQGVLNLIDLAGSERLAKSGSTGDRLKETQSINKSLSALSDVIFAIAKGDDHVPFRNSKLTYLLQPCLGGDSKALMFVNISPEASSVGETICSLRFASRVNACEIGIPRRHT

SEQ ID NO: 14439 - protein, 246 aa, Zea mays subsp. mays
  peptide (1)..(246): Ceres Seq. ID no. 13505048
MMGKPGNDQKGIIPRSLEQIFKTSRFLESQGWNYSMQASMLEIYNETIRDLLAPGRSNSFESSKQCTIKHDPHGNIVSDLTIIDVFGIADVTSLLEKASQSRSVGKTQMNEQSSRSHFVFTLKISGSNENTGQNVQGVLNLIDLAGSERLAKSGSTGDRLKETQSINKSLSALSDVIFAIAKGDDHVPFRNSKLTYLLQPCLGGDSKALMFVNISPEASSVGETICSLRFASRVNACEIGIPRRHT

SEQ ID NO: 14440 - protein, 245 aa, Zea mays subsp. mays
  peptide (1)..(245): Ceres Seq. ID no. 13505049
MGKPGNDQKGIIPRSLEQIFKTSRFLESQGWNYSMQASMLEIYNETIRDLLAPGRSNSFESSKQCTIKHDPHGNIVSDLTIIDVFGIADVTSLLEKASQSRSVGKTQMNEQSSRSHFVFTLKISGSNENTGQNVQGVLNLIDLAGSERLAKSGSTGDRLKETQSINKSLSALSDVIFAIAKGDDHVPFRNSKLTYLLQPCLGGDSKALMFVNISPEASSVGETICSLRFASRVNACEIGIPRRHT

SEQ ID NO: 14441 - DNA, 2294 bp, Zea mays subsp. mays
  misc_feature (1)..(2294): Ceres Seq. ID no. 13587778
  misc_feature (1)..(2294): Ortholog of  Ceres SEQ ID NO 13584744 as cited in SEQ ID NO 69137
ttgaccccaacgatcttaacgtcctcaacacgctcttcaccagtctgaattctcctgggcagctcacaggttggcaggcgaatgggggtgatccttgtggccagtcatggaagggcattacttgctcaggatcaggggtcactaaaatccaattacctaacttgtcactcactggaaatttggcctacaacatgaataacttgggttcattagttgagcttgacatgagccaaaataaccttggcggtggaggtcaagtacagtacaatcttcccaatatgaagcttgagaaactcaatcttgcaggaaatcaatttggtggaaatttaccctactcaatttcgacgatgcctaatcttaagtatttaaaccttaatcataaccaactacaaggaaacatcagtgatgtattttccaacctttacagtttgtcagaactggatctgtcctttaattcccttactggtgatctaccacaaagtttcactggattgtcaagcctgaaaaaagtgtatttgcagaacaaccaatttactggtaatatcaatgtcttagccaatctcccccttgaaactttgaatgttgcgaacaaccatttcactggttggattcctagtcagcttaagaagataaacagtctacagactgatggaaattcttggagcacaggaccagcgccacctccacctccatacacagcgccgcctcctcctccaaaccattggaatgctgatggttcatcaagttcatcaagttctggtggaagatctgggataggtggtggaggtgtagcaggaatcattatatcgttgctggttgttggatcagttgttgcatttcttgtgatcaaaagaagaaaacgcaaagctgctatgaaagaacattttgaacagcaccagccattcacttccttcccttcaaatgaagttaaagacatgaagcctgtctgcgaggccaccacagtagacatagagtctttggcttcacctgcttcagttaatctgaaaccacctccgaagatagaacgaaacaaatcatttgatgatgacgatgatttttcaaacaagcttgttgcaaagaaaagtaatataacacctataaatgcaactgtttattcagttgcagatctacagatggcaacagatagctttagcttcgacaaccttgttggagagggtacttttggacgtgtttacagggcacaattcaatgatggaaaggttctggcgatcaagaaattagatagtactgtgatgccatttcaatcatctgatgactttgctgaactggtctcgaacatttcaaaattgcaccatccgaatctgaatgagcttgtgggctattgcatggaacatggccagcacttgcttgtgtatgatttccacaggaatggatcacttcatgatctactccacctttcagatgagtacagcaagccacttagctggaacactcgtatcaagatcgcactcggctctgcccgtgcactggagtaccttcatgaaatatgttctccatccatcatccataagaatttcaagtcgtcaaacattttgctggactcagaattcaatccacacctttcagatgctggacttgcaagctttattcctgatgctgaattccaggcagcagaacaaagtgccggatacactgccccagaagtggacatgaccggtcagtacaccttcaagagtgatgtctacagctttggagttgtcatgcttgaactattgacaggacgtagaccatttgacagctctagacccaggtcagagcagtcacttgtgcggtgggcaacaccccagctgcatgacatcgacgcattggacaggatggtcgatcctgcactcaagggtctatacccagccaaatctctatcccgatttgctgatgtccttgccctgtgtgtccagcctgaaccagaattcaggccaccaatgtcagaggtggtgcaagcattggttcgacttgtgcagagggccaacatgacgaagaggatgcttgatggggatacttctcggcgaccagatgacctggaccaagatttcatatgacaagctgaactcttgtcagattgtatttatttcgttcgactagcggcccaagcaagagacataatcacacaagaggaagaaacagaactctgtcagcttcgccagtacataatcacaagtttttcctggtagcaaagttgtgctatatggttgtactgtgtctacaaaatagtaccttgatcttacgctaatggcatattgttataattctttggtaacttatatgcaaatccccag

SEQ ID NO: 14442 - protein, 684 aa, Zea mays subsp. mays
  peptide (1)..(684): Ceres Seq. ID no. 13587779
DPNDLNVLNTLFTSLNSPGQLTGWQANGGDPCGQSWKGITCSGSGVTKIQLPNLSLTGNLAYNMNNLGSLVELDMSQNNLGGGGQVQYNLPNMKLEKLNLAGNQFGGNLPYSISTMPNLKYLNLNHNQLQGNISDVFSNLYSLSELDLSFNSLTGDLPQSFTGLSSLKKVYLQNNQFTGNINVLANLPLETLNVANNHFTGWIPSQLKKINSLQTDGNSWSTGPAPPPPPYTAPPPPPNHWNADGSSSSSSSGGRSGIGGGGVAGIIISLLVVGSVVAFLVIKRRKRKAAMKEHFEQHQPFTSFPSNEVKDMKPVCEATTVDIESLASPASVNLKPPPKIERNKSFDDDDDFSNKLVAKKSNITPINATVYSVADLQMATDSFSFDNLVGEGTFGRVYRAQFNDGKVLAIKKLDSTVMPFQSSDDFAELVSNISKLHHPNLNELVGYCMEHGQHLLVYDFHRNGSLHDLLHLSDEYSKPLSWNTRIKIALGSARALEYLHEICSPSIIHKNFKSSNILLDSEFNPHLSDAGLASFIPDAEFQAAEQSAGYTAPEVDMTGQYTFKSDVYSFGVVMLELLTGRRPFDSSRPRSEQSLVRWATPQLHDIDALDRMVDPALKGLYPAKSLSRFADVLALCVQPEPEFRPPMSEVVQALVRLVQRANMTKRMLDGDTSRRPDDLDQDFI

SEQ ID NO: 14443 - protein, 621 aa, Zea mays subsp. mays
  peptide (1)..(621): Ceres Seq. ID no. 13587780
MNNLGSLVELDMSQNNLGGGGQVQYNLPNMKLEKLNLAGNQFGGNLPYSISTMPNLKYLNLNHNQLQGNISDVFSNLYSLSELDLSFNSLTGDLPQSFTGLSSLKKVYLQNNQFTGNINVLANLPLETLNVANNHFTGWIPSQLKKINSLQTDGNSWSTGPAPPPPPYTAPPPPPNHWNADGSSSSSSSGGRSGIGGGGVAGIIISLLVVGSVVAFLVIKRRKRKAAMKEHFEQHQPFTSFPSNEVKDMKPVCEATTVDIESLASPASVNLKPPPKIERNKSFDDDDDFSNKLVAKKSNITPINATVYSVADLQMATDSFSFDNLVGEGTFGRVYRAQFNDGKVLAIKKLDSTVMPFQSSDDFAELVSNISKLHHPNLNELVGYCMEHGQHLLVYDFHRNGSLHDLLHLSDEYSKPLSWNTRIKIALGSARALEYLHEICSPSIIHKNFKSSNILLDSEFNPHLSDAGLASFIPDAEFQAAEQSAGYTAPEVDMTGQYTFKSDVYSFGVVMLELLTGRRPFDSSRPRSEQSLVRWATPQLHDIDALDRMVDPALKGLYPAKSLSRFADVLALCVQPEPEFRPPMSEVVQALVRLVQRANMTKRMLDGDTSRRPDDLDQDFI

SEQ ID NO: 14444 - protein, 610 aa, Zea mays subsp. mays
  peptide (1)..(610): Ceres Seq. ID no. 13587781
MSQNNLGGGGQVQYNLPNMKLEKLNLAGNQFGGNLPYSISTMPNLKYLNLNHNQLQGNISDVFSNLYSLSELDLSFNSLTGDLPQSFTGLSSLKKVYLQNNQFTGNINVLANLPLETLNVANNHFTGWIPSQLKKINSLQTDGNSWSTGPAPPPPPYTAPPPPPNHWNADGSSSSSSSGGRSGIGGGGVAGIIISLLVVGSVVAFLVIKRRKRKAAMKEHFEQHQPFTSFPSNEVKDMKPVCEATTVDIESLASPASVNLKPPPKIERNKSFDDDDDFSNKLVAKKSNITPINATVYSVADLQMATDSFSFDNLVGEGTFGRVYRAQFNDGKVLAIKKLDSTVMPFQSSDDFAELVSNISKLHHPNLNELVGYCMEHGQHLLVYDFHRNGSLHDLLHLSDEYSKPLSWNTRIKIALGSARALEYLHEICSPSIIHKNFKSSNILLDSEFNPHLSDAGLASFIPDAEFQAAEQSAGYTAPEVDMTGQYTFKSDVYSFGVVMLELLTGRRPFDSSRPRSEQSLVRWATPQLHDIDALDRMVDPALKGLYPAKSLSRFADVLALCVQPEPEFRPPMSEVVQALVRLVQRANMTKRMLDGDTSRRPDDLDQDFI

SEQ ID NO: 14445 - DNA, 510 bp, Zea mays subsp. mays
  misc_feature (1)..(510): Ceres Seq. ID no. 3623923
  misc_feature (1)..(510): Ortholog of  Ceres SEQ ID NO 12617197 as cited in SEQ ID NO 63406
  misc_feature (1)..(510): Ortholog of  Ceres SEQ ID NO 13600175 as cited in SEQ ID NO 0
aatatggtggatattcgkgrtgttgctgatgctcttcttctgacttacgaaaagccarargcgtctggacgatacatctgcagttcacatgcaataaaaatttctgatatgataaacatactgaagaccatgtatccgtcttacccttatcccaaaaattttgtggaagatgatgtcaactctgtatacagctctgagaaactgcagaagctggggtggaccttcaagcctatagaggaatccctccgtgacactgttgaatcctacaaggcatttggcatcctgaattgaacatccaactaggactgtttccatctgctgttgcctccgaactcctcctgaataatgtaggcgcagttaaacagcagcagcactgccgatctctttatttttcaatattgktatctagtggttcaggaccaaataagtaggccaggtgctgactgttgtatggtttgkggcctattgkcgttgctaaaaactagaaatgcgcgtmctaatgttgcattg

SEQ ID NO: 14446 - protein, 96 aa, Zea mays subsp. mays
  peptide (1)..(96): Ceres Seq. ID no. 3623924
  misc_feature (6)..(6): Xaa is any aa, unknown or other
  misc_feature (7)..(7): Xaa is any aa, unknown or other
  misc_feature (20)..(20): Xaa is any aa, unknown or other
NMVDIXXVADALLLTYEKPXASGRYICSSHAIKISDMINILKTMYPSYPYPKNFVEDDVNSVYSSEKLQKLGWTFKPIEESLRDTVESYKAFGILN

SEQ ID NO: 14447 - protein, 95 aa, Zea mays subsp. mays
  peptide (1)..(95): Ceres Seq. ID no. 3623925
  misc_feature (5)..(5): Xaa is any aa, unknown or other
  misc_feature (6)..(6): Xaa is any aa, unknown or other
  misc_feature (19)..(19): Xaa is any aa, unknown or other
MVDIXXVADALLLTYEKPXASGRYICSSHAIKISDMINILKTMYPSYPYPKNFVEDDVNSVYSSEKLQKLGWTFKPIEESLRDTVESYKAFGILN

SEQ ID NO: 14448 - protein, 60 aa, Zea mays subsp. mays
  peptide (1)..(60): Ceres Seq. ID no. 3623926
MINILKTMYPSYPYPKNFVEDDVNSVYSSEKLQKLGWTFKPIEESLRDTVESYKAFGILN

SEQ ID NO: 14449 - DNA, 1396 bp, Zea mays subsp. mays
  misc_feature (1)..(1396): Ceres Seq. ID no. 13636262
  misc_feature (1)..(1396): Ortholog of  Ceres SEQ ID NO 14311671 as cited in SEQ ID NO 51251
  misc_feature (1)..(1396): Ortholog of  Ceres SEQ ID NO 14304791 as cited in SEQ ID NO 53562
  misc_feature (1)..(1396): Ortholog of  Ceres SEQ ID NO 14307355 as cited in SEQ ID NO 54610
  misc_feature (1)..(1396): Ortholog of  Ceres SEQ ID NO 13594298 as cited in SEQ ID NO 57803
  misc_feature (1)..(1396): Ortholog of  Ceres SEQ ID NO 14301894 as cited in SEQ ID NO 61677
  misc_feature (1)..(1396): Ortholog of  Ceres SEQ ID NO 13503476 as cited in SEQ ID NO 61978
  misc_feature (1)..(1396): Ortholog of  Ceres SEQ ID NO 12578438 as cited in SEQ ID NO 62201
  misc_feature (1)..(1396): Ortholog of  Ceres SEQ ID NO 12617675 as cited in SEQ ID NO 64656
caattaaccctcactaaagggaacaaaagctggagctccaccgcggtggcggccgctctagaactagtggatcccccgggctgcaggaattcgcacgagaccattacctagaacatcctaatcgaaaaaagttccatatccaacacacacagcaacgctcgctcggcactgtcactagctagttgctctactagagggcgggtatagagctgcctgcaatccgccgctgagaagggaggatcggaagcgacgatgaggtcgtttgctcctgtctttctgtcggcggtcgtggcctggctggagctggcgggcaccgcgcagggcggcaacttctaccaggacacagagatgacctggggcgatggccgcggcaaggtagtggacggcgggcgcgggctggacctgacgctggaccgcacgtccggctccgggttccagtccaagagcgagtacctgttcggcaagatcgacatgcagatcaagctggtgccaggcaactccgctggcacggtcaccaccttctacctgtcgtccccagggcgacgcgcacgacgagatcgacttcgagttcctgggcaacgtgagcggggagccctacacgctgcacaccaacgtgttcacgcgcggacagggccagcgggagcagcagttccgcctctggttcgaccctaccactgccttccacacctactccatcctgtggaacccgcagcacgtgatcttcgcggtggacggcaccccggtgcgggacttcaagaaccacgaggcgcgcggggtggcgttcccgaggatgcagcccatgaggctgtacgccagcctgtggaacgccgacgactgggccacgcagggcgggcgcgtcaaggcggactggtccaaggcccccttcgtcgcctccttccgcggtttcagcgccgacgcctgcgtctgggacggcggcaggcagcgctgccctgagggcaccatggaggccgccgccgtcgcgggtgccggctccggccgcggctggtggaaccagcagctcagcgacatgagctaccgccgcatgcgctgggtgcagcgcaagttcatgatctacaactactgcgccgacgccaagcgcttcccgcagggcgtgcccgccgagtgcaagctccggtgagggagcgaggtttgttgggacgtccgtggggcatcaaaaccaagcacgatccctagtcgtggaaagtagaaaccaggcatcgattcgatcgtcgtcgacggtcttagtagtagctacttatttcgcagtgggcgatgaaagaatggtgtcatgtaaatgtagctctagtcgtgtcgcattctttgatttgttgtttcagcagcaccggatgtacaagtattgagtttgggctagcaagaataagtaatctttttcggc

SEQ ID NO: 14450 - protein, 233 aa, Zea mays subsp. mays
  peptide (1)..(233): Ceres Seq. ID no. 13636263
MRSFAPVFLSAVVAWLELAGTAQGGNFYQDTEMTWGDGRGKVVDGGRGLDLTLDRTSGSGFQSKSEYLFGKIDMQIKLVPGNSAGTVTTFYLSSPGRRARRDRLRVPGQRERGALHAAHQRVHARTGPAGAAVPPLVRPYHCLPHLLHPVEPAARDLRGGRHPGAGLQEPRGARGGVPEDAAHEAVRQPVERRRLGHAGRARQGGLVQGPLRRLLPRFQRRRLRLGRRQAALP

SEQ ID NO: 14451 - protein, 201 aa, Zea mays subsp. mays
  peptide (1)..(201): Ceres Seq. ID no. 13636264
MTWGDGRGKVVDGGRGLDLTLDRTSGSGFQSKSEYLFGKIDMQIKLVPGNSAGTVTTFYLSSPGRRARRDRLRVPGQRERGALHAAHQRVHARTGPAGAAVPPLVRPYHCLPHLLHPVEPAARDLRGGRHPGAGLQEPRGARGGVPEDAAHEAVRQPVERRRLGHAGRARQGGLVQGPLRRLLPRFQRRRLRLGRRQAALP

SEQ ID NO: 14452 - protein, 160 aa, Zea mays subsp. mays
  peptide (1)..(160): Ceres Seq. ID no. 13636265
MQIKLVPGNSAGTVTTFYLSSPGRRARRDRLRVPGQRERGALHAAHQRVHARTGPAGAAVPPLVRPYHCLPHLLHPVEPAARDLRGGRHPGAGLQEPRGARGGVPEDAAHEAVRQPVERRRLGHAGRARQGGLVQGPLRRLLPRFQRRRLRLGRRQAALP

SEQ ID NO: 14453 - DNA, 2328 bp, Zea mays subsp. mays; identical to SEQ ID NO: 14429
  misc_feature (1)..(2328): Ceres Seq. ID no. 13635296
  misc_feature (1)..(2328): Ortholog of  Ceres SEQ ID NO 14315309 as cited in SEQ ID NO 53998
  misc_feature (1)..(2328): Ortholog of  Ceres SEQ ID NO 13638213 as cited in SEQ ID NO 57275

SEQ ID NO: 14454 - protein, 676 aa, Zea mays subsp. mays; identical to SEQ ID NO: 14430
  peptide (1)..(676): Ceres Seq. ID no. 15220344
  misc_feature (160)..(160): Xaa is any aa, unknown or other
  misc_feature (436)..(436): Xaa is any aa, unknown or other
  misc_feature (448)..(448): Xaa is any aa, unknown or other
  misc_feature (450)..(450): Xaa is any aa, unknown or other
  misc_feature (457)..(457): Xaa is any aa, unknown or other
  misc_feature (465)..(465): Xaa is any aa, unknown or other
  misc_feature (469)..(469): Xaa is any aa, unknown or other
  misc_feature (479)..(479): Xaa is any aa, unknown or other
  misc_feature (519)..(519): Xaa is any aa, unknown or other
  misc_feature (521)..(521): Xaa is any aa, unknown or other
  misc_feature (523)..(523): Xaa is any aa, unknown or other
  misc_feature (524)..(524): Xaa is any aa, unknown or other
  misc_feature (536)..(536): Xaa is any aa, unknown or other
  misc_feature (545)..(545): Xaa is any aa, unknown or other
  misc_feature (555)..(555): Xaa is any aa, unknown or other
  misc_feature (564)..(564): Xaa is any aa, unknown or other
  misc_feature (570)..(570): Xaa is any aa, unknown or other
  misc_feature (571)..(571): Xaa is any aa, unknown or other
  misc_feature (581)..(581): Xaa is any aa, unknown or other
  misc_feature (649)..(649): Xaa is any aa, unknown or other
  misc_feature (660)..(660): Xaa is any aa, unknown or other
  misc_feature (661)..(661): Xaa is any aa, unknown or other
  misc_feature (662)..(662): Xaa is any aa, unknown or other
  misc_feature (676)..(676): Xaa is any aa, unknown or other

SEQ ID NO: 14455 - protein, 601 aa, Zea mays subsp. mays; identical to SEQ ID NO: 14431
  peptide (1)..(601): Ceres Seq. ID no. 15220345
  misc_feature (85)..(85): Xaa is any aa, unknown or other
  misc_feature (361)..(361): Xaa is any aa, unknown or other
  misc_feature (373)..(373): Xaa is any aa, unknown or other
  misc_feature (375)..(375): Xaa is any aa, unknown or other
  misc_feature (382)..(382): Xaa is any aa, unknown or other
  misc_feature (390)..(390): Xaa is any aa, unknown or other
  misc_feature (394)..(394): Xaa is any aa, unknown or other
  misc_feature (404)..(404): Xaa is any aa, unknown or other
  misc_feature (444)..(444): Xaa is any aa, unknown or other
  misc_feature (446)..(446): Xaa is any aa, unknown or other
  misc_feature (448)..(448): Xaa is any aa, unknown or other
  misc_feature (449)..(449): Xaa is any aa, unknown or other
  misc_feature (461)..(461): Xaa is any aa, unknown or other
  misc_feature (470)..(470): Xaa is any aa, unknown or other
  misc_feature (480)..(480): Xaa is any aa, unknown or other
  misc_feature (489)..(489): Xaa is any aa, unknown or other
  misc_feature (495)..(495): Xaa is any aa, unknown or other
  misc_feature (496)..(496): Xaa is any aa, unknown or other
  misc_feature (506)..(506): Xaa is any aa, unknown or other
  misc_feature (574)..(574): Xaa is any aa, unknown or other
  misc_feature (585)..(585): Xaa is any aa, unknown or other
  misc_feature (586)..(586): Xaa is any aa, unknown or other
  misc_feature (587)..(587): Xaa is any aa, unknown or other
  misc_feature (601)..(601): Xaa is any aa, unknown or other

SEQ ID NO: 14456 - protein, 589 aa, Zea mays subsp. mays; identical to SEQ ID NO: 14432
  peptide (1)..(589): Ceres Seq. ID no. 15220346
  misc_feature (73)..(73): Xaa is any aa, unknown or other
  misc_feature (349)..(349): Xaa is any aa, unknown or other
  misc_feature (361)..(361): Xaa is any aa, unknown or other
  misc_feature (363)..(363): Xaa is any aa, unknown or other
  misc_feature (370)..(370): Xaa is any aa, unknown or other
  misc_feature (378)..(378): Xaa is any aa, unknown or other
  misc_feature (382)..(382): Xaa is any aa, unknown or other
  misc_feature (392)..(392): Xaa is any aa, unknown or other
  misc_feature (432)..(432): Xaa is any aa, unknown or other
  misc_feature (434)..(434): Xaa is any aa, unknown or other
  misc_feature (436)..(436): Xaa is any aa, unknown or other
  misc_feature (437)..(437): Xaa is any aa, unknown or other
  misc_feature (449)..(449): Xaa is any aa, unknown or other
  misc_feature (458)..(458): Xaa is any aa, unknown or other
  misc_feature (468)..(468): Xaa is any aa, unknown or other
  misc_feature (477)..(477): Xaa is any aa, unknown or other
  misc_feature (483)..(483): Xaa is any aa, unknown or other
  misc_feature (484)..(484): Xaa is any aa, unknown or other
  misc_feature (494)..(494): Xaa is any aa, unknown or other
  misc_feature (562)..(562): Xaa is any aa, unknown or other
  misc_feature (573)..(573): Xaa is any aa, unknown or other
  misc_feature (574)..(574): Xaa is any aa, unknown or other
  misc_feature (575)..(575): Xaa is any aa, unknown or other
  misc_feature (589)..(589): Xaa is any aa, unknown or other

SEQ ID NO: 14457 - DNA, 1290 bp, Zea mays subsp. mays
  misc_feature (1)..(1290): Ceres Seq. ID no. 12436652
  misc_feature (1)..(1290): Ortholog of  Ceres SEQ ID NO 15177119 as cited in SEQ ID NO 51196
atcatattcccacctcgcgaacgaggacgaactgctacccccctcgcctcgccctcgccgcctcctctcccgttcccccaccaaccgcagcagcgagagcgagactgagaatggccgcggcgccgtcgtccctcgtgtcctcccatctctctcgcctcgccgacctccgccgcgcggcggcgccggccactcccaccgtcccacagcagcttcgcgtcggctgctcgcgccgccgcgcccagcgcgtcgtcgccatggctggatccggcaagttcttcgtcggaggcaactggaagtgcaacggaacaaaggactccgttagcaagcttgtctctgaactgaatgctgctaccctcgaaactgatgtagatgttgtggtggctcctccattcatctatatcgatcaggtcaagaattcactaacgggtcgcattgaggtttctgctcagaatgtgtggattggaaaaggaggagcctacaccggagagatcagtgcagaacaactggtggacatcggttgtcaatgggttattcttggacactcagagcgtagacatattattggtgaaaatgacgagtttattgggaagaaagctgcatatgcattgagccaaaatgttaaggttattgcctgcataggagagcttctggaagagagggaagcaggcaaaacttttgaagtatgttttgagcagatgaaggcttttgcagatagtatttccaactgggccgatgttgtgattgcatacgagcctgtttgggctattggaaccggaaaagttgctactcctgagcaggcccaggaagttcatgctgctgtacgcgattggttgacgaccaacatatcacctgatgttgcgtctagcacacgaataatctatggaggttctgtgaatgcagccaactgtgcagagctatcaaagaaagaagatatcgacggttttcttgttggtggtgcctcgttgaaggccccggacttcgccaccattatcaactcagtgaccgccaagaaagttgcagcctgatggaccaccctgtgagaaataagaggccatcagcgtgtcgcctcatctgccacgccttaaagcctgtataggaggtgatccgtgtgatggtgtgcccgtcacctcctgtttttgctgatttgcagcacggggacagaaaataatgttttgctctcgtggacctgcactgcacgtgacgaggagagttcagttgtcgtgagcgatgtacgttggggatattgtgatgtggtccttttctaaagaaaaaaaatgttgacggtcaagg

SEQ ID NO: 14458 - protein, 340 aa, Zea mays subsp. mays
  peptide (1)..(340): Ceres Seq. ID no. 12436653
HIPTSRTRTNCYPPRLALAASSPVPPPTAAARARLRMAAAPSSLVSSHLSRLADLRRAAAPATPTVPQQLRVGCSRRRAQRVVAMAGSGKFFVGGNWKCNGTKDSVSKLVSELNAATLETDVDVVVAPPFIYIDQVKNSLTGRIEVSAQNVWIGKGGAYTGEISAEQLVDIGCQWVILGHSERRHIIGENDEFIGKKAAYALSQNVKVIACIGELLEEREAGKTFEVCFEQMKAFADSISNWADVVIAYEPVWAIGTGKVATPEQAQEVHAAVRDWLTTNISPDVASSTRIIYGGSVNAANCAELSKKEDIDGFLVGGASLKAPDFATIINSVTAKKVAA

SEQ ID NO: 14459 - protein, 304 aa, Zea mays subsp. mays
  peptide (1)..(304): Ceres Seq. ID no. 12436654
MAAAPSSLVSSHLSRLADLRRAAAPATPTVPQQLRVGCSRRRAQRVVAMAGSGKFFVGGNWKCNGTKDSVSKLVSELNAATLETDVDVVVAPPFIYIDQVKNSLTGRIEVSAQNVWIGKGGAYTGEISAEQLVDIGCQWVILGHSERRHIIGENDEFIGKKAAYALSQNVKVIACIGELLEEREAGKTFEVCFEQMKAFADSISNWADVVIAYEPVWAIGTGKVATPEQAQEVHAAVRDWLTTNISPDVASSTRIIYGGSVNAANCAELSKKEDIDGFLVGGASLKAPDFATIINSVTAKKVAA

SEQ ID NO: 14460 - protein, 256 aa, Zea mays subsp. mays
  peptide (1)..(256): Ceres Seq. ID no. 12436655
MAGSGKFFVGGNWKCNGTKDSVSKLVSELNAATLETDVDVVVAPPFIYIDQVKNSLTGRIEVSAQNVWIGKGGAYTGEISAEQLVDIGCQWVILGHSERRHIIGENDEFIGKKAAYALSQNVKVIACIGELLEEREAGKTFEVCFEQMKAFADSISNWADVVIAYEPVWAIGTGKVATPEQAQEVHAAVRDWLTTNISPDVASSTRIIYGGSVNAANCAELSKKEDIDGFLVGGASLKAPDFATIINSVTAKKVAA

SEQ ID NO: 14461 - DNA, 691 bp, Zea mays subsp. mays
  misc_feature (1)..(691): Ceres Seq. ID no. 12589525
  misc_feature (1)..(691): Ortholog of  Ceres SEQ ID NO 13597546 as cited in SEQ ID NO 65017
cagctacgtaggccccccccccggggatatttcgaaaggccctgcaagacgttgagatcaaaggctatacgattccggcgggatggggcgtcatggtgtgcccaccggcagtgcacttaaaccccgacatctatgaagaccctctggcgttcaacccgtggagatggcagggcaaacctgaaatcaccggtgggacgaaacacttcatggcgtttggaggtggcctcaggttttgcgttggcactgatcttagcagggtcttgatggcaacattcatccacagcttggttacaaaatacagttggaggacggtaaaaggaggcaacatagtccggacccccggtctcggctttcctgatggcttccacatccaactttttcctagaaattgaaattggcccttttcaaacctctgactaggtcgtgcatgtaattaaattggataggtctcttaggaccaacgccgcaacagtaaaggattggaaatcatatacttagcctagtgttagcctgttagggtagacatcactagttacaagttcagtcatgttactggtactacctctaatctttgcaaggggtttttgtacttggttgtttgttttccatgtggttagtaatctacccatgtgtttgtatgtatatctggttatacatgtctaatgaaagaaaaaatacaggagctgtgctt

SEQ ID NO: 14462 - protein, 99 aa, Zea mays subsp. mays
  peptide (1)..(99): Ceres Seq. ID no. 12589526
MVCPPAVHLNPDIYEDPLAFNPWRWQGKPEITGGTKHFMAFGGGLRFCVGTDLSRVLMATFIHSLVTKYSWRTVKGGNIVRTPGLGFPDGFHIQLFPRN

SEQ ID NO: 14463 - protein, 61 aa, Zea mays subsp. mays
  peptide (1)..(61): Ceres Seq. ID no. 12589527
MAFGGGLRFCVGTDLSRVLMATFIHSLVTKYSWRTVKGGNIVRTPGLGFPDGFHIQLFPRN

SEQ ID NO: 14464 - DNA, 552 bp, Zea mays subsp. mays
  misc_feature (1)..(552): Ceres Seq. ID no. 13622879
  misc_feature (1)..(552): Ortholog of  Ceres SEQ ID NO 14310024 as cited in SEQ ID NO 20634
  misc_feature (1)..(552): Ortholog of  Ceres SEQ ID NO 15177184 as cited in SEQ ID NO 58157
gatcaatgcaggagctcaagcctttgtaaattgttggagtgtgaccttggggagagcaagtgccactccccgagcacaatcatgaagatgttccagagttctatgttctgtttgcagccccagggtgactcctacacaagaagatctgcctttgactcgatgttggctggctgcgtgcctgttttcttccatcccggttcagcgtacgtccagtatacatggcatctcccaaagaactatacaacgtactctgtattcatccctgaagatgacgtccgttctggaaatgccagcattgaggagaggctaaagagtattcacccagatgtggtcaagcaaatgagagaggaggtcatcaatctgataccaaaggtgatatatgctgatccaagatcgaaactggagacattgaaagatgcatttgatgtttccatagaggcgatcattaacaaagtgacaaagttgagaagagatatcatcgcaggccaagaagacaaagattttatcgaagagaatagctggaagtatagtctgttagacgatggacagcgg

SEQ ID NO: 14465 - protein, 184 aa, Zea mays subsp. mays
  peptide (1)..(184): Ceres Seq. ID no. 13622880
DQCRSSSLCKLLECDLGESKCHSPSTIMKMFQSSMFCLQPQGDSYTRRSAFDSMLAGCVPVFFHPGSAYVQYTWHLPKNYTTYSVFIPEDDVRSGNASIEERLKSIHPDVVKQMREEVINLIPKVIYADPRSKLETLKDAFDVSIEAIINKVTKLRRDIIAGQEDKDFIEENSWKYSLLDDGQR

SEQ ID NO: 14466 - protein, 157 aa, Zea mays subsp. mays
  peptide (1)..(157): Ceres Seq. ID no. 13622881
MKMFQSSMFCLQPQGDSYTRRSAFDSMLAGCVPVFFHPGSAYVQYTWHLPKNYTTYSVFIPEDDVRSGNASIEERLKSIHPDVVKQMREEVINLIPKVIYADPRSKLETLKDAFDVSIEAIINKVTKLRRDIIAGQEDKDFIEENSWKYSLLDDGQR

SEQ ID NO: 14467 - protein, 155 aa, Zea mays subsp. mays
  peptide (1)..(155): Ceres Seq. ID no. 13622882
MFQSSMFCLQPQGDSYTRRSAFDSMLAGCVPVFFHPGSAYVQYTWHLPKNYTTYSVFIPEDDVRSGNASIEERLKSIHPDVVKQMREEVINLIPKVIYADPRSKLETLKDAFDVSIEAIINKVTKLRRDIIAGQEDKDFIEENSWKYSLLDDGQR

SEQ ID NO: 14468 - DNA, 479 bp, Zea mays subsp. mays
  misc_feature (1)..(479): Ceres Seq. ID no. 4616752
  misc_feature (1)..(479): Ortholog of  Ceres SEQ ID NO 13582184 as cited in SEQ ID NO 56002
  misc_feature (1)..(479): Ortholog of  Ceres SEQ ID NO 15227042 as cited in SEQ ID NO 0
ttcagaaccctagcgccccgcccgtcctgccgccgccgcagccgccatcgcacggccatgggtatcgatctcgtagccggcggccgcaacaagaagaccaagcgcacggcgcccaagtccgacgatgtctacctcaagctcctcgtcaagctctaccgcttccttgtgcgcaggacaaagagcaacttcaacgccgtgatcctcaagcgcctcttcatgagcaagaccaaccgcccgccgctctcgatgcgccgcctcgtcaggttcatggaggggaagggtgatcagatcgccgtgattgtgggcaccgtgaccgacgacaagaggatcagcgaggtgccggcgatgaaggtctgcgcgctcaggttcactgagacagcgagggccaggatcatcaatgctggcggagagtgcctcaccttcgaccagctcgcgctccgtgccccacttgggcaaaacacggttctgctgaggggtcc

SEQ ID NO: 14469 - protein, 159 aa, Zea mays subsp. mays
  peptide (1)..(159): Ceres Seq. ID no. 4616753
FRTLAPRPSCRRRSRHRTAMGIDLVAGGRNKKTKRTAPKSDDVYLKLLVKLYRFLVRRTKSNFNAVILKRLFMSKTNRPPLSMRRLVRFMEGKGDQIAVIVGTVTDDKRISEVPAMKVCALRFTETARARIINAGGECLTFDQLALRAPLGQNTVLLRG

SEQ ID NO: 14470 - protein, 140 aa, Zea mays subsp. mays
  peptide (1)..(140): Ceres Seq. ID no. 4616754
MGIDLVAGGRNKKTKRTAPKSDDVYLKLLVKLYRFLVRRTKSNFNAVILKRLFMSKTNRPPLSMRRLVRFMEGKGDQIAVIVGTVTDDKRISEVPAMKVCALRFTETARARIINAGGECLTFDQLALRAPLGQNTVLLRG

SEQ ID NO: 14471 - protein, 93 aa, Zea mays subsp. mays
  peptide (1)..(93): Ceres Seq. ID no. 4616755
QNPSAPPVLPPPQPPSHGHGYRSRSRRPQQEDQAHGAQVRRCLPQAPRQALPLPCAQDKEQLQRRDPQAPLHEQDQPPAALDAPPRQVHGGEG

SEQ ID NO: 14472 - DNA, 1187 bp, Zea mays subsp. mays
  misc_feature (1)..(1187): Ceres Seq. ID no. 12436465
  misc_feature (1)..(1187): Ortholog of  Ceres SEQ ID NO 14312266 as cited in SEQ ID NO 59225
  misc_feature (1)..(1187): Ortholog of  Ceres SEQ ID NO 13597620 as cited in SEQ ID NO 65383
ggctggctgcccccgctgctctcctctcctccgagatcccggcaccgtcctgtcccgccgcgccgacagctccccgcctagactgctgcacgcgcggatctcgcgtcgccttccgcccagctgcgatgcatattcgcgccgccgccgccgccgccgccgcacttgtcctcctcctcgcgctctccgtccccgtctccgccgccgaccaggatgctaatggcgctgccgggaatggcactggagtcggcgccgaccgcctggaccgccgcaccaagatgttcctccaccacacggtgcgcgcggccgcggccggggcgcacgacacggggctggggctcctcgacgccttcttcgccagcctgtccatgatcgtcgtcagcgagattggcgatgagacgttcatcatcgcggcgctgatggcgatgcggcaccccaagtcgacggtgctctcgggcgcactgtcggcgcttgtagttatgacggtgctgtctactggactaggcaggattgttccgaatttgatatcgaggaagcacactaacagcgcggcgacagtcctctatgcattttttgggctacggctcctgtacatcgcttggaggtcagattccaaggcatcacagaagaaggaaatagaagaggtagaggaaaagctggaagcaggccaagggaagtcaacatttagacgtgttttctcgagattctgcactcctattttcctggagtcatttgtgttgaccttcttggcggagtggggcgaccgaagtcagatagctacaatagcgctggcgacccacaagaacgcggtcggagtcgctacgggagcgaccttggggcacaccatctgcacgtcgatcgcggtggtgggcggcagcatgctggcctccaagatatctcagggcacggtcgccaccgtcggaggcctcctcttccttgggttctctctttcgtcgtatttctacccgccattgtagtaccaccctgtcatgcgagccccctatttgtttcttggccagcttcctcattgatccagtgacccttgtcctgcggcattttttttcctgtactagtaaagcatacatggatatgtgtagtaggtagggatatatacgatcattgccaatgtataccatacaagtcatgtcatggattcaaaaacagacggaagagctttttgtcncgaattc

SEQ ID NO: 14473 - protein, 323 aa, Zea mays subsp. mays
  peptide (1)..(323): Ceres Seq. ID no. 12436466
LAAPAALLSSEIPAPSCPAAPTAPRLDCCTRGSRVAFRPAAMHIRAAAAAAAALVLLLALSVPVSAADQDANGAAGNGTGVGADRLDRRTKMFLHHTVRAAAAGAHDTGLGLLDAFFASLSMIVVSEIGDETFIIAALMAMRHPKSTVLSGALSALVVMTVLSTGLGRIVPNLISRKHTNSAATVLYAFFGLRLLYIAWRSDSKASQKKEIEEVEEKLEAGQGKSTFRRVFSRFCTPIFLESFVLTFLAEWGDRSQIATIALATHKNAVGVATGATLGHTICTSIAVVGGSMLASKISQGTVATVGGLLFLGFSLSSYFYPPL

SEQ ID NO: 14474 - protein, 282 aa, Zea mays subsp. mays
  peptide (1)..(282): Ceres Seq. ID no. 12436467
MHIRAAAAAAAALVLLLALSVPVSAADQDANGAAGNGTGVGADRLDRRTKMFLHHTVRAAAAGAHDTGLGLLDAFFASLSMIVVSEIGDETFIIAALMAMRHPKSTVLSGALSALVVMTVLSTGLGRIVPNLISRKHTNSAATVLYAFFGLRLLYIAWRSDSKASQKKEIEEVEEKLEAGQGKSTFRRVFSRFCTPIFLESFVLTFLAEWGDRSQIATIALATHKNAVGVATGATLGHTICTSIAVVGGSMLASKISQGTVATVGGLLFLGFSLSSYFYPPL

SEQ ID NO: 14475 - protein, 232 aa, Zea mays subsp. mays
  peptide (1)..(232): Ceres Seq. ID no. 12436468
MFLHHTVRAAAAGAHDTGLGLLDAFFASLSMIVVSEIGDETFIIAALMAMRHPKSTVLSGALSALVVMTVLSTGLGRIVPNLISRKHTNSAATVLYAFFGLRLLYIAWRSDSKASQKKEIEEVEEKLEAGQGKSTFRRVFSRFCTPIFLESFVLTFLAEWGDRSQIATIALATHKNAVGVATGATLGHTICTSIAVVGGSMLASKISQGTVATVGGLLFLGFSLSSYFYPPL

SEQ ID NO: 14476 - DNA, 503 bp, Zea mays subsp. mays
  misc_feature (1)..(503): Ceres Seq. ID no. 3629574
  misc_feature (1)..(503): Ortholog of  Ceres SEQ ID NO 15176588 as cited in SEQ ID NO 60461
aattgatctaattcgccggatcggacagcaacttttggaatctgttgcattcatgcatcgtcttcagctaattcatactgatctgaaaccagagaacatcctcctcgtttcttcagattatgtcaagttacctgatcccaaggacggatcattctcaaggaaactgccaaaatcaagtgccattaaattgattgactttggaagtgcagcataccatcaccaggatcgcagttacattgtatctaccagacactatcgcgcccctgaagttattttgggacatggatggagctatccatgtgatatctggagtgttggttgtatacttgttgagctttgctcgggtgagacactgtttcagactcacgataacttggaacaccttgcaatgatggatagagttctaggtcctcttccacggcacatgctggaaagagccgaccagcatgcggagaagtacckcagaaaaggaggattgaactggccacaagcaataacaacag

SEQ ID NO: 14477 - protein, 167 aa, Zea mays subsp. mays
  peptide (1)..(167): Ceres Seq. ID no. 3629575
  misc_feature (154)..(154): Xaa is any aa, unknown or other
IDLIRRIGQQLLESVAFMHRLQLIHTDLKPENILLVSSDYVKLPDPKDGSFSRKLPKSSAIKLIDFGSAAYHHQDRSYIVSTRHYRAPEVILGHGWSYPCDIWSVGCILVELCSGETLFQTHDNLEHLAMMDRVLGPLPRHMLERADQHAEKYXRKGGLNWPQAITT

SEQ ID NO: 14478 - protein, 150 aa, Zea mays subsp. mays
  peptide (1)..(150): Ceres Seq. ID no. 3629576
  misc_feature (137)..(137): Xaa is any aa, unknown or other
MHRLQLIHTDLKPENILLVSSDYVKLPDPKDGSFSRKLPKSSAIKLIDFGSAAYHHQDRSYIVSTRHYRAPEVILGHGWSYPCDIWSVGCILVELCSGETLFQTHDNLEHLAMMDRVLGPLPRHMLERADQHAEKYXRKGGLNWPQAITT

SEQ ID NO: 14479 - DNA, 341 bp, Zea mays subsp. mays
  misc_feature (1)..(341): Ceres Seq. ID no. 3624239
  misc_feature (1)..(341): Ortholog of  Ceres SEQ ID NO 13582350 as cited in SEQ ID NO 56734
  misc_feature (1)..(341): Ortholog of  Ceres SEQ ID NO 12476493 as cited in SEQ ID NO 58163
tgcgcgccaactactacccgcggtgcccgcagccggacctgacgctgggcctctccgcgcactcggaccccggcgccctcaccgtcctcctcgcggacgagcacgtccgcggcctgcaggtccgccgcgccgccgccgacgactgggtcaccgtgcagcccgtccgcgacgccttcatcgtcaacgtcggcgaccaagtccagatactgagcaactccgtgtacaagagcgtggagcaccgggtggtcgtgaacgccgaggaggagcgcatttccctcgcgctcttctacaaccccaagggcgacgtccccatcrccccggcgccggadctggkggcggct

SEQ ID NO: 14480 - protein, 113 aa, Zea mays subsp. mays
  peptide (1)..(113): Ceres Seq. ID no. 3624240
  misc_feature (105)..(105): Xaa is any aa, unknown or other
  misc_feature (110)..(110): Xaa is any aa, unknown or other
  misc_feature (111)..(111): Xaa is any aa, unknown or other
ARQLLPAVPAAGPDAGPLRALGPRRPHRPPRGRARPRPAGPPRRRRRLGHRAARPRRLHRQRRRPSPDTEQLRVQERGAPGGRERRGGAHFPRALLQPQGRRPHXPGAGXXGG

SEQ ID NO: 14481 - protein, 113 aa, Zea mays subsp. mays
  peptide (1)..(113): Ceres Seq. ID no. 3624241
  misc_feature (105)..(105): Xaa is any aa, unknown or other
  misc_feature (109)..(109): Xaa is any aa, unknown or other
  misc_feature (111)..(111): Xaa is any aa, unknown or other
RANYYPRCPQPDLTLGLSAHSDPGALTVLLADEHVRGLQVRRAAADDWVTVQPVRDAFIVNVGDQVQILSNSVYKSVEHRVVVNAEEERISLALFYNPKGDVPIXPAPXLXAA

SEQ ID NO: 14482 - DNA, 1073 bp, Zea mays subsp. mays; identical to SEQ ID NO: 14423
  misc_feature (1)..(1073): Ceres Seq. ID no. 12595306
  misc_feature (1)..(1073): Ortholog of  Ceres SEQ ID NO 15174082 as cited in SEQ ID NO 61896
  misc_feature (1)..(1073): Ortholog of  Ceres SEQ ID NO 13655598 as cited in SEQ ID NO 64077
  misc_feature (1)..(1073): Ortholog of  Ceres SEQ ID NO 15179351 as cited in SEQ ID NO 0

SEQ ID NO: 14483 - protein, 306 aa, Zea mays subsp. mays; identical to SEQ ID NO: 14424
  peptide (1)..(306): Ceres Seq. ID no. 12595307

SEQ ID NO: 14484 - protein, 272 aa, Zea mays subsp. mays; identical to SEQ ID NO: 14425
  peptide (1)..(272): Ceres Seq. ID no. 12595308

SEQ ID NO: 14485 - protein, 250 aa, Zea mays subsp. mays; identical to SEQ ID NO: 14426
  peptide (1)..(250): Ceres Seq. ID no. 12595309

SEQ ID NO: 14486 - DNA, 572 bp, Zea mays subsp. mays
  misc_feature (1)..(572): Ceres Seq. ID no. 3629591
  misc_feature (1)..(572): Ortholog of  Ceres SEQ ID NO 14308225 as cited in SEQ ID NO 59062
aaaagcaatacagtacttggagagaagagagtgtgagtacgaccagaaaatatccattgatttctacaaggaaggagatcccttgaaaccagctgtgacgggcgtcttartgttcgtttccactccagatccaattggcaacaagtactatcttggccctgctcctctgcaggatatggcaaggcaaattgctacagccaatggccctactggctataatagggattacctgttctcaatggagaaggcattagccagcattagccacgaagatgattcgatcatagagcttgcaaacgaggtgaggaaggtgctcaacagaacaaaggagaccaagatcactggtgccaatgcttccctgaaatcacatgcccctcttgtgcacctgtccgcgcttccagaaggcaccgttgtggactcgagatagcgagagccttggacgttggacctctactcggaatttacttccagctcttgcatgtttgkggccatcatgtactgattttcccttttcaacagttgtcgtgaggsttgkatcttctggagttaaaaaaaatgctaaaagccggcac

SEQ ID NO: 14487 - protein, 141 aa, Zea mays subsp. mays
  peptide (1)..(141): Ceres Seq. ID no. 3629592
  misc_feature (37)..(37): Xaa is any aa, unknown or other
KAIQYLERRECEYDQKISIDFYKEGDPLKPAVTGVLXFVSTPDPIGNKYYLGPAPLQDMARQIATANGPTGYNRDYLFSMEKALASISHEDDSIIELANEVRKVLNRTKETKITGANASLKSHAPLVHLSALPEGTVVDSR

SEQ ID NO: 14488 - protein, 83 aa, Zea mays subsp. mays
  peptide (1)..(83): Ceres Seq. ID no. 3629593
MARQIATANGPTGYNRDYLFSMEKALASISHEDDSIIELANEVRKVLNRTKETKITGANASLKSHAPLVHLSALPEGTVVDSR

SEQ ID NO: 14489 - DNA, 593 bp, Zea mays subsp. mays
  misc_feature (1)..(593): Ceres Seq. ID no. 12420357
  misc_feature (1)..(593): Ortholog of  Ceres SEQ ID NO 14304823 as cited in SEQ ID NO 54902
tttgaatgctaaggatacagaaattgcgaggttgagagaggaaatcagaatattgtctgctcactggacgaacaaaaccaaggaacttgagtcacatttagaaaagcaccggagaactgatcaggagctgaagaagagggttctaaagcttgaattttgccttcaagaatcccagtctcagatgcgaaaattaaagaggatgggcgagagaagagacaaggctctcaaggagctcatggaccaggtggccacgaagcagccaaacagcatgtgccatggcaacaaggagaatttctgggagggccagggcttcaagttcatcgtgtctatgtcgatgctggcactagtgatcctcgcaaagcgatgaagcagcatcgcatacccaatcttgtgtaaagaaggtagagattccatctatcgttaggtgagcaactagctcatagcttaagcagatgtcgatgtagcgtttacattagtttgttgtttgtattcttgggcagctgtgcataatgcatggtcagaagttgcagtctgtaatccgtagtctctgctagggcatgtgaactcagaaggtgtnttgtactcacagctag

SEQ ID NO: 14490 - protein, 121 aa, Zea mays subsp. mays
  peptide (1)..(121): Ceres Seq. ID no. 12420358
LNAKDTEIARLREEIRILSAHWTNKTKELESHLEKHRRTDQELKKRVLKLEFCLQESQSQMRKLKRMGERRDKALKELMDQVATKQPNSMCHGNKENFWEGQGFKFIVSMSMLALVILAKR

SEQ ID NO: 14491 - protein, 61 aa, Zea mays subsp. mays
  peptide (1)..(61): Ceres Seq. ID no. 12420359
MRKLKRMGERRDKALKELMDQVATKQPNSMCHGNKENFWEGQGFKFIVSMSMLALVILAKR

SEQ ID NO: 14492 - DNA, 445 bp, Zea mays subsp. mays
  misc_feature (1)..(445): Ceres Seq. ID no. 12468480
  misc_feature (1)..(445): Ortholog of  Ceres SEQ ID NO 12635657 as cited in SEQ ID NO 0
gaatctatctatggcatgaagtttgctgatgagaacttcaagatcaagcacactggaccaggccttctgtccatggccaatgctgggagagatacaaacggatctcagtttttcatcaccaccgtgacaacaagctggttggacgggaagcatgttgtgtttggcaaggtgttgtctggaatggatgttgtgtacaaggtggaagctgagggccggcagagcgggcaaccaaagagcaaggttgtcatagcagatagcggcgagctgccgatgtgatgagctgaactgatgttctatctggaaggatgttaagaagttgctggtgaccatttgtcgttctggaacttttattagtgcctgaaattggactgaaccagtttcttctgtttgctacagtgactttcttatttacttattagttgaaaaggttttaaaaggttgagtt

SEQ ID NO: 14493 - protein, 91 aa, Zea mays subsp. mays
  peptide (1)..(91): Ceres Seq. ID no. 12468481
ESIYGMKFADENFKIKHTGPGLLSMANAGRDTNGSQFFITTVTTSWLDGKHVVFGKVLSGMDVVYKVEAEGRQSGQPKSKVVIADSGELPM

SEQ ID NO: 14494 - protein, 86 aa, Zea mays subsp. mays
  peptide (1)..(86): Ceres Seq. ID no. 12468482
MKFADENFKIKHTGPGLLSMANAGRDTNGSQFFITTVTTSWLDGKHVVFGKVLSGMDVVYKVEAEGRQSGQPKSKVVIADSGELPM

SEQ ID NO: 14495 - protein, 67 aa, Zea mays subsp. mays
  peptide (1)..(67): Ceres Seq. ID no. 12468483
MANAGRDTNGSQFFITTVTTSWLDGKHVVFGKVLSGMDVVYKVEAEGRQSGQPKSKVVIADSGELPM

SEQ ID NO: 14496 - DNA, 1017 bp, Zea mays subsp. mays
  misc_feature (1)..(1017): Ceres Seq. ID no. 12567193
  misc_feature (1)..(1017): Ortholog of  Ceres SEQ ID NO 12593115 as cited in SEQ ID NO 62826
gaggcctttaaatgccggcacagatgttggccggagcaggacgccacgaggcgaacaaccaactgcttccttccgcgccgccgccgcctacaacgaccacatcacgtgacttacctcttctccgcctcaagtgttcacggctccatcctctctagagtctaagcccatctcgcgaagccgctaacgccgaaaacgaccctacatatggaggcgaagaagtcgggtcccgccgctgccggagccgcggcgccgccgccggctaacgggtacttcagcaccgtcttctccgcgtcgcctgcggggagcgcaaatgacgcaaagcaggccgacctgtacacgatgctgaacaagcagacctccagagggcagaatggcagtggcattacagatggcaaatcacacggccgccctacttacaaggatggaaaacatgcttatccaaatgactcgtcagaatccccttactttggctcgtccgtgcattacggtggtcgggaattctacagcaacacgttacagaagcagccagccaatgaaccccagacaaaatacaaggaggacaagccggatggctctgctactagaggtgattggtggcaaggttcactttattactgaacaatctgctgggaactctccttttttttgtgaacaaggaataaaaaggagtggagctgagcttggtttgtcataatagtgttggaactgttgatgcgagccgttaggcatatggatcgaaagtaatagatgtaatccggtcggtggaggcagtatttagatgcatcatcacacctggacagacgtggatgtaggctgcgtccttttgtgttcctgttttcgctaagtgtgttcttgtggttttagatgtgcagtcgtgcagtgctgaacttactaatgaactggtaggtcagcctgaagtagttttgataaaagcagttgccaaagagtctgcagctcgcaggatcacctgctatatgtgcatgttcctgctatctttcggaaagatttgggttgtgc

SEQ ID NO: 14497 - protein, 137 aa, Zea mays subsp. mays
  peptide (1)..(137): Ceres Seq. ID no. 12567194
MEAKKSGPAAAGAAAPPPANGYFSTVFSASPAGSANDAKQADLYTMLNKQTSRGQNGSGITDGKSHGRPTYKDGKHAYPNDSSESPYFGSSVHYGGREFYSNTLQKQPANEPQTKYKEDKPDGSATRGDWWQGSLYY

SEQ ID NO: 14498 - protein, 107 aa, Zea mays subsp. mays
  peptide (1)..(107): Ceres Seq. ID no. 12567195
MAVALQMANHTAALLTRMENMLIQMTRQNPLTLARPCITVVGNSTATRYRSSQPMNPRQNTRRTSRMALLLEVIGGKVHFITEQSAGNSPFFCEQGIKRSGAELGLS

SEQ ID NO: 14499 - protein, 101 aa, Zea mays subsp. mays
  peptide (1)..(101): Ceres Seq. ID no. 12567196
MANHTAALLTRMENMLIQMTRQNPLTLARPCITVVGNSTATRYRSSQPMNPRQNTRRTSRMALLLEVIGGKVHFITEQSAGNSPFFCEQGIKRSGAELGLS

SEQ ID NO: 14500 - DNA, 520 bp, Zea mays subsp. mays
  misc_feature (1)..(520): Ceres Seq. ID no. 3624558
  misc_feature (1)..(520): Ortholog of  Ceres SEQ ID NO 13493536 as cited in SEQ ID NO 58515
  misc_feature (1)..(520): Ortholog of  Ceres SEQ ID NO 15225741 as cited in SEQ ID NO 59606
  misc_feature (1)..(520): Ortholog of  Ceres SEQ ID NO 12618461 as cited in SEQ ID NO 64349
gaacttctcacgttcatttctacacatccctagctctgtcgttccgtcgttgacgatggcgtttcgggtgcgaagccctgacctccgctctctctttcttctctctctcttgtccatcgcttccgccaatgtcttcttcgaagagcgtttcgatgacgggtgggaaaatcgatgggttaaatcagattggaaaaaagatgagaacgtggctggggagtggaaccacacctctggtcaatggaatggagacgctaatgacaaaggtattcaaaccagtgaggattacagattctatgctatttcagctgagtaccctgaattcggcaacaagggtaagacactagtctttcaattttctgttaagcacgaacagaagcttgactgtggtggtggctacatgaagttgctcagtggggatgttgatcagaagaaatttggcggggatactccttacagtattatgtttggcccagatatctgcggttacagtaccaagaaagttcacgctattcttacctac

SEQ ID NO: 14501 - protein, 173 aa, Zea mays subsp. mays
  peptide (1)..(173): Ceres Seq. ID no. 3624559
NFSRSFLHIPSSVVPSLTMAFRVRSPDLRSLFLLSLLSIASANVFFEERFDDGWENRWVKSDWKKDENVAGEWNHTSGQWNGDANDKGIQTSEDYRFYAISAEYPEFGNKGKTLVFQFSVKHEQKLDCGGGYMKLLSGDVDQKKFGGDTPYSIMFGPDICGYSTKKVHAILTY

SEQ ID NO: 14502 - protein, 155 aa, Zea mays subsp. mays
  peptide (1)..(155): Ceres Seq. ID no. 3624560
MAFRVRSPDLRSLFLLSLLSIASANVFFEERFDDGWENRWVKSDWKKDENVAGEWNHTSGQWNGDANDKGIQTSEDYRFYAISAEYPEFGNKGKTLVFQFSVKHEQKLDCGGGYMKLLSGDVDQKKFGGDTPYSIMFGPDICGYSTKKVHAILTY

SEQ ID NO: 14503 - DNA, 618 bp, Zea mays subsp. mays
  misc_feature (1)..(618): Ceres Seq. ID no. 12468438
  misc_feature (1)..(618): Ortholog of  Ceres SEQ ID NO 12364737 as cited in SEQ ID NO 51089
gcgcgccacggcggcggcgaccccgtgttcgtcggcgtcaacatgcagcgcatccacaacgacttcatcgacgaccccaaggcgtacggcttccagaccgccaccgacgcgtgctgcggccagggccgcttcaacggcatggggctctgcaccatggtgtccagcctctgcgccgaccgcgacacctacgtgttctgggacgccttccaccccacggagcgcgccaaccgcctcatcgtgcagcagttcatgtccggctccaccgactacatcatgcccatgaacctcagcaccgtcctcgccgtcgacctccagaagcagcagctgcgtacgtgacgtgatgtcgtcatccgcttcatcagctgcctgatcagcttcgtgcgtcgccattgccacatcgtcagatcagtttcgtatgcgtgtgtagtgagagtacctagctagtgcatcatgtgccatcagtttccggatgtggttttctgcagggtttcgttcgttcgttcgtgtgtgtgctgcagtgcaggtgtttaattgtgtgatagtgacgaccgtatcctgtcaattgtcatatagcaggacagcttcttgtaataatttatataaattttcaggcgattc

SEQ ID NO: 14504 - protein, 112 aa, Zea mays subsp. mays
  peptide (1)..(112): Ceres Seq. ID no. 12468439
APRRRRPRVRRRQHAAHPQRLHRRPQGVRLPDRHRRVLRPGPLQRHGALHHGVQPLRRPRHLRVLGRLPPHGARQPPHRAAVHVRLHRLHHAHEPQHRPRRRPPEAAAAYVT

SEQ ID NO: 14505 - protein, 111 aa, Zea mays subsp. mays
  peptide (1)..(111): Ceres Seq. ID no. 12468440
ARHGGGDPVFVGVNMQRIHNDFIDDPKAYGFQTATDACCGQGRFNGMGLCTMVSSLCADRDTYVFWDAFHPTERANRLIVQQFMSGSTDYIMPMNLSTVLAVDLQKQQLRT

SEQ ID NO: 14506 - protein, 97 aa, Zea mays subsp. mays
  peptide (1)..(97): Ceres Seq. ID no. 12468441
MQRIHNDFIDDPKAYGFQTATDACCGQGRFNGMGLCTMVSSLCADRDTYVFWDAFHPTERANRLIVQQFMSGSTDYIMPMNLSTVLAVDLQKQQLRT

SEQ ID NO: 14507 - DNA, 976 bp, Zea mays subsp. mays
  misc_feature (1)..(976): Ceres Seq. ID no. 12578960
  misc_feature (1)..(976): Ortholog of  Ceres SEQ ID NO 14307843 as cited in SEQ ID NO 20508
  misc_feature (1)..(976): Ortholog of  Ceres SEQ ID NO 15170811 as cited in SEQ ID NO 52649
  misc_feature (1)..(976): Ortholog of  Ceres SEQ ID NO 13638331 as cited in SEQ ID NO 58047
acatggacgtcgacaaggtcagcttcaccgggtccacggaggtcggccgcctcgtcatgagggccgcggccgagagcaacctcaagcccgtgtcgctcgagctgggcggcaagtctcccgtcatcgtcttcgacgacgccgacctcgacatggccgttaacctcgtcaacttcgccacctacaccaacaagggcgagatctgtgtggccggcacgcgcatctacgtgcaggaagggatctacgacgagttcgtgaagaaggccgccgagctcgccagcaagtccgtggtcggagacccgttcaacccgagtgtcagccaaggcccccaggttgacaaggaccagtacgagaaggtcctcaggtacattgacatcgggaagcgcgaaggcgccacgctggtcaccggagggaagccctgcggcgacaataagggctactacatcgagcccaccatcttcacggacgtcaaggacgacatgacgatcgcacaggatgaaatctttgggccggtgatggctctcatgaaattcaagaccgtggaggaggtgatccagaaagcgaacaacacccggtacggcctggccgccggcatcgtgaccaagaacatcgacgtcgccaacaccgtgtcgcggtccatccgcgccggcgccatttggatcaactgctacttcgcgttcgacccggacgcgccgttcggcgggtacaagatgagcgggttcggcaaggacatgggcatggacgcgctcgacaagtacctgcagaccaagaccgtcgtcactccgctgtacaacactccatggctctgaccgacctcatcctgtccgatgaacagttcaacatcacaaacaagaagaaacatgtcttgtaagatactcctccaaaggatcggttgcctgtacctgtactcttacacctgcatggattgatgatgcagtgcaatgtagcattcagaacaataaagacatgtttcggactg

SEQ ID NO: 14508 - protein, 267 aa, Zea mays subsp. mays
  peptide (1)..(267): Ceres Seq. ID no. 12578961
MDVDKVSFTGSTEVGRLVMRAAAESNLKPVSLELGGKSPVIVFDDADLDMAVNLVNFATYTNKGEICVAGTRIYVQEGIYDEFVKKAAELASKSVVGDPFNPSVSQGPQVDKDQYEKVLRYIDIGKREGATLVTGGKPCGDNKGYYIEPTIFTDVKDDMTIAQDEIFGPVMALMKFKTVEEVIQKANNTRYGLAAGIVTKNIDVANTVSRSIRAGAIWINCYFAFDPDAPFGGYKMSGFGKDMGMDALDKYLQTKTVVTPLYNTPWL

SEQ ID NO: 14509 - protein, 249 aa, Zea mays subsp. mays
  peptide (1)..(249): Ceres Seq. ID no. 12578962
MRAAAESNLKPVSLELGGKSPVIVFDDADLDMAVNLVNFATYTNKGEICVAGTRIYVQEGIYDEFVKKAAELASKSVVGDPFNPSVSQGPQVDKDQYEKVLRYIDIGKREGATLVTGGKPCGDNKGYYIEPTIFTDVKDDMTIAQDEIFGPVMALMKFKTVEEVIQKANNTRYGLAAGIVTKNIDVANTVSRSIRAGAIWINCYFAFDPDAPFGGYKMSGFGKDMGMDALDKYLQTKTVVTPLYNTPWL

SEQ ID NO: 14510 - protein, 218 aa, Zea mays subsp. mays
  peptide (1)..(218): Ceres Seq. ID no. 12578963
MAVNLVNFATYTNKGEICVAGTRIYVQEGIYDEFVKKAAELASKSVVGDPFNPSVSQGPQVDKDQYEKVLRYIDIGKREGATLVTGGKPCGDNKGYYIEPTIFTDVKDDMTIAQDEIFGPVMALMKFKTVEEVIQKANNTRYGLAAGIVTKNIDVANTVSRSIRAGAIWINCYFAFDPDAPFGGYKMSGFGKDMGMDALDKYLQTKTVVTPLYNTPWL

SEQ ID NO: 14511 - DNA, 1571 bp, Zea mays subsp. mays
  misc_feature (1)..(1571): Ceres Seq. ID no. 13586780
  misc_feature (1)..(1571): Ortholog of  Ceres SEQ ID NO 15170897 as cited in SEQ ID NO 59468
tctgcaccccggactacatcacgccggagatgccgcaggtggccaacgagttcgacgacgacgataaggagaacatcccctgcccaaaatctccggagaagtcagcgaaccctcgtagcaagcggtacagaaccgattgttctcccaaagctcgggaggttacggacttctctttcgaccatcagattacgccggttctgtttgacagcttgactcgagatgattcggaagaagagcagccgaagcagcctgcgctggaaaagaggggtggttatgtctcccagtcagcagtggctctgcgttgccgggtgatgcctccgccatgcgtcaagaatccatacctcaataccgatccatgcatagatgctgctgtttacggtgggaggcagtgcaactcagcagtattctctccttcaattggtggtaatggtctttcacgctatcgaactgatttccatgaaatagagaaaattggttatggcaacttcagtgttgtgttcaaagttctgaataggatagacgggtgcttgtatgctgttaaacggagcatcaagcaattgcataatgatatggaaaggaggcaagcagtgaaagaagtccaagctatggcagccttaggttctcacgagaacatagttcgatatttcacctcttggtttgagaatgagcaactttatattcagatggaactctgcgaccgctgtctatctatgaatcggaaccagccagtgaagcgtggggaagccctggaactgttgtatcagatctgcaaaggcttggatttcatgcacgaacgtggcatagcacaccttgatgtgaagcctgataatatatatgtcagaaatggtatttataagctcggggattttggctgtgctacacttgttaaccggagtctagcaattgaagatggagattcacgctatatgcctccggaaatgctgaatgataagtatgagcatctcgacaaggttgatatcttttctcttggggcagccgtctatgagctaataagaggcaccccgcttcccgagtctggatctcactttacaagcattagagagggtaagatcgcattgcttccagggtgcccgatgcagtttcaaagcttaatcaagtctatgatggaccctgatccggtgaggcggccttcagcaaaggagatcctgagacacccttcctttgacaagctccacaaggcctcatcgaagtagaagtgctgccgcgcccccatcagatcagagcagccggcaaagggaattccgcagctgcgtcacattcaccgtcagctgctcccaatttttggtgtatctatctatctctatgcgtgtgccatgtgccctgttctgatactgtagaagatggctggaaacgaagcagggatctgattttaattccaggaactggagcacgagcagcgtctgtaaaggactaaaggctgtggctgctgttgtgttaaggttgtgcctctcttttggtttctgatgcacgcttggaaccatcaaccctgtgcctttttttggggtgcttgttatcagttgcatttgggcagcgaatgctaatttggatcc

SEQ ID NO: 14512 - protein, 403 aa, Zea mays subsp. mays
  peptide (1)..(403): Ceres Seq. ID no. 13586781
CTPDYITPEMPQVANEFDDDDKENIPCPKSPEKSANPRSKRYRTDCSPKAREVTDFSFDHQITPVLFDSLTRDDSEEEQPKQPALEKRGGYVSQSAVALRCRVMPPPCVKNPYLNTDPCIDAAVYGGRQCNSAVFSPSIGGNGLSRYRTDFHEIEKIGYGNFSVVFKVLNRIDGCLYAVKRSIKQLHNDMERRQAVKEVQAMAALGSHENIVRYFTSWFENEQLYIQMELCDRCLSMNRNQPVKRGEALELLYQICKGLDFMHERGIAHLDVKPDNIYVRNGIYKLGDFGCATLVNRSLAIEDGDSRYMPPEMLNDKYEHLDKVDIFSLGAAVYELIRGTPLPESGSHFTSIREGKIALLPGCPMQFQSLIKSMMDPDPVRRPSAKEILRHPSFDKLHKASSK

SEQ ID NO: 14513 - protein, 394 aa, Zea mays subsp. mays
  peptide (1)..(394): Ceres Seq. ID no. 13586782
MPQVANEFDDDDKENIPCPKSPEKSANPRSKRYRTDCSPKAREVTDFSFDHQITPVLFDSLTRDDSEEEQPKQPALEKRGGYVSQSAVALRCRVMPPPCVKNPYLNTDPCIDAAVYGGRQCNSAVFSPSIGGNGLSRYRTDFHEIEKIGYGNFSVVFKVLNRIDGCLYAVKRSIKQLHNDMERRQAVKEVQAMAALGSHENIVRYFTSWFENEQLYIQMELCDRCLSMNRNQPVKRGEALELLYQICKGLDFMHERGIAHLDVKPDNIYVRNGIYKLGDFGCATLVNRSLAIEDGDSRYMPPEMLNDKYEHLDKVDIFSLGAAVYELIRGTPLPESGSHFTSIREGKIALLPGCPMQFQSLIKSMMDPDPVRRPSAKEILRHPSFDKLHKASSK

SEQ ID NO: 14514 - protein, 300 aa, Zea mays subsp. mays
  peptide (1)..(300): Ceres Seq. ID no. 13586783
MPPPCVKNPYLNTDPCIDAAVYGGRQCNSAVFSPSIGGNGLSRYRTDFHEIEKIGYGNFSVVFKVLNRIDGCLYAVKRSIKQLHNDMERRQAVKEVQAMAALGSHENIVRYFTSWFENEQLYIQMELCDRCLSMNRNQPVKRGEALELLYQICKGLDFMHERGIAHLDVKPDNIYVRNGIYKLGDFGCATLVNRSLAIEDGDSRYMPPEMLNDKYEHLDKVDIFSLGAAVYELIRGTPLPESGSHFTSIREGKIALLPGCPMQFQSLIKSMMDPDPVRRPSAKEILRHPSFDKLHKASSK

SEQ ID NO: 14515 - DNA, 530 bp, Zea mays subsp. mays
  misc_feature (1)..(530): Ceres Seq. ID no. 3629587
  misc_feature (1)..(530): Ortholog of  Ceres SEQ ID NO 12465083 as cited in SEQ ID NO 68239
ttggcgaattccagcttgaaggcattccaccagccccaagaggcatgccccagatcgaggttacctttgacattgatgccaatggcattgtaaaggtgtcagctagggacaaagccacaggcaaagaacaagaaatcaccatcaagtcttytggtggtttgtcagaggtcgaaattgakaagatggtgaaggaggcaragctacattctcagaaggaccaggaaaggaagtctcttattgatctcaagaactctgcasataccacgatctacagcattgasaagagtgtcagcgagtacaaggacaaggtccctgctgaagtcaccaaggagatcgagtctgctgtctctgatctgagggcagctatggctgaggatgatctggacaagatcaagcagaagctggaagcagcaaacaaggctgtttcaaagatcggagarcacatgcmacaaggtggtggtggcggcsgcagcscttgtggcagcagcagtggaggaraccagactccagaagctgagtaccagggacgc

SEQ ID NO: 14516 - protein, 176 aa, Zea mays subsp. mays
  peptide (1)..(176): Ceres Seq. ID no. 3629588
  misc_feature (50)..(50): Xaa is any aa, unknown or other
  misc_feature (59)..(59): Xaa is any aa, unknown or other
  misc_feature (66)..(66): Xaa is any aa, unknown or other
  misc_feature (86)..(86): Xaa is any aa, unknown or other
  misc_feature (93)..(93): Xaa is any aa, unknown or other
  misc_feature (146)..(146): Xaa is any aa, unknown or other
  misc_feature (149)..(149): Xaa is any aa, unknown or other
  misc_feature (156)..(156): Xaa is any aa, unknown or other
  misc_feature (158)..(158): Xaa is any aa, unknown or other
  misc_feature (166)..(166): Xaa is any aa, unknown or other
GEFQLEGIPPAPRGMPQIEVTFDIDANGIVKVSARDKATGKEQEITIKSXGGLSEVEIXKMVKEAXLHSQKDQERKSLIDLKNSAXTTIYSIXKSVSEYKDKVPAEVTKEIESAVSDLRAAMAEDDLDKIKQKLEAANKAVSKIGXHMXQGGGGGXSXCGSSSGGXQTPEAEYQGR

SEQ ID NO: 14517 - protein, 162 aa, Zea mays subsp. mays
  peptide (1)..(162): Ceres Seq. ID no. 3629589
  misc_feature (36)..(36): Xaa is any aa, unknown or other
  misc_feature (45)..(45): Xaa is any aa, unknown or other
  misc_feature (52)..(52): Xaa is any aa, unknown or other
  misc_feature (72)..(72): Xaa is any aa, unknown or other
  misc_feature (79)..(79): Xaa is any aa, unknown or other
  misc_feature (132)..(132): Xaa is any aa, unknown or other
  misc_feature (135)..(135): Xaa is any aa, unknown or other
  misc_feature (142)..(142): Xaa is any aa, unknown or other
  misc_feature (144)..(144): Xaa is any aa, unknown or other
  misc_feature (152)..(152): Xaa is any aa, unknown or other
MPQIEVTFDIDANGIVKVSARDKATGKEQEITIKSXGGLSEVEIXKMVKEAXLHSQKDQERKSLIDLKNSAXTTIYSIXKSVSEYKDKVPAEVTKEIESAVSDLRAAMAEDDLDKIKQKLEAANKAVSKIGXHMXQGGGGGXSXCGSSSGGXQTPEAEYQGR

SEQ ID NO: 14518 - protein, 116 aa, Zea mays subsp. mays
  peptide (1)..(116): Ceres Seq. ID no. 3629590
  misc_feature (6)..(6): Xaa is any aa, unknown or other
  misc_feature (26)..(26): Xaa is any aa, unknown or other
  misc_feature (33)..(33): Xaa is any aa, unknown or other
  misc_feature (86)..(86): Xaa is any aa, unknown or other
  misc_feature (89)..(89): Xaa is any aa, unknown or other
  misc_feature (96)..(96): Xaa is any aa, unknown or other
  misc_feature (98)..(98): Xaa is any aa, unknown or other
  misc_feature (106)..(106): Xaa is any aa, unknown or other
MVKEAXLHSQKDQERKSLIDLKNSAXTTIYSIXKSVSEYKDKVPAEVTKEIESAVSDLRAAMAEDDLDKIKQKLEAANKAVSKIGXHMXQGGGGGXSXCGSSSGGXQTPEAEYQGR

SEQ ID NO: 14519 - DNA, 661 bp, Zea mays subsp. mays
  misc_feature (1)..(661): Ceres Seq. ID no. 12468926
  misc_feature (1)..(661): Ortholog of  Ceres SEQ ID NO 13590780 as cited in SEQ ID NO 68149
tgacttattctgctgaggatgaagcaaaaatcgaaaggcctgtgatgatacacagggcaatcctaggttctgttgaaaggatgtttgccattcttttggagcattacaatggcaaatggcccttatggctaagccctcgccaggccattgtttgttcagtatcttctggttcagtggaatatgcgaaacaggttcttgccatgctacatgaagctgatttccatgttgatattgatgtgagtgacaggacaatacaaaagaaggtacgggaagcccaggtagctcaattcaactacattcttgtcgtaggcgcacaggaggccgagactggaaatgtctgcgttagggtaagagataatgccgacctggccacaatgagcgttgatggcctcatcacacgtttgagggaggaaatcgtagccttcaaatgattttgatgctgcataatttcctagcacttcgcaatcattgactgttcatttgtgattttgattgagttttcagggaacagtactgagttcctccaaggctccaagtgtattcttgttggtacggttggaagctactaagggcatttanaagcacctagtttttaataaactggtttataaaaattgagatggttccaaacatatcggtttatattatggatttntagttt

SEQ ID NO: 14520 - protein, 142 aa, Zea mays subsp. mays
  peptide (1)..(142): Ceres Seq. ID no. 12468927
TYSAEDEAKIERPVMIHRAILGSVERMFAILLEHYNGKWPLWLSPRQAIVCSVSSGSVEYAKQVLAMLHEADFHVDIDVSDRTIQKKVREAQVAQFNYILVVGAQEAETGNVCVRVRDNADLATMSVDGLITRLREEIVAFK

SEQ ID NO: 14521 - protein, 128 aa, Zea mays subsp. mays
  peptide (1)..(128): Ceres Seq. ID no. 12468928
MIHRAILGSVERMFAILLEHYNGKWPLWLSPRQAIVCSVSSGSVEYAKQVLAMLHEADFHVDIDVSDRTIQKKVREAQVAQFNYILVVGAQEAETGNVCVRVRDNADLATMSVDGLITRLREEIVAFK

SEQ ID NO: 14522 - protein, 116 aa, Zea mays subsp. mays
  peptide (1)..(116): Ceres Seq. ID no. 12468929
MFAILLEHYNGKWPLWLSPRQAIVCSVSSGSVEYAKQVLAMLHEADFHVDIDVSDRTIQKKVREAQVAQFNYILVVGAQEAETGNVCVRVRDNADLATMSVDGLITRLREEIVAFK

SEQ ID NO: 14523 - DNA, 491 bp, Zea mays subsp. mays
  misc_feature (1)..(491): Ceres Seq. ID no. 12468404
  misc_feature (1)..(491): Ortholog of  Ceres SEQ ID NO 14306100 as cited in SEQ ID NO 0
cgtcacgggcggctacaacggcaagtgggtgtgggccgagcaggaggtgctgccggccgactggcgccccggccaggtctacgacaccggcgtccgcatcgtcgacgtcgcccgggacgcatcccgcggctgcaccgccgccgccatggacgactggaagtgaagtgaggatatggctgggtagattaaaaatacgtatgaatacatactaacacgtcgccacatcggtgctgcgacactctggtaagaagaggacagcatgcaatggctccaagaacagcatcccccccaagcgcgtccggctgtccagaggagaggaggaagaagattggagtagctagcagctagggtgtaattgtgtatgcaggatcttctatcaaggtcgatccgattagatgcaggcaaaaaaaaaagagctgggatccagtcgacagttctaatgggtcatggcgtcatgccatcctggctgtaccacaaactcgactaaaagc

SEQ ID NO: 14524 - protein, 69 aa, Zea mays subsp. mays
  peptide (1)..(69): Ceres Seq. ID no. 12468405
SRAATTASGCGPSRRCCRPTGAPARSTTPASASSTSPGTHPAAAPPPPWTTGSEVRIWLGRLKIRMNTY

SEQ ID NO: 14525 - protein, 55 aa, Zea mays subsp. mays
  peptide (1)..(55): Ceres Seq. ID no. 12468406
RHGRLQRQVGVGRAGGAAGRLAPRPGLRHRRPHRRRRPGRIPRLHRRRHGRLEVK

SEQ ID NO: 14526 - protein, 53 aa, Zea mays subsp. mays
  peptide (1)..(53): Ceres Seq. ID no. 12468407
VTGGYNGKWVWAEQEVLPADWRPGQVYDTGVRIVDVARDASRGCTAAAMDDWK

SEQ ID NO: 14527 - DNA, 474 bp, Zea mays subsp. mays
  misc_feature (1)..(474): Ceres Seq. ID no. 15180595
  misc_feature (1)..(474): Ortholog of  Ceres SEQ ID NO 14303680 as cited in SEQ ID NO 66019
gtgtggtctcgcccctgaggttcctgatcgcaccatctccctccggcgacagtccgccgccccgccccgcgcgctcgacgaggccgctccgggtggtgaagagggtgctgctgcagtgtctcccctctcgctatgagtagtgctgtgaaggaccagctacagcagatgtcgacgacgtgcgattctctcctgttggagctcaacgtgatttgggatgaggtcggtgagcccgacatggcgagggaccggatgctgctggagctcgagcaggagtgcctcgacgtctacaagagaaaggtcgaccaggccaatcgatgcagggcccagttgcggcaggccattgcggaggcagaggccgagctcgctggcatatgctcggccatgggcgagccaccgatacatgttagacagtcaaatcagaagttacaaggtttaagggaagtattgaatgcgattgtcccatacttggaggag

SEQ ID NO: 14528 - protein, 114 aa, Zea mays subsp. mays
  peptide (1)..(114): Ceres Seq. ID no. 15180596
MSSAVKDQLQQMSTTCDSLLLELNVIWDEVGEPDMARDRMLLELEQECLDVYKRKVDQANRCRAQLRQAIAEAEAELAGICSAMGEPPIHVRQSNQKLQGLREVLNAIVPYLEE

SEQ ID NO: 14529 - protein, 103 aa, Zea mays subsp. mays
  peptide (1)..(103): Ceres Seq. ID no. 15180597
MSTTCDSLLLELNVIWDEVGEPDMARDRMLLELEQECLDVYKRKVDQANRCRAQLRQAIAEAEAELAGICSAMGEPPIHVRQSNQKLQGLREVLNAIVPYLEE

SEQ ID NO: 14530 - protein, 80 aa, Zea mays subsp. mays
  peptide (1)..(80): Ceres Seq. ID no. 15180598
MARDRMLLELEQECLDVYKRKVDQANRCRAQLRQAIAEAEAELAGICSAMGEPPIHVRQSNQKLQGLREVLNAIVPYLEE

SEQ ID NO: 14531 - DNA, 362 bp, Zea mays subsp. mays
  misc_feature (1)..(362): Ceres Seq. ID no. 3624729
  misc_feature (1)..(362): Ortholog of  Ceres SEQ ID NO 13655375 as cited in SEQ ID NO 63347
ttttctcgtgatcgggargacgtctcctgtaacctaccaagtccttggccatctgaaaacatgcttggtcctcacctttggctatgtcctgcttcacgacccgtttagctggagaaacatacttgggatcctaatcgcggtaatcgggatggttctgtactcgtacttctgcactagagagactcagcaaaaaccagcagaagcctccccgcaagccgttcaggcaaaggagggtgaatcgaacccgctgatctcggactccctgagcgctgccgaaaatggaggcagtgccaccgacgatgaacctctgaaggtaccaatgtggagctcgaagtactcgaaggcgtgaagtggctgttctg

SEQ ID NO: 14532 - protein, 115 aa, Zea mays subsp. mays
  peptide (1)..(115): Ceres Seq. ID no. 3624730
  misc_feature (6)..(6): Xaa is any aa, unknown or other
FLVIGXTSPVTYQVLGHLKTCLVLTFGYVLLHDPFSWRNILGILIAVIGMVLYSYFCTRETQQKPAEASPQAVQAKEGESNPLISDSLSAAENGGSATDDEPLKVPMWSSKYSKA

SEQ ID NO: 14533 - protein, 66 aa, Zea mays subsp. mays
  peptide (1)..(66): Ceres Seq. ID no. 3624731
MVLYSYFCTRETQQKPAEASPQAVQAKEGESNPLISDSLSAAENGGSATDDEPLKVPMWSSKYSKA

SEQ ID NO: 14534 - DNA, 561 bp, Zea mays subsp. mays
  misc_feature (1)..(561): Ceres Seq. ID no. 4576519
  misc_feature (1)..(561): Ortholog of  Ceres SEQ ID NO 13595870 as cited in SEQ ID NO 62101
  misc_feature (1)..(561): Ortholog of  Ceres SEQ ID NO 13590241 as cited in SEQ ID NO 63878
  misc_feature (1)..(561): Ortholog of  Ceres SEQ ID NO 13657939 as cited in SEQ ID NO 66349
ttcaagagcttgtagaggcaattgtactgcccatgacacataaagaccggttccagaagttgggtattcgtcctccaaaaggggttcttttgtacggaccaccaggaactggcaagacactcatggctcgtgcatgtgctgcacagacgaatgcaacgtttcttaaattagctggtccacaacttgtgcagatgtttattggtgatggagcaaagcttgtccgggatgcattccagcttgccaaagagaaagctccttgtattatatttattgatgagatagatgccattggcaccaaacgttttgatagtgaagttagcggtgatagagaagttcagcggacaatgttggaattattgaatcaactggatggattcagcagcgatgagagaataaaggtcatagctgcaactaaccgtgctgacatccttgaccctgctctgatgcgatctggacggttggaccgaaagattgagttccctcacccatccgaagaagcaagagctagaatcttgcaaatccattcaaggaaaatgaatgtaaatcctgatgtcaactttg

SEQ ID NO: 14535 - protein, 186 aa, Zea mays subsp. mays
  peptide (1)..(186): Ceres Seq. ID no. 4576520
QELVEAIVLPMTHKDRFQKLGIRPPKGVLLYGPPGTGKTLMARACAAQTNATFLKLAGPQLVQMFIGDGAKLVRDAFQLAKEKAPCIIFIDEIDAIGTKRFDSEVSGDREVQRTMLELLNQLDGFSSDERIKVIAATNRADILDPALMRSGRLDRKIEFPHPSEEARARILQIHSRKMNVNPDVNF

SEQ ID NO: 14536 - protein, 176 aa, Zea mays subsp. mays
  peptide (1)..(176): Ceres Seq. ID no. 4576521
MTHKDRFQKLGIRPPKGVLLYGPPGTGKTLMARACAAQTNATFLKLAGPQLVQMFIGDGAKLVRDAFQLAKEKAPCIIFIDEIDAIGTKRFDSEVSGDREVQRTMLELLNQLDGFSSDERIKVIAATNRADILDPALMRSGRLDRKIEFPHPSEEARARILQIHSRKMNVNPDVNF

SEQ ID NO: 14537 - protein, 146 aa, Zea mays subsp. mays
  peptide (1)..(146): Ceres Seq. ID no. 4576522
MARACAAQTNATFLKLAGPQLVQMFIGDGAKLVRDAFQLAKEKAPCIIFIDEIDAIGTKRFDSEVSGDREVQRTMLELLNQLDGFSSDERIKVIAATNRADILDPALMRSGRLDRKIEFPHPSEEARARILQIHSRKMNVNPDVNF

SEQ ID NO: 14538 - DNA, 885 bp, Zea mays subsp. mays
  misc_feature (1)..(885): Ceres Seq. ID no. 12468373
  misc_feature (1)..(885): Ortholog of  Ceres SEQ ID NO 13493536 as cited in SEQ ID NO 58515
  misc_feature (1)..(885): Ortholog of  Ceres SEQ ID NO 15225741 as cited in SEQ ID NO 59606
  misc_feature (1)..(885): Ortholog of  Ceres SEQ ID NO 12618461 as cited in SEQ ID NO 64349
gaatatattgaagatcctgatcaagttaagccagagggatatgattcaattcctaaagagatacctgatcccaaggacaaaaagcctgagtcatgggatgacgatgacgatggtacatggaagcctagaatgatacctaatccagaatacaagggaccatggaagcggaagaaaattaagaatcctaactacaaaggaaaatggaagaccccatggattgtcaatccagagtttgaggatgacccagacctatatgttctgaaacctttgcagtatgtggggattgaagtatggcaggtcaaagctggttcagtttttgacaacattttgatttgcgatgacccagactatgcaagacatgttgtagatgaaacttttgctgcaaataaggaggctgaaaaggaggcctttgaaggagctgaaagaaagaggaaggctagagaagaagaggaagcacggagggcacgggaggaaggggagagacgaaggcgggagagggatagggaccgcggcagggaccgatacaaggatagatataagcgtcataggcactacgactaccatgacgagctatagatcctgtattcttttgaaatctgcncgatattggatgtctgtctacggagagcgcacgtgcaaaacttgtatgttgtactcacggatgaagctgaacctgtgattttggcgatgggtanagattggccatcgcgtctgtaactaaatttccacgttgcgatgcaatatgagctgtagtactgtcctcgcactactatttaccgtttgtgctgcatatgtgatataaaccttcaagaaacacacacacgaagggtntgaatgagcacggcctttgttgtttgcttnttataaaaaagaactgttttatcg

SEQ ID NO: 14539 - protein, 191 aa, Zea mays subsp. mays
  peptide (1)..(191): Ceres Seq. ID no. 12468374
EYIEDPDQVKPEGYDSIPKEIPDPKDKKPESWDDDDDGTWKPRMIPNPEYKGPWKRKKIKNPNYKGKWKTPWIVNPEFEDDPDLYVLKPLQYVGIEVWQVKAGSVFDNILICDDPDYARHVVDETFAANKEAEKEAFEGAERKRKAREEEEARRAREEGERRRRERDRDRGRDRYKDRYKRHRHYDYHDEL

SEQ ID NO: 14540 - protein, 148 aa, Zea mays subsp. mays
  peptide (1)..(148): Ceres Seq. ID no. 12468375
MIPNPEYKGPWKRKKIKNPNYKGKWKTPWIVNPEFEDDPDLYVLKPLQYVGIEVWQVKAGSVFDNILICDDPDYARHVVDETFAANKEAEKEAFEGAERKRKAREEEEARRAREEGERRRRERDRDRGRDRYKDRYKRHRHYDYHDEL

SEQ ID NO: 14541 - protein, 103 aa, Zea mays subsp. mays
  peptide (1)..(103): Ceres Seq. ID no. 12468376
  misc_feature (78)..(78): Xaa is any aa, unknown or other
MKLLLQIRRLKRRPLKELKERGRLEKKRKHGGHGRKGRDEGGRGIGTAAGTDTRIDISVIGTTTTMTSYRSCILLKSXRYWMSVYGERTCKTCMLYSRMKLNL

SEQ ID NO: 14542 - DNA, 814 bp, Zea mays subsp. mays
  misc_feature (1)..(814): Ceres Seq. ID no. 12544477
  misc_feature (1)..(814): Ortholog of  Ceres SEQ ID NO 13575779 as cited in SEQ ID NO 20515
atagataagggcgactccaggcccttgcgaaccctagcgccgcaccctcccgcccaccgccgtcgccgcccaaccgcagtaaggaggaaggagcaggaagatgccggcggggcacgggctgcggtcgcggacccgcgacctgttcgcgcggcccttccgcaagaaggggtacatcccactcaccacgtacctgcgcacctacaagatcggcgactacgtcgacgtcaaggttaacggcgccgtgcacaagggcatgccgcacaagttctaccacggccgcaccgggagcgtctggaacgtcaccaagcgcgccatcggcgtcgagatcaacaagcaggttaatggccgcatcatcaggaagcggatccatgtccgcgtggagcatgtgcagccctcccgttgcacggaggagttccgcctgaggaaggcgaagaatgaccagctgaaggcggatgccaaaaagcgcggcgaggttatcagcaccaagaggcagccattgggtcccaagcccggcttcatggtcgagggcaccaccattgagaccgtaactcccatcccatatgatgtggtcaatgatctcaagggtggatactaggttgtttggtccatctacctgcagtacccagttctacatctgtgttactctagtgcgtgcaactttgctcactctgagcagtagtatgaacctgttgtctgttcctgttgaaagatttcccattttaggtgcaaacctgagtttctccgaacgcgttataccctgaccttgcttctgagaacgaagatgtgctatttttgcattttgttgtttcgaccg

SEQ ID NO: 14543 - protein, 164 aa, Zea mays subsp. mays
  peptide (1)..(164): Ceres Seq. ID no. 12544478
MPAGHGLRSRTRDLFARPFRKKGYIPLTTYLRTYKIGDYVDVKVNGAVHKGMPHKFYHGRTGSVWNVTKRAIGVEINKQVNGRIIRKRIHVRVEHVQPSRCTEEFRLRKAKNDQLKADAKKRGEVISTKRQPLGPKPGFMVEGTTIETVTPIPYDVVNDLKGGY

SEQ ID NO: 14544 - protein, 113 aa, Zea mays subsp. mays
  peptide (1)..(113): Ceres Seq. ID no. 12544479
MPHKFYHGRTGSVWNVTKRAIGVEINKQVNGRIIRKRIHVRVEHVQPSRCTEEFRLRKAKNDQLKADAKKRGEVISTKRQPLGPKPGFMVEGTTIETVTPIPYDVVNDLKGGY

SEQ ID NO: 14545 - DNA, 2064 bp, Zea mays subsp. mays; identical to SEQ ID NO: 9505
  misc_feature (1)..(2064): Ceres Seq. ID no. 13622175
  misc_feature (1)..(2064): Ortholog of  Ceres SEQ ID NO 14308221 as cited in SEQ ID NO 60363

SEQ ID NO: 14546 - protein, 562 aa, Zea mays subsp. mays; identical to SEQ ID NO: 9506
  peptide (1)..(562): Ceres Seq. ID no. 13622176

SEQ ID NO: 14547 - protein, 510 aa, Zea mays subsp. mays; identical to SEQ ID NO: 9507
  peptide (1)..(510): Ceres Seq. ID no. 13622177

SEQ ID NO: 14548 - protein, 506 aa, Zea mays subsp. mays; identical to SEQ ID NO: 9508
  peptide (1)..(506): Ceres Seq. ID no. 13622178

SEQ ID NO: 14549 - DNA, 889 bp, Zea mays subsp. mays
  misc_feature (1)..(889): Ceres Seq. ID no. 12468317
  misc_feature (1)..(889): Ortholog of  Ceres SEQ ID NO 13639645 as cited in SEQ ID NO 57488
acgacagcgccggcggccagggagccaacagtgccgccggtggcggcggcttcctcacgggaatcatcaccatcgtaatcgcctgcgtctgctggtccgccttcttcgtgctccaggccaacacgctcaagagctaccccgcggagctgtcgctgacggcgctcatctgcctcatggggtcgctcatgagcggctccgtcgcgctcgtcgccgagcgccgcaacacccaggcctgggtcatcggcttcgacacgcgcctcttcaccgccgtctacgccggcatagtgtgctccggcgtggcatactacgtgcaaggcatcgtgtccaggcaacgaggcccggtgttcgtcacggccttcaaccctctctgcatgatcatcaccgccgtcatgggctccatcatactcaaagaagagatcactctcggaagcgtgattggcgctgcgatcatcgtgttaggcctgtacgcgctcatctggggcaagagcaaggacagcgtggccgacgtctcagcatcaggcggctccaagggcgcatcagcggctgccgccgtcgagctgcccatcaccttggcgcagcccaacggcaacggcaactgcaagcacgaggtcggcagcggccgcggcgtcgtcttcgacgtcgagacgccggcggccaacaacggccattactagtagctacagctagtatatctatctatctactactcctaaacctaaatcaacctgcccggccgtcagttgtagctatagacactgacacacgcagatagaagcgtcctgccgcaggttatatatggctgatcgagtggacgttgacgcactgcacatacatatgccgtgcgattttttgtttgttttccgtttttgttaattattaatttcgcctt

SEQ ID NO: 14550 - protein, 256 aa, Zea mays subsp. mays
  peptide (1)..(256): Ceres Seq. ID no. 12468318
RQRRRPGSQQCRRWRRLPHGNHHHRNRLRLLVRLLRAPGQHAQELPRGAVADGAHLPHGVAHERLRRARRRAPQHPGLGHRLRHAPLHRRLRRHSVLRRGILRARHRVQATRPGVRHGLQPSLHDHHRRHGLHHTQRRDHSRKRDWRCDHRVRPVRAHLGQEQGQRGRRLSIRRLQGRISGCRRRAAHHLGAAQRQRQLQARGRQRPRRRLRRRDAGGQQRPLLVATASISIYLLLLNLNQPARPSVVAIDTDTRR

SEQ ID NO: 14551 - protein, 223 aa, Zea mays subsp. mays
  peptide (1)..(223): Ceres Seq. ID no. 12468319
DSAGGQGANSAAGGGGFLTGIITIVIACVCWSAFFVLQANTLKSYPAELSLTALICLMGSLMSGSVALVAERRNTQAWVIGFDTRLFTAVYAGIVCSGVAYYVQGIVSRQRGPVFVTAFNPLCMIITAVMGSIILKEEITLGSVIGAAIIVLGLYALIWGKSKDSVADVSASGGSKGASAAAAVELPITLAQPNGNGNCKHEVGSGRGVVFDVETPAANNGHY

SEQ ID NO: 14552 - protein, 166 aa, Zea mays subsp. mays
  peptide (1)..(166): Ceres Seq. ID no. 12468320
MGSLMSGSVALVAERRNTQAWVIGFDTRLFTAVYAGIVCSGVAYYVQGIVSRQRGPVFVTAFNPLCMIITAVMGSIILKEEITLGSVIGAAIIVLGLYALIWGKSKDSVADVSASGGSKGASAAAAVELPITLAQPNGNGNCKHEVGSGRGVVFDVETPAANNGHY

SEQ ID NO: 14553 - DNA, 513 bp, Zea mays subsp. mays
  misc_feature (1)..(513): Ceres Seq. ID no. 12468302
  misc_feature (1)..(513): Ortholog of  Ceres SEQ ID NO 12544053 as cited in SEQ ID NO 62492
aaagacaacgttctggatggcctcaccgataggatccacatgttgcacgatgcaatagcgtctgatgcggcccaaccgaagactgaagatacggaacatgcatttgaaaacttcttttccagccgtgtaatcagaagaatggtaatcgactgcccagcttttgcagtcactctctggagaaaggctcttcagggcaagtgcaagatatgggctgaaggacacagttcgaaggtagttgcgggtttcctggagtcgccaagtacggaggtcaaggatcttgcaaaacctgagttgcagccgctggttgatgctggcatccttaaagtgccagaccctaaggttgttcaaaaatgactggaggaccatcccttgttaaaaattgttaagtcacggataggtttttttgaagctcgttctgccgataaaaattgttaagtcactcgttcgtgtgtacgccagtccgttgtacacttaccctggatatatggtgaatcggatacgttattttgtttt

SEQ ID NO: 14554 - protein, 117 aa, Zea mays subsp. mays
  peptide (1)..(117): Ceres Seq. ID no. 12468303
KDNVLDGLTDRIHMLHDAIASDAAQPKTEDTEHAFENFFSSRVIRRMVIDCPAFAVTLWRKALQGKCKIWAEGHSSKVVAGFLESPSTEVKDLAKPELQPLVDAGILKVPDPKVVQK

SEQ ID NO: 14555 - protein, 104 aa, Zea mays subsp. mays
  peptide (1)..(104): Ceres Seq. ID no. 12468304
MLHDAIASDAAQPKTEDTEHAFENFFSSRVIRRMVIDCPAFAVTLWRKALQGKCKIWAEGHSSKVVAGFLESPSTEVKDLAKPELQPLVDAGILKVPDPKVVQK

SEQ ID NO: 14556 - protein, 71 aa, Zea mays subsp. mays
  peptide (1)..(71): Ceres Seq. ID no. 12468305
MVIDCPAFAVTLWRKALQGKCKIWAEGHSSKVVAGFLESPSTEVKDLAKPELQPLVDAGILKVPDPKVVQK

SEQ ID NO: 14557 - DNA, 913 bp, Zea mays subsp. mays
  misc_feature (1)..(913): Ceres Seq. ID no. 12468286
  misc_feature (1)..(913): Ortholog of  Ceres SEQ ID NO 13581959 as cited in SEQ ID NO 56156
attgatggtgatcgttagtgagctactaccagggatgtcactgaaaagttacctgcatagcatacggcctagccaattagatacacacactgcaataagctatgcactggacatagctcatgcaatggactgtttacatgccaatggcataatacatagagacctgaaacctgataatttattgcttacagcaaatcgcaagaagctaaaacttactgattttggacttgcacgtgaagaaactgtgactgaaatgatgactgctgaaactgggacttaccgatggatggccccagagctatacagcacagtcacacttcgacgtggtgagaaaaagcattacacaaataaagtggatgtgtacagctttggcattgttttgtgggaattattgaccaatagaatgccatttgaaggcatgtcgaatctacaagctgcatatgctgctgcttttcagcaaaagcgcccagctctccctgaggagaccccccaggagcttgtgttcatagtacaatcatgctgggttgaggatcctgccatgcgacccagtttcagccagatcatccgaatgcttgaaactttcattatgacaatacatccacctccgctttcagagccaaacgaaggcgaggaatcggaagaaacgaggtcgtcactgagcagtaggagctcctctggctcctcgctcgtttctcgcgcgacaagcaagctctcggtcgtccgccacctcttcgtctcaaagaagacaggcaatgggaaggcgtgatgcgccatgccctgagacgcttttcttcggtgctgtaaagatgctagcctaggtgatgcgcaatacaagagggaacttgttcagtgtagagtagctgttgtattgatgttacaaaaggggaaagttgaagtgcagcttttgcaagcc

SEQ ID NO: 14558 - protein, 254 aa, Zea mays subsp. mays
  peptide (1)..(254): Ceres Seq. ID no. 12468287
LMVIVSELLPGMSLKSYLHSIRPSQLDTHTAISYALDIAHAMDCLHANGIIHRDLKPDNLLLTANRKKLKLTDFGLAREETVTEMMTAETGTYRWMAPELYSTVTLRRGEKKHYTNKVDVYSFGIVLWELLTNRMPFEGMSNLQAAYAAAFQQKRPALPEETPQELVFIVQSCWVEDPAMRPSFSQIIRMLETFIMTIHPPPLSEPNEGEESEETRSSLSSRSSSGSSLVSRATSKLSVVRHLFVSKKTGNGKA

SEQ ID NO: 14559 - protein, 253 aa, Zea mays subsp. mays
  peptide (1)..(253): Ceres Seq. ID no. 12468288
MVIVSELLPGMSLKSYLHSIRPSQLDTHTAISYALDIAHAMDCLHANGIIHRDLKPDNLLLTANRKKLKLTDFGLAREETVTEMMTAETGTYRWMAPELYSTVTLRRGEKKHYTNKVDVYSFGIVLWELLTNRMPFEGMSNLQAAYAAAFQQKRPALPEETPQELVFIVQSCWVEDPAMRPSFSQIIRMLETFIMTIHPPPLSEPNEGEESEETRSSLSSRSSSGSSLVSRATSKLSVVRHLFVSKKTGNGKA

SEQ ID NO: 14560 - protein, 243 aa, Zea mays subsp. mays
  peptide (1)..(243): Ceres Seq. ID no. 12468289
MSLKSYLHSIRPSQLDTHTAISYALDIAHAMDCLHANGIIHRDLKPDNLLLTANRKKLKLTDFGLAREETVTEMMTAETGTYRWMAPELYSTVTLRRGEKKHYTNKVDVYSFGIVLWELLTNRMPFEGMSNLQAAYAAAFQQKRPALPEETPQELVFIVQSCWVEDPAMRPSFSQIIRMLETFIMTIHPPPLSEPNEGEESEETRSSLSSRSSSGSSLVSRATSKLSVVRHLFVSKKTGNGKA

SEQ ID NO: 14561 - DNA, 532 bp, Zea mays subsp. mays
  misc_feature (1)..(532): Ceres Seq. ID no. 3625134
  misc_feature (1)..(532): Ortholog of  Ceres SEQ ID NO 12635572 as cited in SEQ ID NO 0
gatcaaatcgactggaaacgcagatacggaaaatacaagcccattgttgakccagcaaaatgccagaagtgtaataagcgaaacgtccggcaagcataccataacgtatgcagagattgctccaaggacctcggcatatgtgctaagtgctgcacatgtgttaatgagcttgtcggaagggatgcgaatgaggaggaaagtgaacgcaagtcactagaagaggctgtcagaggtgctagggagagggaacgacgtacacttcttcgtattgttattgagatgcaagtggaatgtgactttggttccttattatgaacaaaggcaaaggtggggagagtgggccgtcagtcccaaagattgctgacagaagtcgagaaggtgatatctttcctgctggatcacttgatgaatacgccgaacaaactagagagcaagaggaagatgactcagatgtagaggctggagattttgtggaarattaaagtttggaatgctttatgctgtaaagacratactttctgtgatgcctatg

SEQ ID NO: 14562 - protein, 104 aa, Zea mays subsp. mays
  peptide (1)..(104): Ceres Seq. ID no. 3625135
  misc_feature (17)..(17): Xaa is any aa, unknown or other
DQIDWKRRYGKYKPIVXPAKCQKCNKRNVRQAYHNVCRDCSKDLGICAKCCTCVNELVGRDANEEESERKSLEEAVRGARERERRTLLRIVIEMQVECDFGSLL

SEQ ID NO: 14563 - protein, 71 aa, Zea mays subsp. mays
  peptide (1)..(71): Ceres Seq. ID no. 3625136
  misc_feature (17)..(17): Xaa is any aa, unknown or other
IKSTGNADTENTSPLLXQQNARSVISETSGKHTITYAEIAPRTSAYVLSAAHVLMSLSEGMRMRRKVNASH

SEQ ID NO: 14564 - protein, 56 aa, Zea mays subsp. mays
  peptide (1)..(56): Ceres Seq. ID no. 3625137
  misc_feature (56)..(56): Xaa is any aa, unknown or other
MNKGKGGESGPSVPKIADRSREGDIFPAGSLDEYAEQTREQEEDDSDVEAGDFVEX

SEQ ID NO: 14565 - DNA, 1178 bp, Zea mays subsp. mays
  misc_feature (1)..(1178): Ceres Seq. ID no. 14305367
  misc_feature (1)..(1178): Ortholog of  Ceres SEQ ID NO 12619024 as cited in SEQ ID NO 65687
agaggagtcagtatttgagctttctttgtttgctgagtcattcagtgaaatgcttcaacacagaatgggttgtgttatcctgtcttttcttgagaaattgcacaggcgatatgttgtgaagaggaatcagcgtaagcgccaaagagaggaagatctaaagaaagaagagaaatcttcagagaagcggtctaagactactcatgagactactaaaactgaaagtgttgataatccaggaggcagctttaaaatgacaaaagagggtgaagaaaagatgagcacagatcaatctgcaaatgtccatgctgaactgtcaaaagagggtcagataaaacttggcaccgatcatccaattgctaaccatggagaaccagcaaaagggggtgatgaaaatatggaggaagatcctgaatacgaggaagatcctgaagaagtagaagtatatgaagatgacgaggacatggatgatgctcacgctgaagaacagattgcagaacagaatgagaacacaaacgacagagagattaagccaaaagaagtagcgacaacagatggtggaaataacaaaagtacaagacagcctgaagtagaaaatgttactaatatccatgaaagagctgcttcaatggaagaaaagcagtccgtgccagagataggagatttggtgggaggtggagaaaaggtagttagtaaagagattaagccagcaaaagatgaggtgatcgacaaggacctattgcaggccttcaggtactttgacataaatggagcaggatatctcaaggttgatgatttaaaatgtattcttcacaacatggggaagtttttatcaagcagggacgtgaaggacttggttcaaattgctcttgttgagagcaattctgcaagggacaatcgcataatctatcctaagcttgtgaagattgttgacctgtaatctggcactgcttggcccgcgtcagtccccttgaagttaaccatgctatgatcgttgagaagtcagttatgagaaactattttgtttacttattaatgggttcactgccatttttgtggctacctgtttctacgattatgctacaagcagctgcttttcgtttcgatgaatgttttttgtggaattataagtcatgaacttaatcgatgttgcctcatttcgtaaaagaggtgtttgtgtc

SEQ ID NO: 14566 - protein, 311 aa, Zea mays subsp. mays
  peptide (1)..(311): Ceres Seq. ID no. 14305368
EESVFELSLFAESFSEMLQHRMGCVILSFLEKLHRRYVVKRNQRKRQREEDLKKEEKSSEKRSKTTHETTKTESVDNPGGSFKMTKEGEEKMSTDQSANVHAELSKEGQIKLGTDHPIANHGEPAKGGDENMEEDPEYEEDPEEVEVYEDDEDMDDAHAEEQIAEQNENTNDREIKPKEVATTDGGNNKSTRQPEVENVTNIHERAASMEEKQSVPEIGDLVGGGEKVVSKEIKPAKDEVIDKDLLQAFRYFDINGAGYLKVDDLKCILHNMGKFLSSRDVKDLVQIALVESNSARDNRIIYPKLVKIVDL

SEQ ID NO: 14567 - protein, 295 aa, Zea mays subsp. mays
  peptide (1)..(295): Ceres Seq. ID no. 14305369
MLQHRMGCVILSFLEKLHRRYVVKRNQRKRQREEDLKKEEKSSEKRSKTTHETTKTESVDNPGGSFKMTKEGEEKMSTDQSANVHAELSKEGQIKLGTDHPIANHGEPAKGGDENMEEDPEYEEDPEEVEVYEDDEDMDDAHAEEQIAEQNENTNDREIKPKEVATTDGGNNKSTRQPEVENVTNIHERAASMEEKQSVPEIGDLVGGGEKVVSKEIKPAKDEVIDKDLLQAFRYFDINGAGYLKVDDLKCILHNMGKFLSSRDVKDLVQIALVESNSARDNRIIYPKLVKIVDL

SEQ ID NO: 14568 - protein, 290 aa, Zea mays subsp. mays
  peptide (1)..(290): Ceres Seq. ID no. 14305370
MGCVILSFLEKLHRRYVVKRNQRKRQREEDLKKEEKSSEKRSKTTHETTKTESVDNPGGSFKMTKEGEEKMSTDQSANVHAELSKEGQIKLGTDHPIANHGEPAKGGDENMEEDPEYEEDPEEVEVYEDDEDMDDAHAEEQIAEQNENTNDREIKPKEVATTDGGNNKSTRQPEVENVTNIHERAASMEEKQSVPEIGDLVGGGEKVVSKEIKPAKDEVIDKDLLQAFRYFDINGAGYLKVDDLKCILHNMGKFLSSRDVKDLVQIALVESNSARDNRIIYPKLVKIVDL

SEQ ID NO: 14569 - DNA, 695 bp, Zea mays subsp. mays
  misc_feature (1)..(695): Ceres Seq. ID no. 12436617
  misc_feature (1)..(695): Ortholog of  Ceres SEQ ID NO 13591174 as cited in SEQ ID NO 68289
tgatccatgtctgcgcagtgtttcttttcacagtttgcgcttgcgaacatccgaaccccgttttcatcttgaattcaacttatgatgtatatcggacagttccaccacattctggcgccgccttcgtctgatcctggaggcaattggagccgctgcaagtcggatcctggtggatgcagcgcaacacagatcgcaaccctccaaggactgagaagtggaatgttgacatctctgagacagtctgaaagcaaaccgaaggcaggggtgttcatcaactcctgcttcgcgcattgctagagtgagctacaggacacatggttcgcaccaaattctccatccatatataacaagaaaattgcagaggtggtaggtgattggtactttgaaagaggagctgacgtggagattgactgcgcctatccctgtgattcacagtcttgtcgcaaccttataccaattgataaggaactgaggatgtattaggagttcggcagacgattatactcaattatcatcataataaaaaacactcttctaattgttgatgatgttatgttacttgcatcagatagcaaaccaccctattgtacaatctgttggtggaaacatgtttgtgttgtgtgttccaggttgtctgtttcttggtagccttttttggctgaattggtgatatacacaaaatctatttacttgtt

SEQ ID NO: 14570 - protein, 71 aa, Zea mays subsp. mays
  peptide (1)..(71): Ceres Seq. ID no. 12436618
MMYIGQFHHILAPPSSDPGGNWSRCKSDPGGCSATQIATLQGLRSGMLTSLRQSESKPKAGVFINSCFAHC

SEQ ID NO: 14571 - protein, 70 aa, Zea mays subsp. mays
  peptide (1)..(70): Ceres Seq. ID no. 12436619
MYIGQFHHILAPPSSDPGGNWSRCKSDPGGCSATQIATLQGLRSGMLTSLRQSESKPKAGVFINSCFAHC

SEQ ID NO: 14572 - protein, 42 aa, Zea mays subsp. mays
  peptide (1)..(42): Ceres Seq. ID no. 12436620
IHVCAVFLFTVCACEHPNPVFILNSTYDVYRTVPPHSGAAFV

SEQ ID NO: 14573 - DNA, 1529 bp, Zea mays subsp. mays
  misc_feature (1)..(1529): Ceres Seq. ID no. 13496467
  misc_feature (1)..(1529): Ortholog of  Ceres SEQ ID NO 14303487 as cited in SEQ ID NO 54521
  misc_feature (1)..(1529): Ortholog of  Ceres SEQ ID NO 14316302 as cited in SEQ ID NO 55232
  misc_feature (1)..(1529): Ortholog of  Ceres SEQ ID NO 14308274 as cited in SEQ ID NO 55597
  misc_feature (1)..(1529): Ortholog of  Ceres SEQ ID NO 13659710 as cited in SEQ ID NO 60808
gttgtttgataaacatttttctgtggaggagcaagataaacttgtaggtcgtataattggttcaacaggtgctgaggttctccaatctatgttaccctgggttacatcagttctcactcaagaggagcagaacaaaatgcttgatatgtggaagcaagctacaaaaaatacaatgtttggtgaatggctaaacgagtggtggaagggagctggaacagcatctgattcttcagcagaggcgtcctctgctccagaagatagtcatttacaagataagcttgaacaaaatgaccagatgttcaagcctggctggaaggacatatttcgaatgaatcggagtgaacttgaggctgaggtgcgaaaggtttcacgagattctacacttgacccaaggcggaaggcgtatctaattcaaaatctcatgacaagccgctggatagctgcacagcagaagttaccagaaccacattctgaagaatgtaatcacgatgccagtatacctggatgtgcaccttcataccgagaccaggagaaacaaatttatggttgtgaacactacaaacggaactgcaaacttgttgctgcatgctgcaacaagctcttcacatgcaggttctgccatgataaagttagtgaccatacaatggaaaggaaagcaacacaggagatgatgtgcatggtatgcctaaagattcaacctgttggttcgttctgccaaaccccatcttgcaacagactatcgatggcaaagtactactgtaacatctgtaaattttttgatgatgaaaggactgtgtaccactgtccgttttgtaatttgtgtcgtcttgggaaaggtcttggtgttgatttcttccattgcatgaaatgcaactgctgccttggaatgaaattaactgagcacaaatgtcgggaaaaagggctagagacgaattgtccaatatgctgtgacttcctatttacatcaagtgccgcagtcagagccctcccttgtggccactccatgcattcagcttgctttcaggcatacacttgtagtcactacacttgccctatctgctgcaaatccttgggagatatggcggtttattttggcatgcttgatgccttgttggcggctgaagagcttccggaggaataccgtgatcggtgtcaggatatactttgcaatgactgtgagaggaaaggtagatgtcgatttcattggttataccacaaatgcggctcctgtgggtcgtacaacacccgagttatcaagactgccacagcagattgctctacaccaaactagttggagggaacatttgtgcttaattagtcactgtattctttgtttctctttgtacatatcttctagagagaaggaaaaagagaagttgtgtagcatagttataccataatttcattcgtagccatttcagttttgtaagtgtagcagtttacaatttactaggtctagtgcgttatactgacaaaattgacggttctgatggaagaagaacataacctgaggaaattggcttgttagc

SEQ ID NO: 14574 - protein, 429 aa, Zea mays subsp. mays
  peptide (1)..(429): Ceres Seq. ID no. 13496468
LFDKHFSVEEQDKLVGRIIGSTGAEVLQSMLPWVTSVLTQEEQNKMLDMWKQATKNTMFGEWLNEWWKGAGTASDSSAEASSAPEDSHLQDKLEQNDQMFKPGWKDIFRMNRSELEAEVRKVSRDSTLDPRRKAYLIQNLMTSRWIAAQQKLPEPHSEECNHDASIPGCAPSYRDQEKQIYGCEHYKRNCKLVAACCNKLFTCRFCHDKVSDHTMERKATQEMMCMVCLKIQPVGSFCQTPSCNRLSMAKYYCNICKFFDDERTVYHCPFCNLCRLGKGLGVDFFHCMKCNCCLGMKLTEHKCREKGLETNCPICCDFLFTSSAAVRALPCGHSMHSACFQAYTCSHYTCPICCKSLGDMAVYFGMLDALLAAEELPEEYRDRCQDILCNDCERKGRCRFHWLYHKCGSCGSYNTRVIKTATADCSTPN

SEQ ID NO: 14575 - protein, 400 aa, Zea mays subsp. mays
  peptide (1)..(400): Ceres Seq. ID no. 13496469
MLPWVTSVLTQEEQNKMLDMWKQATKNTMFGEWLNEWWKGAGTASDSSAEASSAPEDSHLQDKLEQNDQMFKPGWKDIFRMNRSELEAEVRKVSRDSTLDPRRKAYLIQNLMTSRWIAAQQKLPEPHSEECNHDASIPGCAPSYRDQEKQIYGCEHYKRNCKLVAACCNKLFTCRFCHDKVSDHTMERKATQEMMCMVCLKIQPVGSFCQTPSCNRLSMAKYYCNICKFFDDERTVYHCPFCNLCRLGKGLGVDFFHCMKCNCCLGMKLTEHKCREKGLETNCPICCDFLFTSSAAVRALPCGHSMHSACFQAYTCSHYTCPICCKSLGDMAVYFGMLDALLAAEELPEEYRDRCQDILCNDCERKGRCRFHWLYHKCGSCGSYNTRVIKTATADCSTPN

SEQ ID NO: 14576 - protein, 384 aa, Zea mays subsp. mays
  peptide (1)..(384): Ceres Seq. ID no. 13496470
MLDMWKQATKNTMFGEWLNEWWKGAGTASDSSAEASSAPEDSHLQDKLEQNDQMFKPGWKDIFRMNRSELEAEVRKVSRDSTLDPRRKAYLIQNLMTSRWIAAQQKLPEPHSEECNHDASIPGCAPSYRDQEKQIYGCEHYKRNCKLVAACCNKLFTCRFCHDKVSDHTMERKATQEMMCMVCLKIQPVGSFCQTPSCNRLSMAKYYCNICKFFDDERTVYHCPFCNLCRLGKGLGVDFFHCMKCNCCLGMKLTEHKCREKGLETNCPICCDFLFTSSAAVRALPCGHSMHSACFQAYTCSHYTCPICCKSLGDMAVYFGMLDALLAAEELPEEYRDRCQDILCNDCERKGRCRFHWLYHKCGSCGSYNTRVIKTATADCSTPN

SEQ ID NO: 14577 - DNA, 727 bp, Zea mays subsp. mays
  misc_feature (1)..(727): Ceres Seq. ID no. 12468256
  misc_feature (1)..(727): Ortholog of  Ceres SEQ ID NO 13597205 as cited in SEQ ID NO 63422
  misc_feature (1)..(727): Ortholog of  Ceres SEQ ID NO 14302511 as cited in SEQ ID NO 67604
  misc_feature (1)..(727): Ortholog of  Ceres SEQ ID NO 15226642 as cited in SEQ ID NO 0
ttactttagcggtggcaaggatgaagaggaggaagatatacctgacatggatacttatgaagacacaggggataatttggctgctgctgaaccatcatactttatcgcagaagaaccagaagatgacaacattcttcataccagaacatatgatgttagcataacgtatgacaagtactaccaaactccacgtgtctggctaactggatatgacgagtcaagaatgccattaatgcctgaacttgtgtttgaagacatcagccaagaccacgcacgaaaaacggtgactattgaggaccatcctcacttattggctgggaagcatgcatcagtgcacccatgcaaacatgcagctgtgatgaaaaagatcatcgacgttccaatgtcggggggagtggaaccagaagttgacaagtaccttttcatatttttgaaattcatagcgacagtcataccgactattgagtacgattatacaatggacgtcgaccttggcagtacaagctgattattggttggcttgaagcttgtcacttgtctcgggaaaaggaagcaccctaccagaaggcgcaggaagaaggctgaattgcgtgtttgtggttgaacatttgtgcatatgtgcttgttccttggatcggtttgcatttgtgaacaaactntgaaaagctcaaaggcaagacccatcttgtacattctgtgacgctgtcagcttgtgaatccattcgtt

SEQ ID NO: 14578 - protein, 168 aa, Zea mays subsp. mays
  peptide (1)..(168): Ceres Seq. ID no. 12468257
YFSGGKDEEEEDIPDMDTYEDTGDNLAAAEPSYFIAEEPEDDNILHTRTYDVSITYDKYYQTPRVWLTGYDESRMPLMPELVFEDISQDHARKTVTIEDHPHLLAGKHASVHPCKHAAVMKKIIDVPMSGGVEPEVDKYLFIFLKFIATVIPTIEYDYTMDVDLGSTS

SEQ ID NO: 14579 - protein, 153 aa, Zea mays subsp. mays
  peptide (1)..(153): Ceres Seq. ID no. 12468258
MDTYEDTGDNLAAAEPSYFIAEEPEDDNILHTRTYDVSITYDKYYQTPRVWLTGYDESRMPLMPELVFEDISQDHARKTVTIEDHPHLLAGKHASVHPCKHAAVMKKIIDVPMSGGVEPEVDKYLFIFLKFIATVIPTIEYDYTMDVDLGSTS

SEQ ID NO: 14580 - protein, 94 aa, Zea mays subsp. mays
  peptide (1)..(94): Ceres Seq. ID no. 12468259
MPLMPELVFEDISQDHARKTVTIEDHPHLLAGKHASVHPCKHAAVMKKIIDVPMSGGVEPEVDKYLFIFLKFIATVIPTIEYDYTMDVDLGSTS

SEQ ID NO: 14581 - DNA, 671 bp, Zea mays subsp. mays
  misc_feature (1)..(671): Ceres Seq. ID no. 12468244
  misc_feature (1)..(671): Ortholog of  Ceres SEQ ID NO 14303770 as cited in SEQ ID NO 53890
gataagtttgctcctgatgctaacagccagattgttccagcatctgcaattcctgatggttggatggggctggatattggcccagattccattgctgcattcaacgcagccctggaaacaacccagactgtcatctggaacgggcccatgggtgtttttgaatatgacaagttcgctataggaactgaggctgtggcaaagaagttggcagaacttagccgcaagggtgtgacaactatcatcggaggtggagactctgtcgccgccgttgagaaggtcggagttgctgacgttatgagccacatttccaccggaggtggtgccagcttggaattgttggaaggaaaggagcttccaggagttactgcattggatgaagcagccactgtgactgtatgaagcaagttttcattttgtttcatcttcttttttggaagttaccgggggagggactcccacctgaataaggtgcgcaaggccaggattgttggctcaaccacagggagcgcacgccaccgcatcatcttcatgtaccattgtatacttgctacattcttgcttgctcctcctcagccgctcgaaatgtaggagatcaatgatttatagagctctggaaatcgtttgaacaaggagtaagcgacccaagtaatatgcttactgagtcatntttc

SEQ ID NO: 14582 - protein, 132 aa, Zea mays subsp. mays
  peptide (1)..(132): Ceres Seq. ID no. 12468245
DKFAPDANSQIVPASAIPDGWMGLDIGPDSIAAFNAALETTQTVIWNGPMGVFEYDKFAIGTEAVAKKLAELSRKGVTTIIGGGDSVAAVEKVGVADVMSHISTGGGASLELLEGKELPGVTALDEAATVTV

SEQ ID NO: 14583 - protein, 111 aa, Zea mays subsp. mays
  peptide (1)..(111): Ceres Seq. ID no. 12468246
MGLDIGPDSIAAFNAALETTQTVIWNGPMGVFEYDKFAIGTEAVAKKLAELSRKGVTTIIGGGDSVAAVEKVGVADVMSHISTGGGASLELLEGKELPGVTALDEAATVTV

SEQ ID NO: 14584 - protein, 83 aa, Zea mays subsp. mays
  peptide (1)..(83): Ceres Seq. ID no. 12468247
MGVFEYDKFAIGTEAVAKKLAELSRKGVTTIIGGGDSVAAVEKVGVADVMSHISTGGGASLELLEGKELPGVTALDEAATVTV

SEQ ID NO: 14585 - DNA, 581 bp, Zea mays subsp. mays
  misc_feature (1)..(581): Ceres Seq. ID no. 13572718
  misc_feature (1)..(581): Ortholog of  Ceres SEQ ID NO 13596780 as cited in SEQ ID NO 62360
gaatcaagaggctgggcttgtgccaagcttgaatcctcttgtgaaggagtttctcaatgctgctgatgacaagcggaaggaagtcctctctaaaatagaagaggatgttgctaagctcagcggttctgcagccaagcatggaaagatatatgtgacagctgcaaagaagatcatagacaagggctctgactacactaagaaggagactgagaggcttcaccgcatgctggagaagtcaatcagtccttccaaagctgatgaattcatcgttaagaagaacattctttcgatattctcttcgtgaaggtgatgatccacagccacggcctgccagtgacttgaactgatagcgaaccaccactttacggaaaacagaacaaatcggatgatgtgagagaaaggtggtagtgaagtccagtagtggcagagctacttcgtgcacgtagatctcttttgcattttctggttccagggattgacttcgtactcacagtttacttcacacagaaggtttatgtagccatcctgtgataacatctactttctttttgatccaataaattggttattcagcttccgtc

SEQ ID NO: 14586 - protein, 100 aa, Zea mays subsp. mays
  peptide (1)..(100): Ceres Seq. ID no. 13572719
NQEAGLVPSLNPLVKEFLNAADDKRKEVLSKIEEDVAKLSGSAAKHGKIYVTAAKKIIDKGSDYTKKETERLHRMLEKSISPSKADEFIVKKNILSIFSS

SEQ ID NO: 14587 - DNA, 1329 bp, Zea mays subsp. mays; identical to SEQ ID NO: 14287
  misc_feature (1)..(1329): Ceres Seq. ID no. 13503166
  misc_feature (1)..(1329): Ortholog of  Ceres SEQ ID NO 13581804 as cited in SEQ ID NO 51424
  misc_feature (1)..(1329): Ortholog of  Ceres SEQ ID NO 14307797 as cited in SEQ ID NO 54802
  misc_feature (1)..(1329): Ortholog of  Ceres SEQ ID NO 15168374 as cited in SEQ ID NO 55652
  misc_feature (1)..(1329): Ortholog of  Ceres SEQ ID NO 15169703 as cited in SEQ ID NO 59628
  misc_feature (1)..(1329): Ortholog of  Ceres SEQ ID NO 13663874 as cited in SEQ ID NO 67003
  misc_feature (1)..(1329): Ortholog of  Ceres SEQ ID NO 13624654 as cited in SEQ ID NO 0

SEQ ID NO: 14588 - protein, 245 aa, Zea mays subsp. mays; identical to SEQ ID NO: 14288
  peptide (1)..(245): Ceres Seq. ID no. 13503167

SEQ ID NO: 14589 - protein, 183 aa, Zea mays subsp. mays; identical to SEQ ID NO: 14289
  peptide (1)..(183): Ceres Seq. ID no. 13503168

SEQ ID NO: 14590 - protein, 133 aa, Zea mays subsp. mays; identical to SEQ ID NO: 14290
  peptide (1)..(133): Ceres Seq. ID no. 13503169

SEQ ID NO: 14591 - DNA, 531 bp, Zea mays subsp. mays
  misc_feature (1)..(531): Ceres Seq. ID no. 13572745
  misc_feature (1)..(531): Ortholog of  Ceres SEQ ID NO 15178931 as cited in SEQ ID NO 1125
  misc_feature (1)..(531): Ortholog of  Ceres SEQ ID NO 13596648 as cited in SEQ ID NO 63080
aacaggctggcatgggaggatccaaacaacgtgctgcagagctgggatccaaccctcgccaatccctgcacgtggtttcatgttacctgcaacctgaacaactccgtcatccgcgtggatttgggaaaggcaggcatctccggccccctgcttccagatcttggagcacttgagagcctccagtacatggagctgttcggcaacagcctgaacggttcgattccgtcaacgctgggcaacctgactgatctcatcagcttggatctctgggacaacctgcttaccggcccaatcccaactacgcttggttccatcagcacgctgcgatatctgaggktgtacgagaacaacctgacagggcctataccaccatcgtttggcaatctgactagccttctggaactgaagctccacaggaattcgttgagcggttcgattccggcctcccttggcaacatcaaatcgctgcagttcttgaaattgaacgaaaatatgctgaccggcacggttccattggaagtcctctccctt

SEQ ID NO: 14592 - protein, 177 aa, Zea mays subsp. mays
  peptide (1)..(177): Ceres Seq. ID no. 13572746
  misc_feature (113)..(113): Xaa is any aa, unknown or other
NRLAWEDPNNVLQSWDPTLANPCTWFHVTCNLNNSVIRVDLGKAGISGPLLPDLGALESLQYMELFGNSLNGSIPSTLGNLTDLISLDLWDNLLTGPIPTTLGSISTLRYLRXYENNLTGPIPPSFGNLTSLLELKLHRNSLSGSIPASLGNIKSLQFLKLNENMLTGTVPLEVLSL

SEQ ID NO: 14593 - protein, 115 aa, Zea mays subsp. mays
  peptide (1)..(115): Ceres Seq. ID no. 13572747
  misc_feature (51)..(51): Xaa is any aa, unknown or other
MELFGNSLNGSIPSTLGNLTDLISLDLWDNLLTGPIPTTLGSISTLRYLRXYENNLTGPIPPSFGNLTSLLELKLHRNSLSGSIPASLGNIKSLQFLKLNENMLTGTVPLEVLSL

SEQ ID NO: 14594 - DNA, 540 bp, Zea mays subsp. mays
  misc_feature (1)..(540): Ceres Seq. ID no. 3625528
  misc_feature (1)..(540): Ortholog of  Ceres SEQ ID NO 13595667 as cited in SEQ ID NO 56786
attgagtttgagaaccctgctgtggcaaaggtcgtagcagatgagatgaataactatctcttgtttgagcgcaccttgcaagttgcacttgttgagccagagaaagttcatcctaaattatggaaaggggtgcgaaggggatttatacctgttgatcgagtagcaattgaacggaagagacacaacaaggataagactgtagcagagcacaaaaagatggttgaaggaattgtaaagcgggatggaaagcgtcgcaaaagaatcaaggcagctggtattgactatgagtgtccagctcttatagggagcattcaaccatcagcgaaaaagatcaagttcgatgaggcatagtattttattctaatgggctgttggatccttagtagacgaggcggtggaatggttgagcaatatattcaccttttgaggagacggcagacaactatgtatttcacttttgaatttctctatgttttatgaatgacaccgacacangatgttacaacttaagtatgaaaatgcaatgggcgatgtgttctc

SEQ ID NO: 14595 - protein, 116 aa, Zea mays subsp. mays
  peptide (1)..(116): Ceres Seq. ID no. 3625529
IEFENPAVAKVVADEMNNYLLFERTLQVALVEPEKVHPKLWKGVRRGFIPVDRVAIERKRHNKDKTVAEHKKMVEGIVKRDGKRRKRIKAAGIDYECPALIGSIQPSAKKIKFDEA

SEQ ID NO: 14596 - protein, 101 aa, Zea mays subsp. mays
  peptide (1)..(101): Ceres Seq. ID no. 3625530
MNNYLLFERTLQVALVEPEKVHPKLWKGVRRGFIPVDRVAIERKRHNKDKTVAEHKKMVEGIVKRDGKRRKRIKAAGIDYECPALIGSIQPSAKKIKFDEA

SEQ ID NO: 14597 - DNA, 418 bp, Zea mays subsp. mays
  misc_feature (1)..(418): Ceres Seq. ID no. 3625581
  misc_feature (1)..(418): Ortholog of  Ceres SEQ ID NO 14308077 as cited in SEQ ID NO 58566
  misc_feature (1)..(418): Ortholog of  Ceres SEQ ID NO 15226608 as cited in SEQ ID NO 64190
gtgtywkctgyagactttggattagtgaattatttattgcamggctattackaggkcwagagggcttctgaagctgaattgttgtcaaagtttacatatggaggagtgatactgargcctggttttattcatggaactcgtcgagtgggcagtgtaaagatacctcttggtcttgtcggttctcctatgcagatggtgctccaaaatataaaacctttgactaggttaccacttatcgggccgctattgactcctcccgtcagtgctgcctccgtggggaaggtcgctgtgagagcagcgacggatccggtgtttcctcctggcatcgwtgatgtctacgggatcatgcgttacagcgagcaaaactaagctgcctcattcaccgggcagtatatacatgccgstgkacttttgttac

SEQ ID NO: 14598 - protein, 122 aa, Zea mays subsp. mays
  peptide (1)..(122): Ceres Seq. ID no. 3625582
  misc_feature (2)..(2): Xaa is any aa, unknown or other
  misc_feature (3)..(3): Xaa is any aa, unknown or other
  misc_feature (4)..(4): Xaa is any aa, unknown or other
  misc_feature (14)..(14): Xaa is any aa, unknown or other
  misc_feature (18)..(18): Xaa is any aa, unknown or other
  misc_feature (19)..(19): Xaa is any aa, unknown or other
  misc_feature (20)..(20): Xaa is any aa, unknown or other
  misc_feature (39)..(39): Xaa is any aa, unknown or other
  misc_feature (110)..(110): Xaa is any aa, unknown or other
VXXXDFGLVNYLLXGYYXXXRASEAELLSKFTYGGVILXPGFIHGTRRVGSVKIPLGLVGSPMQMVLQNIKPLTRLPLIGPLLTPPVSAASVGKVAVRAATDPVFPPGIXDVYGIMRYSEQN

SEQ ID NO: 14599 - protein, 60 aa, Zea mays subsp. mays
  peptide (1)..(60): Ceres Seq. ID no. 3625583
  misc_feature (48)..(48): Xaa is any aa, unknown or other
MQMVLQNIKPLTRLPLIGPLLTPPVSAASVGKVAVRAATDPVFPPGIXDVYGIMRYSEQN

SEQ ID NO: 14600 - DNA, 3723 bp, Zea mays subsp. mays
  misc_feature (1)..(3723): Ceres Seq. ID no. 13666073
  misc_feature (1)..(3723): Ortholog of  Ceres SEQ ID NO 14311156 as cited in SEQ ID NO 54767
  misc_feature (1)..(3723): Ortholog of  Ceres SEQ ID NO 14303524 as cited in SEQ ID NO 59500
  misc_feature (1)..(3723): Ortholog of  Ceres SEQ ID NO 14313220 as cited in SEQ ID NO 66007
  misc_feature (1)..(3723): Ortholog of  Ceres SEQ ID NO 13658778 as cited in SEQ ID NO 66511
taggatcaaaaccgtctcgccgctgcaataatcttttgtcaattcttaatccctcgcgtcgacagcgacagcggaaccaactcacgttgccgcggcttcctccatcggtgcggtgccctgtccttttctctcgtccctcctccccccgtatagttaagccccgccccgctactactactactagcagcagcagcgctctcgcagcgggagatgcggtgttgatccgtgccccgctcggatctcgggactggtgccggctctgcccaggccccaggctccaggccagctccctcgacgtttctcggcgagctcgcttgccatggagggcgacgcggacggcgtgaagtcggggaggcgcggtggcggacaggtgtgccagatctgcggcgacggcgtgggcaccacggcggagggggacgtcttcgccgcctgcgacgtctgcgggtttccggtgtgccgcccctgctacgagtacgagcgcaaggacggcacgcaggcgtgcccccagtgcaagaccaagtacaagcgccacaaggggagcccggcgatccgtggggaggaaggagacgacactgatgccgatagcgacttcaattaccttgcatctggcaatgaggaccagaagcagaagattgccgacagaatgcgcagctggcgcatgaacgttgggggcagcggggatgttggtcgccccaagtatgacagtggcgagatcgggcttaccaagtatgacagtggcgagattcctcggggatacatcccatcagtcactaacagccagatctcaggagaaatccctggtgcttcccctgaccatcatatgatgtccccaactgggaacattggcaagcgtgctccatttccctatgtgaaccattcgccaaatccgtcaagggagttctctggtagcattgggaatgttgcctggaaagagagggttgatggctggaaaatgaagcaggacaaggggacgattcccatgacgaatggcacaagcattgctccctctgagggtcggggtgttggtgatattgatgcatcaactgattacaacatggaagatgccttattgaacgacgaaactcgacagcctctatctaggaaagttccacttccttcctccaggataaatccatacaggatggtcattgtgctgcgattgattgttctaagcatcttcttgcactaccgtatcacaaatcctgtgcgcaatgcatacccattatggcttctatctgttatatgtgagatctggtttgctctttcgtggatattggatcagttccctaagtggtttccaatcaaccgggagacgtaccttgataggctggcattaaggtatgaccgggaaggtgagccatctcagttggctgctgttgacattttcgtcagtacagtcgacccaatgaaggagcctcctcttgtcactgccaataccgtgctatccattcttgctgtggattaccctgtggataaggtctcttgctatgtatctgatgatggagctgcgatgctgacatttgatgcactagctgagacttcagagtttgctagaaaatgggtaccatttgttaagaagtacaacattgaacctagagctcctgaatggtacttctcccagaaaattgattacttgaaggacaaagtgcacccttcatttgttaaagaccgccgggccatgaagagagaatatgaagaattcaaagttagggtaaatggccttgttgctaaggcacagaaagttcctgaggaaggatggatcatgcaagatggcacaccatggccaggaaacaataccngggaccatcctggaatgattcaggttttccttggtcacagtggtggccttgatactgagggcaatgagctaccccgtttggtctatgtttctcgtgaaaagcgtcctggattccagcatcacaagaaagctggtgccatgaatgctcttgttcgtgtctcagctgtgcttaccaatggacaatacatgttgaatcttgattgtgatcactacattaacaacagtaaggctctcagggaagctatgtgcttccttatggaccctaacctaggaaggagtgtctgctacgtccagtttccccagagattcgatggcattgacaggaatgatcgatatgccaacaggaacaccgtgtttttcgatattaacttgagaggtcttgatggcatccaaggaccagtttatgtcggaactggctgtgttttcaaccgaacagctctatatggttatgagcccccaattaagcagaagaagggtggtttcttgtcatcactatgtggcggtaggaagaaggcaagcaaatcaaagaagggctcggacaagaagaagtcgcagaagcatgtggacagttctgtgccagtattcaaccttgaagatatagaggagggagttgaaggcgctggatttgacgacgagaaatcacttcttatgtctcaaatgagcctggagaagagatttggccagtccgcagcgtttgttgcctccactctgatggagtatggtggtgttcctcagtccgcaactccggagtctcttctgaaagaagctatccatgttataagctgtggctatgaggacaagactgaatggggaactgagatcgggtggatctacggttctgtgacagaagacattctcaccggattcaagatgcacgcgcgaggctggcggtcgatctactgcatgcccaagcggccagctttcaaggggtctgcccccatcaatctttcggaccgtctgaaccaggtgctccggtgggctcttgggtccgtggagatcctcttcagccggcactgccccctgtggtacggctacggagggcggctcaagttcctggagagattcgcgtacatcaacaccaccatctacccgctcacgtccatcccgcttctcatctactgcatcctgcccgccatctgtctgctcaccggaaagttcatcattccagagatcagcaacttcgccagcatctggttcatctccctcttcatctcgatcttcgccacgggcatcctggagatgaggtggagcggggtgggcatcgacgagtggtggaggaacgagcagttctgggtgatcgggggcatctccgcgcacctcttcgccgtgttccagggcctgctcaaggtgctggccggcatcgacaccaacttcaccgtcacctccaaggcctcggacgaggacggcgacttcgcggagctgtacatgttcaagtggacgacgctcctgatcccgcccaccaccatcctgatcatcaacctggtcggcgtcgtcgccggcatctcctacgccatcaacagcggataccagtcgtggggcccgctcttcggcaagctcttcttcgccttctgggtcatcgtccacctgtacccgttcctcaagggcctcatgggcaggcagaaccgcaccccgaccatcgtcgtcgtctgggccatcctgctggcgtccatcttctccttgctgtgggttcgcatcgaccccttcaccacccgcgtcactggcccggatacccagacgtgtggcatcaactgctagggaagtggaaggtttgtactttgtagaaacggaggaataccacgtgccatctgttgtctgttaagttatatatatataagcagcaagtggcgttatttacagctacgtacagaccagtggatattgtttaccacaaagttttacttgtgttaatatgcattcttttgttg

SEQ ID NO: 14601 - protein, 1077 aa, Zea mays subsp. mays
  peptide (1)..(1077): Ceres Seq. ID no. 13666074
  misc_feature (494)..(494): Xaa is any aa, unknown or other
MEGDADGVKSGRRGGGQVCQICGDGVGTTAEGDVFAACDVCGFPVCRPCYEYERKDGTQACPQCKTKYKRHKGSPAIRGEEGDDTDADSDFNYLASGNEDQKQKIADRMRSWRMNVGGSGDVGRPKYDSGEIGLTKYDSGEIPRGYIPSVTNSQISGEIPGASPDHHMMSPTGNIGKRAPFPYVNHSPNPSREFSGSIGNVAWKERVDGWKMKQDKGTIPMTNGTSIAPSEGRGVGDIDASTDYNMEDALLNDETRQPLSRKVPLPSSRINPYRMVIVLRLIVLSIFLHYRITNPVRNAYPLWLLSVICEIWFALSWILDQFPKWFPINRETYLDRLALRYDREGEPSQLAAVDIFVSTVDPMKEPPLVTANTVLSILAVDYPVDKVSCYVSDDGAAMLTFDALAETSEFARKWVPFVKKYNIEPRAPEWYFSQKIDYLKDKVHPSFVKDRRAMKREYEEFKVRVNGLVAKAQKVPEEGWIMQDGTPWPGNNTXDHPGMIQVFLGHSGGLDTEGNELPRLVYVSREKRPGFQHHKKAGAMNALVRVSAVLTNGQYMLNLDCDHYINNSKALREAMCFLMDPNLGRSVCYVQFPQRFDGIDRNDRYANRNTVFFDINLRGLDGIQGPVYVGTGCVFNRTALYGYEPPIKQKKGGFLSSLCGGRKKASKSKKGSDKKKSQKHVDSSVPVFNLEDIEEGVEGAGFDDEKSLLMSQMSLEKRFGQSAAFVASTLMEYGGVPQSATPESLLKEAIHVISCGYEDKTEWGTEIGWIYGSVTEDILTGFKMHARGWRSIYCMPKRPAFKGSAPINLSDRLNQVLRWALGSVEILFSRHCPLWYGYGGRLKFLERFAYINTTIYPLTSIPLLIYCILPAICLLTGKFIIPEISNFASIWFISLFISIFATGILEMRWSGVGIDEWWRNEQFWVIGGISAHLFAVFQGLLKVLAGIDTNFTVTSKASDEDGDFAELYMFKWTTLLIPPTTILIINLVGVVAGISYAINSGYQSWGPLFGKLFFAFWVIVHLYPFLKGLMGRQNRTPTIVVVWAILLASIFSLLWVRIDPFTTRVTGPDTQTCGINC

SEQ ID NO: 14602 - protein, 969 aa, Zea mays subsp. mays
  peptide (1)..(969): Ceres Seq. ID no. 13666075
  misc_feature (386)..(386): Xaa is any aa, unknown or other
MRSWRMNVGGSGDVGRPKYDSGEIGLTKYDSGEIPRGYIPSVTNSQISGEIPGASPDHHMMSPTGNIGKRAPFPYVNHSPNPSREFSGSIGNVAWKERVDGWKMKQDKGTIPMTNGTSIAPSEGRGVGDIDASTDYNMEDALLNDETRQPLSRKVPLPSSRINPYRMVIVLRLIVLSIFLHYRITNPVRNAYPLWLLSVICEIWFALSWILDQFPKWFPINRETYLDRLALRYDREGEPSQLAAVDIFVSTVDPMKEPPLVTANTVLSILAVDYPVDKVSCYVSDDGAAMLTFDALAETSEFARKWVPFVKKYNIEPRAPEWYFSQKIDYLKDKVHPSFVKDRRAMKREYEEFKVRVNGLVAKAQKVPEEGWIMQDGTPWPGNNTXDHPGMIQVFLGHSGGLDTEGNELPRLVYVSREKRPGFQHHKKAGAMNALVRVSAVLTNGQYMLNLDCDHYINNSKALREAMCFLMDPNLGRSVCYVQFPQRFDGIDRNDRYANRNTVFFDINLRGLDGIQGPVYVGTGCVFNRTALYGYEPPIKQKKGGFLSSLCGGRKKASKSKKGSDKKKSQKHVDSSVPVFNLEDIEEGVEGAGFDDEKSLLMSQMSLEKRFGQSAAFVASTLMEYGGVPQSATPESLLKEAIHVISCGYEDKTEWGTEIGWIYGSVTEDILTGFKMHARGWRSIYCMPKRPAFKGSAPINLSDRLNQVLRWALGSVEILFSRHCPLWYGYGGRLKFLERFAYINTTIYPLTSIPLLIYCILPAICLLTGKFIIPEISNFASIWFISLFISIFATGILEMRWSGVGIDEWWRNEQFWVIGGISAHLFAVFQGLLKVLAGIDTNFTVTSKASDEDGDFAELYMFKWTTLLIPPTTILIINLVGVVAGISYAINSGYQSWGPLFGKLFFAFWVIVHLYPFLKGLMGRQNRTPTIVVVWAILLASIFSLLWVRIDPFTTRVTGPDTQTCGINC

SEQ ID NO: 14603 - protein, 964 aa, Zea mays subsp. mays
  peptide (1)..(964): Ceres Seq. ID no. 13666076
  misc_feature (381)..(381): Xaa is any aa, unknown or other
MNVGGSGDVGRPKYDSGEIGLTKYDSGEIPRGYIPSVTNSQISGEIPGASPDHHMMSPTGNIGKRAPFPYVNHSPNPSREFSGSIGNVAWKERVDGWKMKQDKGTIPMTNGTSIAPSEGRGVGDIDASTDYNMEDALLNDETRQPLSRKVPLPSSRINPYRMVIVLRLIVLSIFLHYRITNPVRNAYPLWLLSVICEIWFALSWILDQFPKWFPINRETYLDRLALRYDREGEPSQLAAVDIFVSTVDPMKEPPLVTANTVLSILAVDYPVDKVSCYVSDDGAAMLTFDALAETSEFARKWVPFVKKYNIEPRAPEWYFSQKIDYLKDKVHPSFVKDRRAMKREYEEFKVRVNGLVAKAQKVPEEGWIMQDGTPWPGNNTXDHPGMIQVFLGHSGGLDTEGNELPRLVYVSREKRPGFQHHKKAGAMNALVRVSAVLTNGQYMLNLDCDHYINNSKALREAMCFLMDPNLGRSVCYVQFPQRFDGIDRNDRYANRNTVFFDINLRGLDGIQGPVYVGTGCVFNRTALYGYEPPIKQKKGGFLSSLCGGRKKASKSKKGSDKKKSQKHVDSSVPVFNLEDIEEGVEGAGFDDEKSLLMSQMSLEKRFGQSAAFVASTLMEYGGVPQSATPESLLKEAIHVISCGYEDKTEWGTEIGWIYGSVTEDILTGFKMHARGWRSIYCMPKRPAFKGSAPINLSDRLNQVLRWALGSVEILFSRHCPLWYGYGGRLKFLERFAYINTTIYPLTSIPLLIYCILPAICLLTGKFIIPEISNFASIWFISLFISIFATGILEMRWSGVGIDEWWRNEQFWVIGGISAHLFAVFQGLLKVLAGIDTNFTVTSKASDEDGDFAELYMFKWTTLLIPPTTILIINLVGVVAGISYAINSGYQSWGPLFGKLFFAFWVIVHLYPFLKGLMGRQNRTPTIVVVWAILLASIFSLLWVRIDPFTTRVTGPDTQTCGINC

SEQ ID NO: 14604 - DNA, 1485 bp, Zea mays subsp. mays
  misc_feature (1)..(1485): Ceres Seq. ID no. 13496475
  misc_feature (1)..(1485): Ortholog of  Ceres SEQ ID NO 15177298 as cited in SEQ ID NO 52711
ctgggcgctccgcgtctccgcgcccacccgcctcacctccgccgtcgaggaggacaagaggagctccccccttggggagggggacgagcacgtggcggccagcggcgccgcgggcggggagttcgacccgggggcgccgccgccgttcgggctggcggagatccgcgcggccatccccaagcactgctgggtcaaggacccctggcgctccatggcctacgtgctgcgcgacgtcgtcgtcgtcctggggctcgccgcggccgccgcgcgcctcgacagctggctcgtctggccgctctactgggccgcgcagggcaccatgttctgggcgctcttcgtcctcggccacgactgtggacacgggagcttctcgaacaaccccaagctgaacagcgtggtcggacacatactccattcctccattcttgtcccgtaccacggatggaggattagccacaggacgcaccatcaaaaccacggccacgttgagaaggacgagtcctggcacccgctaccagagaggctgtacaaaagcctggactttatgactaggaaattgcggttcaccatgccgttccccttgctcgcattcccattatacttgttcgcaaggagtccagggaagtcaggatcacacttcaacccaagcagtgatttgttccaacctaatgaaaagaaggacatcataacatcaacggcatcctggctggccatggttggtgttctggctggtctcacctttctgatgggtcctgttgcgatgctaaagctctacggagtcccatactttgtatttgttgcttggctggatatggttacatacttgcaccatcatggccatgaagacaagcttccctggtaccgtggacaggaatggagttatctgcgtggaggactgacgacgctcgaccgggactatggactgattaacaatatccaccatgacattggaactcatgtcatccatcaccttttccctcaaatcccgcattaccatctcattgaggcgaccgaggcagcaaaaccggttcttggcaagtactacaaagaaccaaagaagtcgggtcctctcccgtggcacctgtttggggtgctagcacaaagcttaaagcaagaccactatgttagcgacaccggagacgtagtgtactaccaaactgactcgaaaacgaacacctctgcacaaaaatctgattgacacagagtatagaacgtagcgtattcttcatttttcgcaggcggactgtgcctgaagacctggccagcctcctgagacctctcgattagtgtgtgtgtgtgtgtgtgtgtgtgtgtgaccgggttcgtcaattcaagaatgtaaggtggcgaagtattatcatgtatgcgagtgagggtataattctttcgaatgatcgaagtcggatgctgcttccgatgtaacgaactgtgattctttgcacaagaggtgtactattacagtaaagagtaaaaaaagagttagct

SEQ ID NO: 14605 - protein, 398 aa, Zea mays subsp. mays
  peptide (1)..(398): Ceres Seq. ID no. 13496476
WALRVSAPTRLTSAVEEDKRSSPLGEGDEHVAASGAAGGEFDPGAPPPFGLAEIRAAIPKHCWVKDPWRSMAYVLRDVVVVLGLAAAAARLDSWLVWPLYWAAQGTMFWALFVLGHDCGHGSFSNNPKLNSVVGHILHSSILVPYHGWRISHRTHHQNHGHVEKDESWHPLPERLYKSLDFMTRKLRFTMPFPLLAFPLYLFARSPGKSGSHFNPSSDLFQPNEKKDIITSTASWLAMVGVLAGLTFLMGPVAMLKLYGVPYFVFVAWLDMVTYLHHHGHEDKLPWYRGQEWSYLRGGLTTLDRDYGLINNIHHDIGTHVIHHLFPQIPHYHLIEATEAAKPVLGKYYKEPKKSGPLPWHLFGVLAQSLKQDHYVSDTGDVVYYQTDSKTNTSAQKSD

SEQ ID NO: 14606 - protein, 328 aa, Zea mays subsp. mays
  peptide (1)..(328): Ceres Seq. ID no. 13496477
MAYVLRDVVVVLGLAAAAARLDSWLVWPLYWAAQGTMFWALFVLGHDCGHGSFSNNPKLNSVVGHILHSSILVPYHGWRISHRTHHQNHGHVEKDESWHPLPERLYKSLDFMTRKLRFTMPFPLLAFPLYLFARSPGKSGSHFNPSSDLFQPNEKKDIITSTASWLAMVGVLAGLTFLMGPVAMLKLYGVPYFVFVAWLDMVTYLHHHGHEDKLPWYRGQEWSYLRGGLTTLDRDYGLINNIHHDIGTHVIHHLFPQIPHYHLIEATEAAKPVLGKYYKEPKKSGPLPWHLFGVLAQSLKQDHYVSDTGDVVYYQTDSKTNTSAQKSD

SEQ ID NO: 14607 - protein, 292 aa, Zea mays subsp. mays
  peptide (1)..(292): Ceres Seq. ID no. 13496478
MFWALFVLGHDCGHGSFSNNPKLNSVVGHILHSSILVPYHGWRISHRTHHQNHGHVEKDESWHPLPERLYKSLDFMTRKLRFTMPFPLLAFPLYLFARSPGKSGSHFNPSSDLFQPNEKKDIITSTASWLAMVGVLAGLTFLMGPVAMLKLYGVPYFVFVAWLDMVTYLHHHGHEDKLPWYRGQEWSYLRGGLTTLDRDYGLINNIHHDIGTHVIHHLFPQIPHYHLIEATEAAKPVLGKYYKEPKKSGPLPWHLFGVLAQSLKQDHYVSDTGDVVYYQTDSKTNTSAQKSD

SEQ ID NO: 14608 - DNA, 583 bp, Zea mays subsp. mays
  misc_feature (1)..(583): Ceres Seq. ID no. 3625683
  misc_feature (1)..(583): Ortholog of  Ceres SEQ ID NO 15169220 as cited in SEQ ID NO 55481
tctaaggactttgctgatgtccatggacttgtcatgcatgcttacaacccaccaaatgcagattcacttgttgatcatcttggtttgcacaaggcattgtgtgttcttatgggatgggattatacaaaagtccctgagaactttaagggctaccaatcattaccttctgaccttgtccaagcaagtagggaggacctcattgtctggccgcctactgttatcattcacaatacttcgactgggaggaagaaagatggtcgcttggagggtttagggaacaaagaaatggataaaaaaatgacagaactagggttttctggtgggaagtcgaagtccttgtatggaaaggaaggacatatgggtttgacacttatcaagtttgcaaacaactcatctggcttgaaggaggctgagcgtcttgctgagtatcttgagaggcaagatcgtggacgtataggttggtcacgcgctcatgccagtcgttctgtagattcagatcagaaccctttgttggtcgagacggataccaggacagctgagaaaaagaggatactttatgggtacctarcaattgcatccgatc

SEQ ID NO: 14609 - protein, 194 aa, Zea mays subsp. mays
  peptide (1)..(194): Ceres Seq. ID no. 3625684
  misc_feature (190)..(190): Xaa is any aa, unknown or other
SKDFADVHGLVMHAYNPPNADSLVDHLGLHKALCVLMGWDYTKVPENFKGYQSLPSDLVQASREDLIVWPPTVIIHNTSTGRKKDGRLEGLGNKEMDKKMTELGFSGGKSKSLYGKEGHMGLTLIKFANNSSGLKEAERLAEYLERQDRGRIGWSRAHASRSVDSDQNPLLVETDTRTAEKKRILYGYLXIASD

SEQ ID NO: 14610 - protein, 183 aa, Zea mays subsp. mays
  peptide (1)..(183): Ceres Seq. ID no. 3625685
  misc_feature (179)..(179): Xaa is any aa, unknown or other
MHAYNPPNADSLVDHLGLHKALCVLMGWDYTKVPENFKGYQSLPSDLVQASREDLIVWPPTVIIHNTSTGRKKDGRLEGLGNKEMDKKMTELGFSGGKSKSLYGKEGHMGLTLIKFANNSSGLKEAERLAEYLERQDRGRIGWSRAHASRSVDSDQNPLLVETDTRTAEKKRILYGYLXIASD

SEQ ID NO: 14611 - protein, 158 aa, Zea mays subsp. mays
  peptide (1)..(158): Ceres Seq. ID no. 3625686
  misc_feature (154)..(154): Xaa is any aa, unknown or other
MGWDYTKVPENFKGYQSLPSDLVQASREDLIVWPPTVIIHNTSTGRKKDGRLEGLGNKEMDKKMTELGFSGGKSKSLYGKEGHMGLTLIKFANNSSGLKEAERLAEYLERQDRGRIGWSRAHASRSVDSDQNPLLVETDTRTAEKKRILYGYLXIASD

SEQ ID NO: 14612 - DNA, 548 bp, Zea mays subsp. mays
  misc_feature (1)..(548): Ceres Seq. ID no. 3625697
  misc_feature (1)..(548): Ortholog of  Ceres SEQ ID NO 13582388 as cited in SEQ ID NO 56812
  misc_feature (1)..(548): Ortholog of  Ceres SEQ ID NO 14305353 as cited in SEQ ID NO 57710
tcaacatctacgacatctcccccctcaaccactacctctactggttcggactcggcatcttccactccgggatccaagtccatggcatggagtatggctttggagctcatgaataccccaccagcggagtcttccaagtagaacccaaaagctgccccgggtttatcttcaggcgctctgtgtgtgtgggtgtaactcacatgtcccgttcccaagtccgcacttccatagaggatctcgccgaggattatcatggggacacttatcatttgattctcaagaactgcaatcatttcacagcagatgtctgcgagcgtttgaccgggaagccagtacctggatgggtgaatcgactcgccagattaggttccttcttcaattgtgtattgcctgacagcatcaaggtttcagcagtcagagatgtaaatgcacatccagatttttctggtactctacctacacccagtttaactacttgtaccttcacattcacatcacatggttggaatttgaccttacagaatcatgtaccactttattaaagattg

SEQ ID NO: 14613 - protein, 179 aa, Zea mays subsp. mays
  peptide (1)..(179): Ceres Seq. ID no. 3625698
NIYDISPLNHYLYWFGLGIFHSGIQVHGMEYGFGAHEYPTSGVFQVEPKSCPGFIFRRSVCVGVTHMSRSQVRTSIEDLAEDYHGDTYHLILKNCNHFTADVCERLTGKPVPGWVNRLARLGSFFNCVLPDSIKVSAVRDVNAHPDFSGTLPTPSLTTCTFTFTSHGWNLTLQNHVPLY

SEQ ID NO: 14614 - protein, 151 aa, Zea mays subsp. mays
  peptide (1)..(151): Ceres Seq. ID no. 3625699
MEYGFGAHEYPTSGVFQVEPKSCPGFIFRRSVCVGVTHMSRSQVRTSIEDLAEDYHGDTYHLILKNCNHFTADVCERLTGKPVPGWVNRLARLGSFFNCVLPDSIKVSAVRDVNAHPDFSGTLPTPSLTTCTFTFTSHGWNLTLQNHVPLY

SEQ ID NO: 14615 - protein, 113 aa, Zea mays subsp. mays
  peptide (1)..(113): Ceres Seq. ID no. 3625700
MSRSQVRTSIEDLAEDYHGDTYHLILKNCNHFTADVCERLTGKPVPGWVNRLARLGSFFNCVLPDSIKVSAVRDVNAHPDFSGTLPTPSLTTCTFTFTSHGWNLTLQNHVPLY

SEQ ID NO: 14616 - DNA, 456 bp, Zea mays subsp. mays
  misc_feature (1)..(456): Ceres Seq. ID no. 5761952
  misc_feature (1)..(456): Ortholog of  Ceres SEQ ID NO 14302154 as cited in SEQ ID NO 0
gatcaagaagccgcagtccaaggccaaggcacagagacagagatcatagaagccaaagtcgcagcaggagcagagaaaggcatgtccgtgatagagacaggggctatcgtcgtcggagcagaagtagaagccgaagtcttagttcaagccctgacaacagaagtcatcatagagcaagagatgatgataagcgcaagagtatgagtaagagcaggagcaggagcacaagtagaagccgctcatactatagtgcttcacctgcccggcacagtgctagccctcgcaagagcccaccgccacagaggagccccactcctgcaaagcatgccaatggaaaagtagcacctctgtcacgctgtgtttctccattaccgaagcgtgcaacctcccsgcagcccaggcagtgatggcagggcaattcacgtcaggagtaaagcttgctgatttggtgatgcc

SEQ ID NO: 14617 - protein, 134 aa, Zea mays subsp. mays
  peptide (1)..(134): Ceres Seq. ID no. 5761953
  misc_feature (130)..(130): Xaa is any aa, unknown or other
SRSRSPRPRHRDRDHRSQSRSRSRERHVRDRDRGYRRRSRSRSRSLSSSPDNRSHHRARDDDKRKSMSKSRSRSTSRSRSYYSASPARHSASPRKSPPPQRSPTPAKHANGKVAPLSRCVSPLPKRATSXQPRQ

SEQ ID NO: 14618 - protein, 68 aa, Zea mays subsp. mays
  peptide (1)..(68): Ceres Seq. ID no. 5761954
  misc_feature (64)..(64): Xaa is any aa, unknown or other
MSKSRSRSTSRSRSYYSASPARHSASPRKSPPPQRSPTPAKHANGKVAPLSRCVSPLPKRATSXQPRQ

SEQ ID NO: 14619 - protein, 67 aa, Zea mays subsp. mays
  peptide (1)..(67): Ceres Seq. ID no. 5761955
DQEAAVQGQGTETEIIEAKVAAGAEKGMSVIETGAIVVGAEVEAEVLVQALTTEVIIEQEMMISARV

SEQ ID NO: 14620 - DNA, 643 bp, Zea mays subsp. mays
  misc_feature (1)..(643): Ceres Seq. ID no. 12468172
  misc_feature (1)..(643): Ortholog of  Ceres SEQ ID NO 13654409 as cited in SEQ ID NO 68534
gctatcatgagccatcccatcccaaatactgctgaatctcactcagtacagatcatattaccacagaagcaacttggccgcagatcagacatgtatgttttctgctgttcctactctcataatgtcgcatcaaaaggcaaattcatcgcattcgtgtcagcacaagcggagactgataatccagagaaggaactaaagccagggatcgatcttcttgggaaggtggacgagttatttatcgacatatatgacagatatgaacctaccaatgactcatcagcagacaattgtttcatctcaacaagttatgatgccacaacacactttgagtccactgttatggatgtactttccctttacacaaagatcaccggaaagactgttgatctcagcgtggatctaagcgctgctagtgctgctgaagatgatatgtgatacttatcgtagtgctatgtggcgtagtgtggaaaatatttaattaagctttgctttggcaacgattattaggttcacctttatttttccaattgttgttattagctgtgttgtgaccatgattaaagattgcatgctgtaaatttgaaggcattttttttatcaaaagttgttaacgcggtgatccgtgtttagatttttgaagggt

SEQ ID NO: 14621 - protein, 144 aa, Zea mays subsp. mays
  peptide (1)..(144): Ceres Seq. ID no. 12468173
AIMSHPIPNTAESHSVQIILPQKQLGRRSDMYVFCCSYSHNVASKGKFIAFVSAQAETDNPEKELKPGIDLLGKVDELFIDIYDRYEPTNDSSADNCFISTSYDATTHFESTVMDVLSLYTKITGKTVDLSVDLSAASAAEDDM

SEQ ID NO: 14622 - protein, 142 aa, Zea mays subsp. mays
  peptide (1)..(142): Ceres Seq. ID no. 12468174
MSHPIPNTAESHSVQIILPQKQLGRRSDMYVFCCSYSHNVASKGKFIAFVSAQAETDNPEKELKPGIDLLGKVDELFIDIYDRYEPTNDSSADNCFISTSYDATTHFESTVMDVLSLYTKITGKTVDLSVDLSAASAAEDDM

SEQ ID NO: 14623 - protein, 114 aa, Zea mays subsp. mays
  peptide (1)..(114): Ceres Seq. ID no. 12468175
MYVFCCSYSHNVASKGKFIAFVSAQAETDNPEKELKPGIDLLGKVDELFIDIYDRYEPTNDSSADNCFISTSYDATTHFESTVMDVLSLYTKITGKTVDLSVDLSAASAAEDDM

SEQ ID NO: 14624 - DNA, 2053 bp, Zea mays subsp. mays; identical to SEQ ID NO: 5535
  misc_feature (1)..(2053): Ceres Seq. ID no. 13577863
  misc_feature (1)..(2053): Ortholog of  Ceres SEQ ID NO 14310841 as cited in SEQ ID NO 53666
  misc_feature (1)..(2053): Ortholog of  Ceres SEQ ID NO 15178736 as cited in SEQ ID NO 56439
  misc_feature (1)..(2053): Ortholog of  Ceres SEQ ID NO 14308493 as cited in SEQ ID NO 60320

SEQ ID NO: 14625 - protein, 362 aa, Zea mays subsp. mays; identical to SEQ ID NO: 5536
  peptide (1)..(362): Ceres Seq. ID no. 13577864
  misc_feature (44)..(44): Xaa is any aa, unknown or other
  misc_feature (173)..(173): Xaa is any aa, unknown or other
  misc_feature (213)..(213): Xaa is any aa, unknown or other

SEQ ID NO: 14626 - protein, 302 aa, Zea mays subsp. mays; identical to SEQ ID NO: 5537
  peptide (1)..(302): Ceres Seq. ID no. 13577865
  misc_feature (113)..(113): Xaa is any aa, unknown or other
  misc_feature (153)..(153): Xaa is any aa, unknown or other

SEQ ID NO: 14627 - protein, 296 aa, Zea mays subsp. mays; identical to SEQ ID NO: 5538
  peptide (1)..(296): Ceres Seq. ID no. 13577866
  misc_feature (107)..(107): Xaa is any aa, unknown or other
  misc_feature (147)..(147): Xaa is any aa, unknown or other

SEQ ID NO: 14628 - DNA, 1012 bp, Zea mays subsp. mays
  misc_feature (1)..(1012): Ceres Seq. ID no. 12450646
  misc_feature (1)..(1012): Ortholog of  Ceres SEQ ID NO 13598160 as cited in SEQ ID NO 61317
  misc_feature (1)..(1012): Ortholog of  Ceres SEQ ID NO 13579986 as cited in SEQ ID NO 64562
  misc_feature (1)..(1012): Ortholog of  Ceres SEQ ID NO 12614253 as cited in SEQ ID NO 68518
aggagtaggtgtagccgcgtaagcggcgtaggcctcagctcggctcagcagccgcctcgctcgaaccagaggagccaagcagaggaagcgaggcggcgggggcggagatgtcggcgggactggtgaccgacgaggccaccgtggggcggctgtaccggatccggcgcacggtgatgcagatgctccgtgaccgtggctacctggtggtggaccacgagctcgccaccagccgccgcgacttcctccgcaagttcggcgagtccttccaccgcgaggacctcctcatcaacaagtacaagaagaacgacccatccgaccagatatatgtcttcttccccaacgatgacaaggtagggatgaagcacatcaagaagtacgtcgaaatgatgacgcacgagaacgtctccagagctgtgctggttctccagcagaacctaactccgtttgcgaagtcgtttctcatagagctggagccgaagatccatctggaaattttccaggaggccgagatgcttataaacatcaaggaacatgtccttgttcctgagcatcaggtgctcacaaacgaggagaagaagacgcttctggagcggtacaccttgaaggaaactcagcttccaagaatacagatcacggatcctattgctaggtactacggcctgaggcgaggccaggtcgtgaagatcatcaggcccagcgagacggcgggcagatacgttacataccgctacgttgtatgacagaacgtcagaacactgaagaagaagaagagaaccacagatatgtcaaaaaaaattcaagctacacataccccacgtgcttgcagacatcagtatcgcttttgtagcagcagccactggtaacgatctgtggctgatgtgtaagtggattgaataagctgagtcagagcatacgagaattctcatgttgtacacttgtgttttatgaaccgcataaacactcacgacgataaaagaagcctgttttcggagcgacagaagctcctgcgatc

SEQ ID NO: 14629 - protein, 210 aa, Zea mays subsp. mays
  peptide (1)..(210): Ceres Seq. ID no. 12450647
MSAGLVTDEATVGRLYRIRRTVMQMLRDRGYLVVDHELATSRRDFLRKFGESFHREDLLINKYKKNDPSDQIYVFFPNDDKVGMKHIKKYVEMMTHENVSRAVLVLQQNLTPFAKSFLIELEPKIHLEIFQEAEMLINIKEHVLVPEHQVLTNEEKKTLLERYTLKETQLPRIQITDPIARYYGLRRGQVVKIIRPSETAGRYVTYRYVV

SEQ ID NO: 14630 - protein, 188 aa, Zea mays subsp. mays
  peptide (1)..(188): Ceres Seq. ID no. 12450648
MQMLRDRGYLVVDHELATSRRDFLRKFGESFHREDLLINKYKKNDPSDQIYVFFPNDDKVGMKHIKKYVEMMTHENVSRAVLVLQQNLTPFAKSFLIELEPKIHLEIFQEAEMLINIKEHVLVPEHQVLTNEEKKTLLERYTLKETQLPRIQITDPIARYYGLRRGQVVKIIRPSETAGRYVTYRYVV

SEQ ID NO: 14631 - protein, 186 aa, Zea mays subsp. mays
  peptide (1)..(186): Ceres Seq. ID no. 12450649
MLRDRGYLVVDHELATSRRDFLRKFGESFHREDLLINKYKKNDPSDQIYVFFPNDDKVGMKHIKKYVEMMTHENVSRAVLVLQQNLTPFAKSFLIELEPKIHLEIFQEAEMLINIKEHVLVPEHQVLTNEEKKTLLERYTLKETQLPRIQITDPIARYYGLRRGQVVKIIRPSETAGRYVTYRYVV

SEQ ID NO: 14632 - DNA, 916 bp, Zea mays subsp. mays
  misc_feature (1)..(916): Ceres Seq. ID no. 12468118
  misc_feature (1)..(916): Ortholog of  Ceres SEQ ID NO 15173862 as cited in SEQ ID NO 61747
agcaacccaacccacatccaccggaagatgagagctccagctccagctgctcctattcccgcgctgctctcccgctgctcctcgcctccctcctcggccccgcgccgcctcctctcctcctcccgcacgccagccgcctgctgcccgcctccggcagtcgtccgctctgtctccgtcgatttgctggcggtcgccggggagccggctgtcgcaggcgccccctccgcaacgccgtgccgtcgcctcatcctcctccgtcacggggacagcgccaccgggggccgcttcaccagagatcatgacagacctctaagcaaggctgggagagctgacgcaatcagcgtctctaataaactccaacagatgggatgggtacccgagcttattctctgcagtgatgcaatgcgcacaaaggagactcttaagattctgcaagagcatgtccatggattgtctgaagcagtagtgcactttatcccaagtttctactcaattgcggcaatggatggccaaactgcagagcatttgcaaaaggcgatttgngaatattcgagtgatgagatcttaactgngatgtgcatgggtcataataaaggatgggaagaanccgcctntatgttttntggcgattcagttttgcttganacatgtaacgctgcgttgttagaagctgcaggcaaatcatgggttgaggccttttttgtggctggtntgggaggatggaagctccatggaattgtaaagccatgaattattgtaactaaaagctagatgtaattttttagctgtttnttaattattattattaacctttgtgtagtggtttttacatgccactgaagctttcggtntgaaggtatcaacatggttagatagatgagatgagatgaatgaattnttccncggtccatgagtt

SEQ ID NO: 14633 - protein, 249 aa, Zea mays subsp. mays
  peptide (1)..(249): Ceres Seq. ID no. 12468119
  misc_feature (181)..(181): Xaa is any aa, unknown or other
  misc_feature (191)..(191): Xaa is any aa, unknown or other
  misc_feature (203)..(203): Xaa is any aa, unknown or other
  misc_feature (205)..(205): Xaa is any aa, unknown or other
  misc_feature (208)..(208): Xaa is any aa, unknown or other
  misc_feature (215)..(215): Xaa is any aa, unknown or other
  misc_feature (238)..(238): Xaa is any aa, unknown or other
SNPTHIHRKMRAPAPAAPIPALLSRCSSPPSSAPRRLLSSSRTPAACCPPPAVVRSVSVDLLAVAGEPAVAGAPSATPCRRLILLRHGDSATGGRFTRDHDRPLSKAGRADAISVSNKLQQMGWVPELILCSDAMRTKETLKILQEHVHGLSEAVVHFIPSFYSIAAMDGQTAEHLQKAIXEYSSDEILTXMCMGHNKGWEEXAXMFXGDSVLLXTCNAALLEAAGKSWVEAFFVAGXGGWKLHGIVKP

SEQ ID NO: 14634 - protein, 240 aa, Zea mays subsp. mays
  peptide (1)..(240): Ceres Seq. ID no. 12468120
  misc_feature (172)..(172): Xaa is any aa, unknown or other
  misc_feature (182)..(182): Xaa is any aa, unknown or other
  misc_feature (194)..(194): Xaa is any aa, unknown or other
  misc_feature (196)..(196): Xaa is any aa, unknown or other
  misc_feature (199)..(199): Xaa is any aa, unknown or other
  misc_feature (206)..(206): Xaa is any aa, unknown or other
  misc_feature (229)..(229): Xaa is any aa, unknown or other
MRAPAPAAPIPALLSRCSSPPSSAPRRLLSSSRTPAACCPPPAVVRSVSVDLLAVAGEPAVAGAPSATPCRRLILLRHGDSATGGRFTRDHDRPLSKAGRADAISVSNKLQQMGWVPELILCSDAMRTKETLKILQEHVHGLSEAVVHFIPSFYSIAAMDGQTAEHLQKAIXEYSSDEILTXMCMGHNKGWEEXAXMFXGDSVLLXTCNAALLEAAGKSWVEAFFVAGXGGWKLHGIVKP

SEQ ID NO: 14635 - protein, 128 aa, Zea mays subsp. mays
  peptide (1)..(128): Ceres Seq. ID no. 12468121
  misc_feature (60)..(60): Xaa is any aa, unknown or other
  misc_feature (70)..(70): Xaa is any aa, unknown or other
  misc_feature (82)..(82): Xaa is any aa, unknown or other
  misc_feature (84)..(84): Xaa is any aa, unknown or other
  misc_feature (87)..(87): Xaa is any aa, unknown or other
  misc_feature (94)..(94): Xaa is any aa, unknown or other
  misc_feature (117)..(117): Xaa is any aa, unknown or other
MGWVPELILCSDAMRTKETLKILQEHVHGLSEAVVHFIPSFYSIAAMDGQTAEHLQKAIXEYSSDEILTXMCMGHNKGWEEXAXMFXGDSVLLXTCNAALLEAAGKSWVEAFFVAGXGGWKLHGIVKP

SEQ ID NO: 14636 - DNA, 1530 bp, Zea mays subsp. mays
  misc_feature (1)..(1530): Ceres Seq. ID no. 13496483
  misc_feature (1)..(1530): Ortholog of  Ceres SEQ ID NO 15176709 as cited in SEQ ID NO 1148
  misc_feature (1)..(1530): Ortholog of  Ceres SEQ ID NO 13658922 as cited in SEQ ID NO 66316
gtcgaggccgccgcccagaccgcctccccttccccgcctccggtgcccaaggccaggccaacagttttgaggtggtaatggcggaccaggctaaccaacccactgtccttcataagctaggtggccagttccacctgagctccagcttctctgaaggtgtacgggcccgtaacatctgcccttctttctcaccttatgaaaggagatttgccacgaggaactacatgacccagagcctttggggcccttcaatgtctgttagcggtggcatcaatgttccagtgatgccgactccgctttttgccaatgctccagccgagaaaggtggcaaaaacttcatgattgatttcatgatgggcggtgtttcagctgctgtttcgaagactgcagctgctcccattgaacgagtgaagctgcttattcagaatcaggatgagatgatcaagtctggtaggctatcagagccgtacaagggtattgctgattgcttcaaacgtaccatcaaggatgagggtttctcttccttgtggaggggtaacactgctaatgttattcgttacttccctactcaggctttgaactttgcgtttaaggactacttcaagaggctgttcaacttcaagaaggacagggatggttactggaagtggtttgctggcaacctggcctctggtggtgctgctggtgcttcctctttgttttttgtgtactccctggattatgcgaggacaaggttggccaatgatgccaaggctgccaagggaggaggcgatagacaattcaatggtcttgtggatgtctaccgcaagacactcaaatctgatggtattgctgggctttaccgtggatttaacatatcttgtgttggaattattgtttatcgtggcctgtatttcggactttacgattctatcaagccagttgtcctcactggcagcctccaggacaacttctttgccagttttgctctgggttggctgatcaccaacggtgctggtcttgcatcttaccccattgatactgtccgcagaaggatgatgatgacttctggtgaggctgtcaagtacaagagctcattggacgcattccagcagatccttaagaaggaaggccccaagtccctgttcaagggtgctggtgctaacattcttcgtgccattgctggcgctggtgtgctttctggctacgaccagctccagatcctcttcttcggaaagaagtacggctccggcggtgcttaaatggagaaaaatgatgacgaacaagagcagttcgctcccggtccagcccagtcaggatctggtcaagtttttgcctttcatatcgaagaaattaataatttatgtaggagaatttttccaacattcgttttgggcggagacattgatctcaaaacactcgtaactgtcctactaggtggtggcatgggtccccaaaacatggtcatagggtgtgtctagtctgcccttcgttgcagccgggcaattttccttacatatattgcctttaatcaagtatcagatgagtgtc

SEQ ID NO: 14637 - protein, 412 aa, Zea mays subsp. mays
  peptide (1)..(412): Ceres Seq. ID no. 13496484
RGRRPDRLPFPASGAQGQANSFEVVMADQANQPTVLHKLGGQFHLSSSFSEGVRARNICPSFSPYERRFATRNYMTQSLWGPSMSVSGGINVPVMPTPLFANAPAEKGGKNFMIDFMMGGVSAAVSKTAAAPIERVKLLIQNQDEMIKSGRLSEPYKGIADCFKRTIKDEGFSSLWRGNTANVIRYFPTQALNFAFKDYFKRLFNFKKDRDGYWKWFAGNLASGGAAGASSLFFVYSLDYARTRLANDAKAAKGGGDRQFNGLVDVYRKTLKSDGIAGLYRGFNISCVGIIVYRGLYFGLYDSIKPVVLTGSLQDNFFASFALGWLITNGAGLASYPIDTVRRRMMMTSGEAVKYKSSLDAFQQILKKEGPKSLFKGAGANILRAIAGAGVLSGYDQLQILFFGKKYGSGGA

SEQ ID NO: 14638 - protein, 387 aa, Zea mays subsp. mays
  peptide (1)..(387): Ceres Seq. ID no. 13496485
MADQANQPTVLHKLGGQFHLSSSFSEGVRARNICPSFSPYERRFATRNYMTQSLWGPSMSVSGGINVPVMPTPLFANAPAEKGGKNFMIDFMMGGVSAAVSKTAAAPIERVKLLIQNQDEMIKSGRLSEPYKGIADCFKRTIKDEGFSSLWRGNTANVIRYFPTQALNFAFKDYFKRLFNFKKDRDGYWKWFAGNLASGGAAGASSLFFVYSLDYARTRLANDAKAAKGGGDRQFNGLVDVYRKTLKSDGIAGLYRGFNISCVGIIVYRGLYFGLYDSIKPVVLTGSLQDNFFASFALGWLITNGAGLASYPIDTVRRRMMMTSGEAVKYKSSLDAFQQILKKEGPKSLFKGAGANILRAIAGAGVLSGYDQLQILFFGKKYGSGGA

SEQ ID NO: 14639 - protein, 338 aa, Zea mays subsp. mays
  peptide (1)..(338): Ceres Seq. ID no. 13496486
MTQSLWGPSMSVSGGINVPVMPTPLFANAPAEKGGKNFMIDFMMGGVSAAVSKTAAAPIERVKLLIQNQDEMIKSGRLSEPYKGIADCFKRTIKDEGFSSLWRGNTANVIRYFPTQALNFAFKDYFKRLFNFKKDRDGYWKWFAGNLASGGAAGASSLFFVYSLDYARTRLANDAKAAKGGGDRQFNGLVDVYRKTLKSDGIAGLYRGFNISCVGIIVYRGLYFGLYDSIKPVVLTGSLQDNFFASFALGWLITNGAGLASYPIDTVRRRMMMTSGEAVKYKSSLDAFQQILKKEGPKSLFKGAGANILRAIAGAGVLSGYDQLQILFFGKKYGSGGA

SEQ ID NO: 14640 - DNA, 709 bp, Zea mays subsp. mays
  misc_feature (1)..(709): Ceres Seq. ID no. 12468116
  misc_feature (1)..(709): Ortholog of  Ceres SEQ ID NO 14303959 as cited in SEQ ID NO 53709
tccatggtagttcagttgattggtggactcttggaatcttcctttacgaattactctatggcaagacaccattcaagggacctggcaatgaggaaacactctcaaatgtgatctcacagggcttgaagttccctgataatccagctgtaagcttccacgctcgagatctgatcagaggtctgcttgtgaaagagcctgagtaccggcttggctcgtcgagaggagccactgagattaagcggcatcccttctttgaaggcctgaactgggccttgatccggtggaccgcaccaccagagaccctgaagaacattgacactgcaccaacacctgcaacgacacgcaagaagaaggaaggcaaatgtctggaattccggctgaatggtgacgacatcgagttcgagctattttagttgtagttgtagtggcatcgctgttgtagtctcaaggatatatcaaatatcatgataagctagcaagagtagtcttagtccctcttccctgcagttttctgttgaaagttagtcatcgttgggaagtaaggtaagattggctgttaggcctgtaactttatgccttgttaataccatcaaatattagaagacacggttgggaaattcctgggcatgtgcgagatgntgagatgcagctggcagaaagtgtacattgtgttgctggatggaacaatttgtgcctcgcttacttgatg

SEQ ID NO: 14641 - protein, 136 aa, Zea mays subsp. mays
  peptide (1)..(136): Ceres Seq. ID no. 12468117
HGSSVDWWTLGIFLYELLYGKTPFKGPGNEETLSNVISQGLKFPDNPAVSFHARDLIRGLLVKEPEYRLGSSRGATEIKRHPFFEGLNWALIRWTAPPETLKNIDTAPTPATTRKKKEGKCLEFRLNGDDIEFELF

SEQ ID NO: 14642 - DNA, 838 bp, Zea mays subsp. mays
  misc_feature (1)..(838): Ceres Seq. ID no. 12468112
  misc_feature (1)..(838): Ortholog of  Ceres SEQ ID NO 15225703 as cited in SEQ ID NO 59527
  misc_feature (1)..(838): Ortholog of  Ceres SEQ ID NO 12615972 as cited in SEQ ID NO 62455
  misc_feature (1)..(838): Ortholog of  Ceres SEQ ID NO 13596229 as cited in SEQ ID NO 68800
  misc_feature (1)..(838): Ortholog of  Ceres SEQ ID NO 15179393 as cited in SEQ ID NO 0
atcggcgtccgcctggagcagcagtttggattctggaaggtgggcctggtgtacctcgtctctggcttcggagggagcgtgctctccgtcttcttcatcaggaagggcgtctccgtgggcgcctccggcgcgctcttcggcctcctgggagcgatgctgtcggagctcatcaccaactggtccatctacaccaacagatttgcagccatgctgaacctgatcatcatcgccgccatcaacctggcgctcgggatactcccgcacgttgacaacttcgcgcacatcggcgggttcgccacaggcttcctcctcggcttcgtgctgctgatccagccccagttcgggtggctggagcagcccttcggtgccaagaccaagtccaagtacaaggcatatcagatcatcctcctgcttgctgccctcgtcttgctggctgcagggttcgctgttggattggtaatggtgttcagaggagagaacggcaacgatcactgtagctggtgccactacctgacctgcgtgccgacgtcaagctggaagtgtgacaattgaactgatcagagattagtgacgggttagcatgcttgcgtcgtacagaagagaacatgcgtccccaccacgagagacaatgtcaagatagatacgtgcccctcaccttntatgacattgtcaatgtattgctttcaagtttgatttttaaagtctgcattgtacagaattctcctgcctccattggatccaaatgaggagtttattggtattttttcttgtatatgttaaaaaaaactctgtaaatcactctgcctgtgttctggtttatggttttattcattgattc

SEQ ID NO: 14643 - protein, 183 aa, Zea mays subsp. mays
  peptide (1)..(183): Ceres Seq. ID no. 12468113
IGVRLEQQFGFWKVGLVYLVSGFGGSVLSVFFIRKGVSVGASGALFGLLGAMLSELITNWSIYTNRFAAMLNLIIIAAINLALGILPHVDNFAHIGGFATGFLLGFVLLIQPQFGWLEQPFGAKTKSKYKAYQIILLLAALVLLAAGFAVGLVMVFRGENGNDHCSWCHYLTCVPTSSWKCDN

SEQ ID NO: 14644 - protein, 132 aa, Zea mays subsp. mays
  peptide (1)..(132): Ceres Seq. ID no. 12468114
MLSELITNWSIYTNRFAAMLNLIIIAAINLALGILPHVDNFAHIGGFATGFLLGFVLLIQPQFGWLEQPFGAKTKSKYKAYQIILLLAALVLLAAGFAVGLVMVFRGENGNDHCSWCHYLTCVPTSSWKCDN

SEQ ID NO: 14645 - protein, 114 aa, Zea mays subsp. mays
  peptide (1)..(114): Ceres Seq. ID no. 12468115
MLNLIIIAAINLALGILPHVDNFAHIGGFATGFLLGFVLLIQPQFGWLEQPFGAKTKSKYKAYQIILLLAALVLLAAGFAVGLVMVFRGENGNDHCSWCHYLTCVPTSSWKCDN

SEQ ID NO: 14646 - DNA, 1842 bp, Zea mays subsp. mays
  misc_feature (1)..(1842): Ceres Seq. ID no. 13574386
  misc_feature (1)..(1842): Ortholog of  Ceres SEQ ID NO 14302588 as cited in SEQ ID NO 0
ggtgtctcacccttccggacgaaatctgacccgggccacactccgctgctccgccatggcgatccgctccaaggcctggatctcgctgttgctcgcgctggccgtcgcgctctccgcccgggcggaggaggagcccgccgccgccgcggagggcgaggccgtgctcaccctcgacgtcgacagcttcgacgaggccgtcgccaagcaccccttcatggtcgtcgagttctacgccccctggtgtgggcactgcaagaaacttgctccagagtatgagaatgcggccaaggcacttagcaagcatgacccaccgattgttctcgctaaggttgatgctaacgaggagaagaacaggccgcttgctaccaagtacgagatccaagggttcccaaccatcaagatattcagggaccgggggaagaacattcaggaatacaagggccctagggaggctgatggcattgtggattacttgaagaagcaggttggccctgcgtccaaggagatcaagtcaccagaagatgcgacggcccttatcgatgacaagaagatctacattgttggtatcttcgctgaattcagcggcaccgaatttacaaacttcatggaggtcgcagagaagctgaggtctgactacgactttggccacactttgcatgccaaccacctcccacgtggtgatgcagcagtggaacggccattggtcaggctgctgaagccatttgatgagcttgttgttgacagcaaggattttgatgtcgctgcactgatgaagtttattgatgctagcaccatccctagagttgtcacttttgacaagaaccctgacaaccacccatacctcatgaaattcttccaaagctcagcccccaaggctatgctgtttttgaacttctccaccggaccttttgattctttcaagtctgcctactctgctgccgcggaggaattcaaggacaaggaaatcaagttccttattggtgacatcgaagccagccagggtgccttccagtactttggcctgaaagaggaccagacaccccttatcctcatccaggatggtgactccaagaagttcttgaaggttcacgttgaggctgaccagatcgtcgcttggttgaaggagtactttgacggcaaattgacgccgttcaggaattctgagcctattcctgaggtcaacaatgagcctgttaaggtggttgtcgctgacaacgtccacgacttcgtcttcaaatctggcaaaaatgtccttattgaattctatgccccctggtgcggacactgcaagaagctggcgcccatcttggacgaggcagccaccactctccagagcgacgaggaagtcgtgattgctaagatggacgcgactgccaatgacgttcccagtgagtttgacgtccaaggctacccgaccttgtacttcgtgaccccgagcgggaaggtgacatcctacgacagcggcaggacggcggacgacatcgtcgacttcatcaagaagagcaaggagaccgcagcgccgcaccaccaccaccacccaggcgccaccggcatccgagaaggcagccgcgccgagcccgtcaaggacgagctgtgagcatccaaggtgtggacggctgtggctgcgtaagcatgggaggaaaacctggcgctaacgtgcctccaacgcctagtttttgcgggaccagagggagagagagagagggacggagttagagagagaggggatctgcgacgtgttttgctctgcggcggcatgttgtgtatcccattgaggttatgtacacaattacaccgcggtcggtgggtgtctttttagttaattatcacaagtgacagtag

SEQ ID NO: 14647 - protein, 531 aa, Zea mays subsp. mays
  peptide (1)..(531): Ceres Seq. ID no. 13574387
VSHPSGRNLTRATLRCSAMAIRSKAWISLLLALAVALSARAEEEPAAAAEGEAVLTLDVDSFDEAVAKHPFMVVEFYAPWCGHCKKLAPEYENAAKALSKHDPPIVLAKVDANEEKNRPLATKYEIQGFPTIKIFRDRGKNIQEYKGPREADGIVDYLKKQVGPASKEIKSPEDATALIDDKKIYIVGIFAEFSGTEFTNFMEVAEKLRSDYDFGHTLHANHLPRGDAAVERPLVRLLKPFDELVVDSKDFDVAALMKFIDASTIPRVVTFDKNPDNHPYLMKFFQSSAPKAMLFLNFSTGPFDSFKSAYSAAAEEFKDKEIKFLIGDIEASQGAFQYFGLKEDQTPLILIQDGDSKKFLKVHVEADQIVAWLKEYFDGKLTPFRNSEPIPEVNNEPVKVVVADNVHDFVFKSGKNVLIEFYAPWCGHCKKLAPILDEAATTLQSDEEVVIAKMDATANDVPSEFDVQGYPTLYFVTPSGKVTSYDSGRTADDIVDFIKKSKETAAPHHHHHPGATGIREGSRAEPVKDEL

SEQ ID NO: 14648 - protein, 513 aa, Zea mays subsp. mays
  peptide (1)..(513): Ceres Seq. ID no. 13574388
MAIRSKAWISLLLALAVALSARAEEEPAAAAEGEAVLTLDVDSFDEAVAKHPFMVVEFYAPWCGHCKKLAPEYENAAKALSKHDPPIVLAKVDANEEKNRPLATKYEIQGFPTIKIFRDRGKNIQEYKGPREADGIVDYLKKQVGPASKEIKSPEDATALIDDKKIYIVGIFAEFSGTEFTNFMEVAEKLRSDYDFGHTLHANHLPRGDAAVERPLVRLLKPFDELVVDSKDFDVAALMKFIDASTIPRVVTFDKNPDNHPYLMKFFQSSAPKAMLFLNFSTGPFDSFKSAYSAAAEEFKDKEIKFLIGDIEASQGAFQYFGLKEDQTPLILIQDGDSKKFLKVHVEADQIVAWLKEYFDGKLTPFRNSEPIPEVNNEPVKVVVADNVHDFVFKSGKNVLIEFYAPWCGHCKKLAPILDEAATTLQSDEEVVIAKMDATANDVPSEFDVQGYPTLYFVTPSGKVTSYDSGRTADDIVDFIKKSKETAAPHHHHHPGATGIREGSRAEPVKDEL

SEQ ID NO: 14649 - protein, 460 aa, Zea mays subsp. mays
  peptide (1)..(460): Ceres Seq. ID no. 13574389
MVVEFYAPWCGHCKKLAPEYENAAKALSKHDPPIVLAKVDANEEKNRPLATKYEIQGFPTIKIFRDRGKNIQEYKGPREADGIVDYLKKQVGPASKEIKSPEDATALIDDKKIYIVGIFAEFSGTEFTNFMEVAEKLRSDYDFGHTLHANHLPRGDAAVERPLVRLLKPFDELVVDSKDFDVAALMKFIDASTIPRVVTFDKNPDNHPYLMKFFQSSAPKAMLFLNFSTGPFDSFKSAYSAAAEEFKDKEIKFLIGDIEASQGAFQYFGLKEDQTPLILIQDGDSKKFLKVHVEADQIVAWLKEYFDGKLTPFRNSEPIPEVNNEPVKVVVADNVHDFVFKSGKNVLIEFYAPWCGHCKKLAPILDEAATTLQSDEEVVIAKMDATANDVPSEFDVQGYPTLYFVTPSGKVTSYDSGRTADDIVDFIKKSKETAAPHHHHHPGATGIREGSRAEPVKDEL

SEQ ID NO: 14650 - DNA, 1932 bp, Zea mays subsp. mays; identical to SEQ ID NO: 5189
  misc_feature (1)..(1932): Ceres Seq. ID no. 13637288
  misc_feature (1)..(1932): Ortholog of  Ceres SEQ ID NO 13596021 as cited in SEQ ID NO 62020

SEQ ID NO: 14651 - protein, 538 aa, Zea mays subsp. mays; identical to SEQ ID NO: 5190
  peptide (1)..(538): Ceres Seq. ID no. 13637289

SEQ ID NO: 14652 - protein, 517 aa, Zea mays subsp. mays; identical to SEQ ID NO: 5191
  peptide (1)..(517): Ceres Seq. ID no. 13637290

SEQ ID NO: 14653 - protein, 474 aa, Zea mays subsp. mays; identical to SEQ ID NO: 5192
  peptide (1)..(474): Ceres Seq. ID no. 13637291

SEQ ID NO: 14654 - DNA, 661 bp, Zea mays subsp. mays
  misc_feature (1)..(661): Ceres Seq. ID no. 12468098
  misc_feature (1)..(661): Ortholog of  Ceres SEQ ID NO 15169244 as cited in SEQ ID NO 58988
tcgaggccgtgaagctcaaggcgagcaagctagccaagaagcacccgcgctgcctcgccgacggcaacgagctgctgcgcttccacggcgccacgctctcgtgcgcgctcggcggcggctccggctcttccagcctctgcgcctccgacaagtgcgccgtgtgccgcatcatccggcacggcttctccgccaggaaggagggcaagggcggcgtgggcgtgttcaccacgtccaccagcggccgcgcgttcgagtccatcgttgaggcgccccccgccatcggcgtcggcgacgacgacggagcgggccagctgggcctgggcaccgcgcgcagggcgctgctggtgtgcagggtcatcgccggccgcgtgcacaagccgctggacaacctcaaggagttcgtggggcagacgggcttcgattcgctcgccggcaaggtcggaccctactccaacatcgaggagctgtacctgctgaacccgagggcgctgctcccgtgcttcgtcgtcatctgtagaccgtagcctactactagctaaacaccccgtctcattcttctctcttcccacttttctctttcgattgctactctagtgtacgtagttaacacggacacggcatagctatcgcctatcggttggaaggtcggatggatttgtcc

SEQ ID NO: 14655 - protein, 173 aa, Zea mays subsp. mays
  peptide (1)..(173): Ceres Seq. ID no. 12468099
EAVKLKASKLAKKHPRCLADGNELLRFHGATLSCALGGGSGSSSLCASDKCAVCRIIRHGFSARKEGKGGVGVFTTSTSGRAFESIVEAPPAIGVGDDDGAGQLGLGTARRALLVCRVIAGRVHKPLDNLKEFVGQTGFDSLAGKVGPYSNIEELYLLNPRALLPCFVVICRP

SEQ ID NO: 14656 - protein, 87 aa, Zea mays subsp. mays
  peptide (1)..(87): Ceres Seq. ID no. 12468100
RGREAQGEQASQEAPALPRRRQRAAALPRRHALVRARRRLRLFQPLRLRQVRRVPHHPARLLRQEGGQGRRGRVHHVHQRPRVRVHR

SEQ ID NO: 14657 - DNA, 481 bp, Zea mays subsp. mays
  misc_feature (1)..(481): Ceres Seq. ID no. 3626194
  misc_feature (1)..(481): Ortholog of  Ceres SEQ ID NO 14309202 as cited in SEQ ID NO 0
gataacgactttgcttcttkrcagggaattgctgagaggtccactctattatgtcctggtgctgctgttcagcgttttagtcttctggcgtgagtcccccatcgggatcgtctccttgtcgatgatgagcggtggcgatggttttgctgacattgttgggaggaggtatggctcagcgaagctgccattcaatcggaagaagagctgggccgggagcatctcgatgttcatttctggtttcctgctgtccgctatgatgatgctctacttctcaagcctgggttacattgatgttatctgggaagaggcacttggtaagctggcgcttgttgcactagcagcaacagtagtggagtgcgttcctgtgaccgaagttgtagatgacaacatatctgttcctttggccaccatgctggtagcttttctcttgtttagctccaaccgcacaatagttaattaaaatactactagtgcattattt

SEQ ID NO: 14658 - protein, 152 aa, Zea mays subsp. mays
  peptide (1)..(152): Ceres Seq. ID no. 3626195
  misc_feature (7)..(7): Xaa is any aa, unknown or other
ITTLLLXRELLRGPLYYVLVLLFSVLVFWRESPIGIVSLSMMSGGDGFADIVGRRYGSAKLPFNRKKSWAGSISMFISGFLLSAMMMLYFSSLGYIDVIWEEALGKLALVALAATVVECVPVTEVVDDNISVPLATMLVAFLLFSSNRTIVN

SEQ ID NO: 14659 - protein, 112 aa, Zea mays subsp. mays
  peptide (1)..(112): Ceres Seq. ID no. 3626196
MMSGGDGFADIVGRRYGSAKLPFNRKKSWAGSISMFISGFLLSAMMMLYFSSLGYIDVIWEEALGKLALVALAATVVECVPVTEVVDDNISVPLATMLVAFLLFSSNRTIVN

SEQ ID NO: 14660 - protein, 111 aa, Zea mays subsp. mays
  peptide (1)..(111): Ceres Seq. ID no. 3626197
MSGGDGFADIVGRRYGSAKLPFNRKKSWAGSISMFISGFLLSAMMMLYFSSLGYIDVIWEEALGKLALVALAATVVECVPVTEVVDDNISVPLATMLVAFLLFSSNRTIVN

SEQ ID NO: 14661 - DNA, 1623 bp, Zea mays subsp. mays; identical to SEQ ID NO: 13556
  misc_feature (1)..(1623): Ceres Seq. ID no. 12462280
  misc_feature (1)..(1623): Ortholog of  Ceres SEQ ID NO 14314896 as cited in SEQ ID NO 54010
  misc_feature (1)..(1623): Ortholog of  Ceres SEQ ID NO 14308813 as cited in SEQ ID NO 55485
  misc_feature (1)..(1623): Ortholog of  Ceres SEQ ID NO 13655744 as cited in SEQ ID NO 64032

SEQ ID NO: 14662 - protein, 467 aa, Zea mays subsp. mays; identical to SEQ ID NO: 13557
  peptide (1)..(467): Ceres Seq. ID no. 12462281

SEQ ID NO: 14663 - protein, 447 aa, Zea mays subsp. mays; identical to SEQ ID NO: 13558
  peptide (1)..(447): Ceres Seq. ID no. 12462282

SEQ ID NO: 14664 - protein, 399 aa, Zea mays subsp. mays; identical to SEQ ID NO: 13559
  peptide (1)..(399): Ceres Seq. ID no. 12462283

SEQ ID NO: 14665 - DNA, 492 bp, Zea mays subsp. mays
  misc_feature (1)..(492): Ceres Seq. ID no. 3626206
  misc_feature (1)..(492): Ortholog of  Ceres SEQ ID NO 13654054 as cited in SEQ ID NO 67735
tttttgcaggttcctggksctcaaggtagctttgttttcsttaaggattctatatataagaaacctgacacggctttgctcccatttcctacatacttcacgcgtgaaggtgagcctgaagacttggagcccctgattgctgatcttggtgatgttgacccattcatggcagccgattaagacaatgcacaaagttggttaattcctttttgtgttctaagcactccttgagctcgtccattccacgagattgtcaaactctcgatggatgtgagcaattcctgaatcacaagctatatccggttactggccagcctgatcaatgttgttccatgtacattacctggcaagtataccagtgctataatggkttttatatgattgktttgattgaccgaatataaccttttcctcaataagttgtacgcggagccacaagtagtatataaaatcagaatatttcactcatgaragtgtgttctggktttacsc

SEQ ID NO: 14666 - protein, 59 aa, Zea mays subsp. mays
  peptide (1)..(59): Ceres Seq. ID no. 3626207
  misc_feature (6)..(6): Xaa is any aa, unknown or other
  misc_feature (7)..(7): Xaa is any aa, unknown or other
  misc_feature (14)..(14): Xaa is any aa, unknown or other
FLQVPXXQGSFVFXKDSIYKKPDTALLPFPTYFTREGEPEDLEPLIADLGDVDPFMAAD

SEQ ID NO: 14667 - protein, 44 aa, Zea mays subsp. mays
  peptide (1)..(44): Ceres Seq. ID no. 3626208
  misc_feature (6)..(6): Xaa is any aa, unknown or other
  misc_feature (13)..(13): Xaa is any aa, unknown or other
FCRFLXLKVALFXLRILYIRNLTRLCSHFLHTSRVKVSLKTWSP

SEQ ID NO: 14668 - DNA, 577 bp, Zea mays subsp. mays
  misc_feature (1)..(577): Ceres Seq. ID no. 3626253
  misc_feature (1)..(577): Ortholog of  Ceres SEQ ID NO 13594298 as cited in SEQ ID NO 57803
ggttcgaccccaccgccgactkccacacctactccatccagtggacgcagcagcacatcctcgtgctggtggacgggacgccgatccgggagttcaagaaccacgcggaccggggcgtgccgtacccgtcgtcgcagcggatgcgcctctacggctcgctgtgggacgccgaggactgggccacgcagggcggccgcgtgaagacggactggtcgcgggcccccttcgtggcgcagtaccgcaacttcacggccgcgccgccggccacggcggcggacggccggtacgggcaacagatggacgccgcggcgcagcaggccatgaagtgggcgcgggacaactacatggtctacgactactgcgccgacaccaagcgcttcccgcagggcgcgccgcctgagtgctccatggcgtagaggtgctgggctgaaccacggtgcacttcgattgcgatgtcgatcagctagtgcacactatatacgacgcacgggtcaattcattgtttataccgatcgatcgattctctggtgtgaaagaaatactctagtataatttaattcatttggttggttgcaag

SEQ ID NO: 14669 - protein, 137 aa, Zea mays subsp. mays
  peptide (1)..(137): Ceres Seq. ID no. 3626254
  misc_feature (7)..(7): Xaa is any aa, unknown or other
FDPTADXHTYSIQWTQQHILVLVDGTPIREFKNHADRGVPYPSSQRMRLYGSLWDAEDWATQGGRVKTDWSRAPFVAQYRNFTAAPPATAADGRYGQQMDAAAQQAMKWARDNYMVYDYCADTKRFPQGAPPECSMA

SEQ ID NO: 14670 - protein, 132 aa, Zea mays subsp. mays
  peptide (1)..(132): Ceres Seq. ID no. 3626255
  misc_feature (7)..(7): Xaa is any aa, unknown or other
VRPHRRXPHLLHPVDAAAHPRAGGRDADPGVQEPRGPGRAVPVVAADAPLRLAVGRRGLGHAGRPREDGLVAGPLRGAVPQLHGRAAGHGGGRPVRATDGRRGAAGHEVGAGQLHGLRLLRRHQALPAGRAA

SEQ ID NO: 14671 - protein, 91 aa, Zea mays subsp. mays
  peptide (1)..(91): Ceres Seq. ID no. 3626256
MRLYGSLWDAEDWATQGGRVKTDWSRAPFVAQYRNFTAAPPATAADGRYGQQMDAAAQQAMKWARDNYMVYDYCADTKRFPQGAPPECSMA

SEQ ID NO: 14672 - DNA, 841 bp, Zea mays subsp. mays
  misc_feature (1)..(841): Ceres Seq. ID no. 12450665
  misc_feature (1)..(841): Ortholog of  Ceres SEQ ID NO 15226418 as cited in SEQ ID NO 66452
atgctacatcagcccctcgatggttcttctagtgttcctactcaatctcttgtgacctcagtaggcttaacctcacaagttcagctaccattggtgccacagcaccctggaccatctgtcatgcctacaagtgtacaacagctacctttgacccaccctcatcttgctcaggtagctgttgcacctgagaccctaccaaatgaaataagtactttggcagagtttacccatccctcaaagttgagaaaattggaggatggaacctcggtgcctggaatggtgaacagcagccatgctgtttatacagttccactgcaagcagtgggccctagcggaccatcagggagctatagtgctggttctgttagcttacagcaaccagggaatgaagagcagcttacgcctgatgtggagtcagctcttntgcagcaagtcttgcagctgacacccgagcagctgagttcgttgccaccagagcaacagcagcaggtgattgagctccagaagatgctttcagttagtaaatagaagcaactgagagctaacgcagcaaaaatgctggttgagaatctggcacatcacataatggcgagttggtaactagtggaaactggaaatgatcctcagatttgtttatgaagtcaccacgccgcctgtaacctgtaagcattgtcggcatcctgatgccatcaggatccatatggttttctttcttcagctcggagataaaagaaatgtgataggagaagagtagtgtggaaaaagggatacgcattatccatcactgttgtatcattatagggagaaaaaaataatatgtattcaaaggaactttttttcg

SEQ ID NO: 14673 - protein, 175 aa, Zea mays subsp. mays
  peptide (1)..(175): Ceres Seq. ID no. 12450666
  misc_feature (142)..(142): Xaa is any aa, unknown or other
MLHQPLDGSSSVPTQSLVTSVGLTSQVQLPLVPQHPGPSVMPTSVQQLPLTHPHLAQVAVAPETLPNEISTLAEFTHPSKLRKLEDGTSVPGMVNSSHAVYTVPLQAVGPSGPSGSYSAGSVSLQQPGNEEQLTPDVESALXQQVLQLTPEQLSSLPPEQQQQVIELQKMLSVSK

SEQ ID NO: 14674 - protein, 135 aa, Zea mays subsp. mays
  peptide (1)..(135): Ceres Seq. ID no. 12450667
  misc_feature (102)..(102): Xaa is any aa, unknown or other
MPTSVQQLPLTHPHLAQVAVAPETLPNEISTLAEFTHPSKLRKLEDGTSVPGMVNSSHAVYTVPLQAVGPSGPSGSYSAGSVSLQQPGNEEQLTPDVESALXQQVLQLTPEQLSSLPPEQQQQVIELQKMLSVSK

SEQ ID NO: 14675 - DNA, 532 bp, Zea mays subsp. mays
  misc_feature (1)..(532): Ceres Seq. ID no. 3626306
  misc_feature (1)..(532): Ortholog of  Ceres SEQ ID NO 13624551 as cited in SEQ ID NO 0
aagtacaccgagaagcagatggcgtcgctgagcgccgactacgggctggatttgggcaccgtcagaggaaccgtcaacaacgcctgccggattcttgaggtgcggagggacttttgctcgctggacaagtacgtgtgggcgttcgtgaacaacaagccgctgtcgccgagctacaagtacagccggaagatcccggtgaagacgtccaagtcggagtccatcagcaaggacatggtcaggcgcggcttccgcttcgtcggccccactgtcatccactccttcatggaggcggtcgggctcaccaacgaccacctcgtctcgtgcccgcgccaccgcgtytgctcctccgccgscgscgscgsccgcgttaataataactgattctgctgacgaccaccaagcaaaacacaagaggggattatctaaggacaaccaaaacgagagagagagaggtagcagtagtaatatacaaaggagagtgctggtttgaaagtgtgtatgatgacccartgtgcttgkgtagattaattac

SEQ ID NO: 14676 - protein, 126 aa, Zea mays subsp. mays
  peptide (1)..(126): Ceres Seq. ID no. 3626307
  misc_feature (113)..(113): Xaa is any aa, unknown or other
  misc_feature (118)..(118): Xaa is any aa, unknown or other
  misc_feature (119)..(119): Xaa is any aa, unknown or other
  misc_feature (120)..(120): Xaa is any aa, unknown or other
  misc_feature (121)..(121): Xaa is any aa, unknown or other
KYTEKQMASLSADYGLDLGTVRGTVNNACRILEVRRDFCSLDKYVWAFVNNKPLSPSYKYSRKIPVKTSKSESISKDMVRRGFRFVGPTVIHSFMEAVGLTNDHLVSCPRHRXCSSAXXXXRVNNN

SEQ ID NO: 14677 - protein, 120 aa, Zea mays subsp. mays
  peptide (1)..(120): Ceres Seq. ID no. 3626308
  misc_feature (107)..(107): Xaa is any aa, unknown or other
  misc_feature (112)..(112): Xaa is any aa, unknown or other
  misc_feature (113)..(113): Xaa is any aa, unknown or other
  misc_feature (114)..(114): Xaa is any aa, unknown or other
  misc_feature (115)..(115): Xaa is any aa, unknown or other
MASLSADYGLDLGTVRGTVNNACRILEVRRDFCSLDKYVWAFVNNKPLSPSYKYSRKIPVKTSKSESISKDMVRRGFRFVGPTVIHSFMEAVGLTNDHLVSCPRHRXCSSAXXXXRVNNN

SEQ ID NO: 14678 - DNA, 1486 bp, Zea mays subsp. mays
  misc_feature (1)..(1486): Ceres Seq. ID no. 14307928
  misc_feature (1)..(1486): Ortholog of  Ceres SEQ ID NO 15176230 as cited in SEQ ID NO 58796
  misc_feature (1)..(1486): Ortholog of  Ceres SEQ ID NO 14308156 as cited in SEQ ID NO 59006
  misc_feature (1)..(1486): Ortholog of  Ceres SEQ ID NO 13596321 as cited in SEQ ID NO 67976
gctgctgcctgctcttctttttctgctgagtacaagaaacagtctttgctcgcgtcgtgggttcttcccctgttcgattcaccgcgaggtctgcgacggaggtttgcgtgcctccgattgctgcatccgttgctgatcgaggagactgggaccttcaaagagcaataggactcatggaggttggagacgcaagaaacggttctgcagcagcggcactgacaaagggaagtgcggatgatgccgcccgcaaaccgctccctccttgctgcgtcaaggccaaggcgcgtgtgcctgaaaccgaggccaactgccatgatactgtggtttcagggtggttcacggaacccagatcgcgttttggtaaaacaagcaaagtgcagtacttcaataacccgatgtggcctggagaggctcattcattgaaagtggagaagatcttgtttcaagggaaatcgccttaccaagaaattttagtttttgagtcttcaacctatggaaatgttcttgtgcttgatggtatagttcagttgactgacaaggatgaatgcgcataccaggaaatggttactcaccttccactgtgctcaattcctgcaccgaagaatgttttggttgttggaggtggtgatggtggtgtactgcgcgaaatagccagacatgattcagtggaaactattgatatatgtgagattgatcaactagttattgatgtttgcaaagaattctttccaaacttatccattggattcaaagatcctcgtgtccgacttcatgttggtgatgctgttgatttcctgaggaattctcccgaaggaaaatatgatgctattattgtagattcatcagatccaattgggccagcacaggcactcgtggagaaactgtttattcagacaattgctagagctttgaagcctggtggtgttctttgtaatcttgctgagagcatgtggctgcacacacatctaatccaggatatgcttgctatctgtcgacagacattcaaaggtgctgtgcactatgcctggacaagtgttccaacatatcccagtggtgtcattggatttttgctatgtgcaaaagaaggtcgtgcagtgaacttcttaactcctgtgaatccaattgagaaaatagaaggaacaacaaaagctggaagggaactcagattttacaattccgagatccatagggctgcttttgttctgccaacatttgtaagaagagaactggaagcatataccactcctagtacctctgctgaaaacgagaaaccgaaagaatcggtgtcagaaccgcagaagataaagatattgtcaaacaacgccattcttacagcttcctagccctgagccgtactcaatcttgctcggtatagttgtattctcacagaataaatcagtcactggcttttgctgacaccgcacgagcagctttagtatagtgagttgaatgatgatcgattgaataagagggtagatattgaact

SEQ ID NO: 14679 - protein, 389 aa, Zea mays subsp. mays
  peptide (1)..(389): Ceres Seq. ID no. 14307929
MEVGDARNGSAAAALTKGSADDAARKPLPPCCVKAKARVPETEANCHDTVVSGWFTEPRSRFGKTSKVQYFNNPMWPGEAHSLKVEKILFQGKSPYQEILVFESSTYGNVLVLDGIVQLTDKDECAYQEMVTHLPLCSIPAPKNVLVVGGGDGGVLREIARHDSVETIDICEIDQLVIDVCKEFFPNLSIGFKDPRVRLHVGDAVDFLRNSPEGKYDAIIVDSSDPIGPAQALVEKLFIQTIARALKPGGVLCNLAESMWLHTHLIQDMLAICRQTFKGAVHYAWTSVPTYPSGVIGFLLCAKEGRAVNFLTPVNPIEKIEGTTKAGRELRFYNSEIHRAAFVLPTFVRRELEAYTTPSTSAENEKPKESVSEPQKIKILSNNAILTAS

SEQ ID NO: 14680 - protein, 315 aa, Zea mays subsp. mays
  peptide (1)..(315): Ceres Seq. ID no. 14307930
MWPGEAHSLKVEKILFQGKSPYQEILVFESSTYGNVLVLDGIVQLTDKDECAYQEMVTHLPLCSIPAPKNVLVVGGGDGGVLREIARHDSVETIDICEIDQLVIDVCKEFFPNLSIGFKDPRVRLHVGDAVDFLRNSPEGKYDAIIVDSSDPIGPAQALVEKLFIQTIARALKPGGVLCNLAESMWLHTHLIQDMLAICRQTFKGAVHYAWTSVPTYPSGVIGFLLCAKEGRAVNFLTPVNPIEKIEGTTKAGRELRFYNSEIHRAAFVLPTFVRRELEAYTTPSTSAENEKPKESVSEPQKIKILSNNAILTAS

SEQ ID NO: 14681 - protein, 260 aa, Zea mays subsp. mays
  peptide (1)..(260): Ceres Seq. ID no. 14307931
MVTHLPLCSIPAPKNVLVVGGGDGGVLREIARHDSVETIDICEIDQLVIDVCKEFFPNLSIGFKDPRVRLHVGDAVDFLRNSPEGKYDAIIVDSSDPIGPAQALVEKLFIQTIARALKPGGVLCNLAESMWLHTHLIQDMLAICRQTFKGAVHYAWTSVPTYPSGVIGFLLCAKEGRAVNFLTPVNPIEKIEGTTKAGRELRFYNSEIHRAAFVLPTFVRRELEAYTTPSTSAENEKPKESVSEPQKIKILSNNAILTAS

SEQ ID NO: 14682 - DNA, 1191 bp, Zea mays subsp. mays
  misc_feature (1)..(1191): Ceres Seq. ID no. 13599050
  misc_feature (1)..(1191): Ortholog of  Ceres SEQ ID NO 13596939 as cited in SEQ ID NO 63051
ggtatttaagacagcttcaaaaggttggggagtcaggacttgggacactatcctccctggggctcccatctgtgagtacacgggggtgttgaggaggactgaagatctggatggttcacagaacaactattgttttgacattgattgtcttcaaaccatgaaaggtttggatggaagggagaaaagagctggatctgaaatgcacctgcctaatctttatccagagaatgactcagatgcaccacctgcacctgagtactgcatagacggcagttccattggcaattttgcaagatttataaatcatagttgccaacctaaccttttcgtccagtgcgtcatgagctcacacaacgatgttaaactagcaaaagtgatgctttttgctgctgacacaatacttcctcttcaggagctatcctatgactacggttatcgcttggacagtgttgttgggcctgatggtaaaattgtgaagctgccatgccactgtggtgctccagattgccggaagcgcctctactagacctgcagtgtgtttccattttgattttgcaggaaacaacctatattgtaggaaagcattcatgttatttatgtagttggcatgctctgatatatagcgaaagaggagcaacttaatctccttttagagcattcttattttgtgataattggaggacatgctggtcatggtagcatattttgcaggaaatcaattaactgannanaaaaaaaaaaaaaaaaaaaaaaaaaaaaaaaaaaaaaaaaaaaaaaaaaaaaaaaaggagaaaaaaaaaaaaaaaaaggaattcctgcaccccggggaatccacaatttcaaaaggggccccccccgcgggggagccccagcttttgttcccttggggaggctgccaatttactgatttagggaatgagggggtttttgaggggctccaggggtttctgtttcaatcagttgcccctcctgttcagttactgaggggggggggggaaagggaaaaagaaccgccggacataagggttatttctgttctcattgccgaaaaacatggaaattgaagttcatttacaccgtttctcaacccggtacgcaccaaaaaatcattgatatggccataaagggcgttgaatgccggcaaacagcccgaattatgggggttggcctcaacacgattttacgtcactt

SEQ ID NO: 14683 - protein, 174 aa, Zea mays subsp. mays
  peptide (1)..(174): Ceres Seq. ID no. 13599051
VFKTASKGWGVRTWDTILPGAPICEYTGVLRRTEDLDGSQNNYCFDIDCLQTMKGLDGREKRAGSEMHLPNLYPENDSDAPPAPEYCIDGSSIGNFARFINHSCQPNLFVQCVMSSHNDVKLAKVMLFAADTILPLQELSYDYGYRLDSVVGPDGKIVKLPCHCGAPDCRKRLY

SEQ ID NO: 14684 - protein, 126 aa, Zea mays subsp. mays
  peptide (1)..(126): Ceres Seq. ID no. 13599052
  misc_feature (15)..(15): Xaa is any aa, unknown or other
  misc_feature (16)..(16): Xaa is any aa, unknown or other
MLVMVAYFAGNQLTXXKKKKKKKKKKKKKKKKKKKEKKKKKKEFLHPGESTISKGAPPAGEPQLLFPWGGCQFTDLGNEGVFEGLQGFLFQSVAPPVQLLRGGGEREKEPPDIRVISVLIAEKHGN

SEQ ID NO: 14685 - protein, 123 aa, Zea mays subsp. mays
  peptide (1)..(123): Ceres Seq. ID no. 13599053
  misc_feature (12)..(12): Xaa is any aa, unknown or other
  misc_feature (13)..(13): Xaa is any aa, unknown or other
MVAYFAGNQLTXXKKKKKKKKKKKKKKKKKKKEKKKKKKEFLHPGESTISKGAPPAGEPQLLFPWGGCQFTDLGNEGVFEGLQGFLFQSVAPPVQLLRGGGEREKEPPDIRVISVLIAEKHGN

SEQ ID NO: 14686 - protein, 122 aa, Zea mays subsp. mays
  peptide (1)..(122): Ceres Seq. ID no. 13599054
MKGLDGREKRAGSEMHLPNLYPENDSDAPPAPEYCIDGSSIGNFARFINHSCQPNLFVQCVMSSHNDVKLAKVMLFAADTILPLQELSYDYGYRLDSVVGPDGKIVKLPCHCGAPDCRKRLY

SEQ ID NO: 14687 - DNA, 599 bp, Zea mays subsp. mays
  misc_feature (1)..(599): Ceres Seq. ID no. 3626363
  misc_feature (1)..(599): Ortholog of  Ceres SEQ ID NO 14308430 as cited in SEQ ID NO 55350
  misc_feature (1)..(599): Ortholog of  Ceres SEQ ID NO 15177799 as cited in SEQ ID NO 59221
  misc_feature (1)..(599): Ortholog of  Ceres SEQ ID NO 13662846 as cited in SEQ ID NO 65519
atatgtgccagtgtggattttatatctatagcatcggtgctcttgttgcttgggaaacccgcagaaaagattttgctgtaatgatgtctcatcatgtaataacatctactctaattggagtttcatatctgactggatttttccgaattgggaccatcattctcgctcttcatgatgcaagtgatgtgtttcttgagactgccaaattgtgcaaatacacagaaaaagagctgggtgctagcttgttttttggtctcttcgctatctcctggcttctattgcgtctgatttacttcccattttggataatcaaagcctctaggtttgttttttacttctctttgtgataactttctgtttctgtagtcttgtagttttggacttattgctgttgccgttgcaatggcagctatcattccatcacattcttgaggaagctggatgaattcccaacaactttgtactacatcttgaacacaatgcttctcacattgcttgtattccatatgtactggtggaaactcatatgtttgatgataatgagacagctgaataataaaggacaagttacagacgatgtccgawctgattctgaggat

SEQ ID NO: 14688 - protein, 114 aa, Zea mays subsp. mays
  peptide (1)..(114): Ceres Seq. ID no. 3626364
MCQCGFYIYSIGALVAWETRRKDFAVMMSHHVITSTLIGVSYLTGFFRIGTIILALHDASDVFLETAKLCKYTEKELGASLFFGLFAISWLLLRLIYFPFWIIKASRFVFYFSL

SEQ ID NO: 14689 - protein, 88 aa, Zea mays subsp. mays
  peptide (1)..(88): Ceres Seq. ID no. 3626365
MMSHHVITSTLIGVSYLTGFFRIGTIILALHDASDVFLETAKLCKYTEKELGASLFFGLFAISWLLLRLIYFPFWIIKASRFVFYFSL

SEQ ID NO: 14690 - protein, 87 aa, Zea mays subsp. mays
  peptide (1)..(87): Ceres Seq. ID no. 3626366
MSHHVITSTLIGVSYLTGFFRIGTIILALHDASDVFLETAKLCKYTEKELGASLFFGLFAISWLLLRLIYFPFWIIKASRFVFYFSL

SEQ ID NO: 14691 - DNA, 589 bp, Zea mays subsp. mays
  misc_feature (1)..(589): Ceres Seq. ID no. 12468060
  misc_feature (1)..(589): Ortholog of  Ceres SEQ ID NO 15173921 as cited in SEQ ID NO 61832
acactatgcaggtgtgaaacatgcatcaacttgtatgcacaacgaggtattgcatatcttattgacaaggaggattctattgaggaatacgagaagattgccaagcagaagagggagatgaaactggagcagcagcaaggagctgagacaaattttctgaattcacttaatcatgttcagaagatagagatgataagtggcatcaatgacatgaagaatgagtttcagtcctttctggagtccttcgatgcatcaaaaccggtaacatctgatgatatacattcattcttcgagaatcttgctaagaagaagaaacagaggttatcttagcttttgtgaccgcatcggaccccacctgaggcaatcgttntgctggacagaggtcctagtttgttgggctagtaaatgtaatgttatcttaggtggtacttactaatcgggccagtaatgttgaattctagctggaacgcggtaatgtttgatgcaccgaagtcgcttgcagtaggttccgatggcccaagccaccaaaaacttgtttgctccatgaacctcgcaatcctgttaggtgataatataatatacattgtgt

SEQ ID NO: 14692 - protein, 109 aa, Zea mays subsp. mays
  peptide (1)..(109): Ceres Seq. ID no. 12468061
TLCRCETCINLYAQRGIAYLIDKEDSIEEYEKIAKQKREMKLEQQQGAETNFLNSLNHVQKIEMISGINDMKNEFQSFLESFDASKPVTSDDIHSFFENLAKKKKQRLS

SEQ ID NO: 14693 - protein, 70 aa, Zea mays subsp. mays
  peptide (1)..(70): Ceres Seq. ID no. 12468062
MKLEQQQGAETNFLNSLNHVQKIEMISGINDMKNEFQSFLESFDASKPVTSDDIHSFFENLAKKKKQRLS

SEQ ID NO: 14694 - protein, 54 aa, Zea mays subsp. mays
  peptide (1)..(54): Ceres Seq. ID no. 12468063
  misc_feature (33)..(33): Xaa is any aa, unknown or other
MIYIHSSRILLRRRNRGYLSFCDRIGPHLRQSXCWTEVLVCWASKCNVILGGTY

SEQ ID NO: 14695 - DNA, 565 bp, Zea mays subsp. mays
  misc_feature (1)..(565): Ceres Seq. ID no. 3628344
  misc_feature (1)..(565): Ortholog of  Ceres SEQ ID NO 13581959 as cited in SEQ ID NO 56156
aaagttgctgattttggtgtcgcacgtgttaaagctcaatctggagtcatgactgcagaaactggtacttaccgttggatggccccagaggtcatagagcataaaccctatgatcagaaggctgatgtttttagttttggaattttgatgtgggagctactcacagggaagattccttatgagtatctgactccactacaagcagctgttggcgtggtgcagaagggattacggcctacaattccgaaacatacttatgcaatgctttctgagcttcttcagaaatgttggcagcaagaccccgctcaaagaccagacttttccgaaatattagaaactcttcagagaatagcagaggaagtcggagacgagcacgaggggaagcacaaggacagaacactgggtggtttcttttcagctctgagggggcggagccattgagacacggttgaagacttgaaatgtacatggcctcggtccatcctggaaggatctgaactacaaccagctcctgttccccgcacatagcgacagtacacagaaatactgtacagacatgctgcag

SEQ ID NO: 14696 - protein, 146 aa, Zea mays subsp. mays
  peptide (1)..(146): Ceres Seq. ID no. 3628345
KVADFGVARVKAQSGVMTAETGTYRWMAPEVIEHKPYDQKADVFSFGILMWELLTGKIPYEYLTPLQAAVGVVQKGLRPTIPKHTYAMLSELLQKCWQQDPAQRPDFSEILETLQRIAEEVGDEHEGKHKDRTLGGFFSALRGRSH

SEQ ID NO: 14697 - protein, 130 aa, Zea mays subsp. mays
  peptide (1)..(130): Ceres Seq. ID no. 3628346
MTAETGTYRWMAPEVIEHKPYDQKADVFSFGILMWELLTGKIPYEYLTPLQAAVGVVQKGLRPTIPKHTYAMLSELLQKCWQQDPAQRPDFSEILETLQRIAEEVGDEHEGKHKDRTLGGFFSALRGRSH

SEQ ID NO: 14698 - protein, 120 aa, Zea mays subsp. mays
  peptide (1)..(120): Ceres Seq. ID no. 3628347
MAPEVIEHKPYDQKADVFSFGILMWELLTGKIPYEYLTPLQAAVGVVQKGLRPTIPKHTYAMLSELLQKCWQQDPAQRPDFSEILETLQRIAEEVGDEHEGKHKDRTLGGFFSALRGRSH

SEQ ID NO: 14699 - DNA, 645 bp, Zea mays subsp. mays
  misc_feature (1)..(645): Ceres Seq. ID no. 11415217
  misc_feature (1)..(645): Ortholog of  Ceres SEQ ID NO 12610286 as cited in SEQ ID NO 55827
agcgccaacggccaacctcacgcagtcccgccgcatcgaatggcatccctccggcttgtggcaacgctagcgccctccggtcctccgccgccacctcgacgtaagcagcggagaccgtcctccgcagtccgtctgacaggtgggatgggcctggcggcagctgctgccgtggcggcggccgcggccgcctcaccaccggcgctcgccgcgctgtccgagccggcgaacgcgctctcgctgcccacctgggccgtccacgtctccagcgtcgccgagtgggtgacggcgatgtggctggtttgggactacggcgagaagacggggctcaagggttggaaaggcctctcgtgggggatggttccacttctaggtggagcaatgtgtgcttgcacgtggcatttcttctacaattcagagtctcttgaagttcttgtagcccttcaaggtgctctgacagtgattggtaacataacaatgtgcatagctgcataccgcatcttcaaagcatcccaggaaggctcaaaaacttcgtaggctgcaagattggatcttacagccggtttggcaagggatgctcagccgcatttgaagattgacgttgctgagagcctgagacgatgataggagaagatacagatagccggt

SEQ ID NO: 14700 - protein, 177 aa, Zea mays subsp. mays
  peptide (1)..(177): Ceres Seq. ID no. 11415218
SANGQPHAVPPHRMASLRLVATLAPSGPPPPPRRKQRRPSSAVRLTGGMGLAAAAAVAAAAAASPPALAALSEPANALSLPTWAVHVSSVAEWVTAMWLVWDYGEKTGLKGWKGLSWGMVPLLGGAMCACTWHFFYNSESLEVLVALQGALTVIGNITMCIAAYRIFKASQEGSKTS

SEQ ID NO: 14701 - protein, 164 aa, Zea mays subsp. mays
  peptide (1)..(164): Ceres Seq. ID no. 11415219
MASLRLVATLAPSGPPPPPRRKQRRPSSAVRLTGGMGLAAAAAVAAAAAASPPALAALSEPANALSLPTWAVHVSSVAEWVTAMWLVWDYGEKTGLKGWKGLSWGMVPLLGGAMCACTWHFFYNSESLEVLVALQGALTVIGNITMCIAAYRIFKASQEGSKTS

SEQ ID NO: 14702 - protein, 129 aa, Zea mays subsp. mays
  peptide (1)..(129): Ceres Seq. ID no. 11415220
MGLAAAAAVAAAAAASPPALAALSEPANALSLPTWAVHVSSVAEWVTAMWLVWDYGEKTGLKGWKGLSWGMVPLLGGAMCACTWHFFYNSESLEVLVALQGALTVIGNITMCIAAYRIFKASQEGSKTS

SEQ ID NO: 14703 - DNA, 423 bp, Zea mays subsp. mays
  misc_feature (1)..(423): Ceres Seq. ID no. 12468033
  misc_feature (1)..(423): Ortholog of  Ceres SEQ ID NO 14301924 as cited in SEQ ID NO 67731
ttctttcaggtgcccggcatgtttcagatggcatgcttcaagcagcagctgagtgcctggcatcatacatcacagacgacgaaattcgaaaaggaatcctcttcccttcggtctccagtattaggcacatcaccgcacgtgtcggcgcagcagtcgtccgtgccgctgttgctgaagacctggctgaggggtgctgtgatgtgggtcctagggagcttgggagtatgtcagagtcggaagcagtggactacgtcgctcggaagatgtggtaccctatttacagccctcttgtgagcgacaaataataaatccgaagatctcgatgcctgcgcagaagcagatgttccattgaaggaatgtatcggatttgatatttttcttaaccatctctaaattagctgctcatctagaaagcatttcggc

SEQ ID NO: 14704 - protein, 100 aa, Zea mays subsp. mays
  peptide (1)..(100): Ceres Seq. ID no. 12468034
LSGARHVSDGMLQAAAECLASYITDDEIRKGILFPSVSSIRHITARVGAAVVRAAVAEDLAEGCCDVGPRELGSMSESEAVDYVARKMWYPIYSPLVSDK

SEQ ID NO: 14705 - protein, 97 aa, Zea mays subsp. mays
  peptide (1)..(97): Ceres Seq. ID no. 12468035
FFQVPGMFQMACFKQQLSAWHHTSQTTKFEKESSSLRSPVLGTSPHVSAQQSSVPLLLKTWLRGAVMWVLGSLGVCQSRKQWTTSLGRCGTLFTALL

SEQ ID NO: 14706 - protein, 91 aa, Zea mays subsp. mays
  peptide (1)..(91): Ceres Seq. ID no. 12468036
MFQMACFKQQLSAWHHTSQTTKFEKESSSLRSPVLGTSPHVSAQQSSVPLLLKTWLRGAVMWVLGSLGVCQSRKQWTTSLGRCGTLFTALL

SEQ ID NO: 14707 - DNA, 621 bp, Zea mays subsp. mays
  misc_feature (1)..(621): Ceres Seq. ID no. 13567830
  misc_feature (1)..(621): Ortholog of  Ceres SEQ ID NO 12611235 as cited in SEQ ID NO 56101
  misc_feature (1)..(621): Ortholog of  Ceres SEQ ID NO 15226202 as cited in SEQ ID NO 65001
  misc_feature (1)..(621): Ortholog of  Ceres SEQ ID NO 15177896 as cited in SEQ ID NO 0
attcccggcactgcagcgaggcaggagggcgaccggaatttcccatctctccttctcatcattcctttcgggatttcccctcctggttcccatcgatcagagggcccggcgctgttgcctttcgcattcgattcctttcgggtcggatttgtggcggagctcttgatttgctccgtccctgccagcggaggagggcttgctggatcagggatcgagcaaggaagcagccatgagcggcggcggaagcgtgagtttcctcgagatccagccgtcggagctcgcattcccctttgagataatgaggcagagctcgtgttccatgcaactgaccaataagactgaccattatgtagcattcaaggtcaaaacaaccaacccaaagcagtactgtgtgcgtcctaatattggtgttgtattacctggctcaacttgcgatgttacagtgacaatgcaagcacagaaggcttcaccacctgacatgcagtgcaaggacaagttcctagttcaaagcgttgtggccgagaatggtgtgacagctcaagatattaatgcagcaatgttcaataaggagccagggaaagttgkcgatgaattcaagctgcgtgtgggttatgtgccaac

SEQ ID NO: 14708 - protein, 130 aa, Zea mays subsp. mays
  peptide (1)..(130): Ceres Seq. ID no. 13567831
  misc_feature (119)..(119): Xaa is any aa, unknown or other
MSGGGSVSFLEIQPSELAFPFEIMRQSSCSMQLTNKTDHYVAFKVKTTNPKQYCVRPNIGVVLPGSTCDVTVTMQAQKASPPDMQCKDKFLVQSVVAENGVTAQDINAAMFNKEPGKVXDEFKLRVGYVP

SEQ ID NO: 14709 - protein, 107 aa, Zea mays subsp. mays
  peptide (1)..(107): Ceres Seq. ID no. 13567832
  misc_feature (96)..(96): Xaa is any aa, unknown or other
MRQSSCSMQLTNKTDHYVAFKVKTTNPKQYCVRPNIGVVLPGSTCDVTVTMQAQKASPPDMQCKDKFLVQSVVAENGVTAQDINAAMFNKEPGKVXDEFKLRVGYVP

SEQ ID NO: 14710 - protein, 100 aa, Zea mays subsp. mays
  peptide (1)..(100): Ceres Seq. ID no. 13567833
  misc_feature (89)..(89): Xaa is any aa, unknown or other
MQLTNKTDHYVAFKVKTTNPKQYCVRPNIGVVLPGSTCDVTVTMQAQKASPPDMQCKDKFLVQSVVAENGVTAQDINAAMFNKEPGKVXDEFKLRVGYVP

SEQ ID NO: 14711 - DNA, 551 bp, Zea mays subsp. mays
  misc_feature (1)..(551): Ceres Seq. ID no. 3623404
  misc_feature (1)..(551): Ortholog of  Ceres SEQ ID NO 13657138 as cited in SEQ ID NO 65923
  misc_feature (1)..(551): Ortholog of  Ceres SEQ ID NO 13584744 as cited in SEQ ID NO 69137
attttaagcctggagaagccatcctggattggctttcaaggaaacgggtggctataggtacagctcgtggactggagtatctgcatgaacactgcaaccccaagatcatacaccgtgatgttaaagctgcaaatgtattgcttgacgaggatttcgagcctgttgtcggcgattttggcctagcaaagctagtagatgtgcagaagacgtctgtgacaacacaagtccgcggaaccatgggtcacatagcacccgagtacctgtccacagggaagtcttccgagaggacagatgtttttggatatgggatcatgcttcttgaacttgtgactggtcaacgggctattgacttctcacggctggaagacgaagatgatgtgctattgcttgatcatgtaaagaagctacagagagaaggggagctggactccatcgtggacagcaaccttaaccagaattatgacggcgaggatatcgagatgataatacagatagcgctgctctgcactcaggcatcacctgaggaccgtccatcgatgtctgaagtggtt

SEQ ID NO: 14712 - protein, 183 aa, Zea mays subsp. mays
  peptide (1)..(183): Ceres Seq. ID no. 3623405
FKPGEAILDWLSRKRVAIGTARGLEYLHEHCNPKIIHRDVKAANVLLDEDFEPVVGDFGLAKLVDVQKTSVTTQVRGTMGHIAPEYLSTGKSSERTDVFGYGIMLLELVTGQRAIDFSRLEDEDDVLLLDHVKKLQREGELDSIVDSNLNQNYDGEDIEMIIQIALLCTQASPEDRPSMSEVV

SEQ ID NO: 14713 - protein, 105 aa, Zea mays subsp. mays
  peptide (1)..(105): Ceres Seq. ID no. 3623406
MGHIAPEYLSTGKSSERTDVFGYGIMLLELVTGQRAIDFSRLEDEDDVLLLDHVKKLQREGELDSIVDSNLNQNYDGEDIEMIIQIALLCTQASPEDRPSMSEVV

SEQ ID NO: 14714 - DNA, 600 bp, Zea mays subsp. mays
  misc_feature (1)..(600): Ceres Seq. ID no. 3623648
  misc_feature (1)..(600): Ortholog of  Ceres SEQ ID NO 13584744 as cited in SEQ ID NO 69137
ttggttccgtttacaagggacagctcaggaatggtacagttattgctgtcaaggtcctttcgtcggagtcaagacaaggagtaagggagtttctgaatgaactcgtggcaatttccgacatctcacatgataatcttgtgaaactttatgggtattgtgcggaaggagaccaaagaatccttgtttacaatcatcttgaaaataatagccttgcacaaacacttctaggctccagccacagcaatatccagtttgattggaaaacacgagtaaatatttgccttggcattgcacggggattagcatacctccatcatggtgtcagtccccacattgttcatcgagacattaaagcaagcaatatacttcttgatagggaccttaccccaaaaatctctgattttggtctagcaaagcttcttccaccaaacgcaacacatgttagcacaagagttgcaggaacactgggttatttggctcctgagtatgctattcgaggacaggtgacacgcaaatcagatgtgtacagctttggcgtgctgcttctggaaattggttgcgggagatcaaacagcgatacaagattagcatacggagatc

SEQ ID NO: 14715 - protein, 199 aa, Zea mays subsp. mays
  peptide (1)..(199): Ceres Seq. ID no. 3623649
GSVYKGQLRNGTVIAVKVLSSESRQGVREFLNELVAISDISHDNLVKLYGYCAEGDQRILVYNHLENNSLAQTLLGSSHSNIQFDWKTRVNICLGIARGLAYLHHGVSPHIVHRDIKASNILLDRDLTPKISDFGLAKLLPPNATHVSTRVAGTLGYLAPEYAIRGQVTRKSDVYSFGVLLLEIGCGRSNSDTRLAYGD

SEQ ID NO: 14716 - DNA, 1243 bp, Zea mays subsp. mays
  misc_feature (1)..(1243): Ceres Seq. ID no. 13577632
  misc_feature (1)..(1243): Ortholog of  Ceres SEQ ID NO 15177654 as cited in SEQ ID NO 59933
  misc_feature (1)..(1243): Ortholog of  Ceres SEQ ID NO 13662117 as cited in SEQ ID NO 60560
  misc_feature (1)..(1243): Ortholog of  Ceres SEQ ID NO 14302776 as cited in SEQ ID NO 66919
ggcacgaggcttgctgctgcagtgctgcctccccctcgcccagcagcagggagcagccatgccaggggaccacggctccaagggcgacatctccttcgccggacgcttcacggccagcgccatcgcagcatgcttcgcagagatatgtaccatcccgctcgacacggccaaggtcaggctccagctgcagaagaacgtcgtcgccgccgccgcctccggggacgccgcgccagcgcttcccaagtaccgcggcctgctcggaactgccgccaccatcgctagggaggaaggggccgcagcgctctggaagggcatcgtcccgggcctccaccgacagtgcatctacggggggctccgcattggcctctacgagcctgtcaaatccttctacgtcggcaaagaccacgttggggatgtccctttgtccaagaagatagccgccggcttcacaactggtgccatcgctatcagcatcgccaaccctactgaccttgtcaaggtcaggctccaggccgagggcaagcttgcgcctggtgtgccacgccgctacactggcgcaatggatgcttattccaagattgctagacaggaaggggttgccgctctgtggactggccttggaccaaatgtagcgcggaatgctatcatcaatgctgctgagttggccagttatgatcaagtcaagcagtcaattttgaaactccctgggttcaaagatgatgtggtcacccacctttttgctggtcttggtgctggcttctttgctgtttgtgttggttccccagttgatgtggttaagtcgagaatgatgggtgactcagcctacaaaagcactctcgattgttttgtgaagacgctaaagaatgatggccctttggcattttacaaaggcttcctgccaaactttgcaagactgggatcttggaatgtgattatgttcttgacattggagcaggttcaaaagctgtttgtgaggaaagcgacaagctgaagatagagtttttgcagtcaggtggcgtacaattgacgcacagggtttttcttctatagacaaaaggggagaaatgacacctcccccctcgagaattggggaacaaggacagatctgacacctcaattgcgagaaataaaaataacagccgacagttgcatgatccctgaacgaataaattcagaactagaaaacagatgtcagtaaacaacatgtggtgaatgttggaacttgaactggtcagttaggggc

SEQ ID NO: 14717 - protein, 329 aa, Zea mays subsp. mays
  peptide (1)..(329): Ceres Seq. ID no. 13577633
ARGLLLQCCLPLAQQQGAAMPGDHGSKGDISFAGRFTASAIAACFAEICTIPLDTAKVRLQLQKNVVAAAASGDAAPALPKYRGLLGTAATIAREEGAAALWKGIVPGLHRQCIYGGLRIGLYEPVKSFYVGKDHVGDVPLSKKIAAGFTTGAIAISIANPTDLVKVRLQAEGKLAPGVPRRYTGAMDAYSKIARQEGVAALWTGLGPNVARNAIINAAELASYDQVKQSILKLPGFKDDVVTHLFAGLGAGFFAVCVGSPVDVVKSRMMGDSAYKSTLDCFVKTLKNDGPLAFYKGFLPNFARLGSWNVIMFLTLEQVQKLFVRKATS

SEQ ID NO: 14718 - protein, 310 aa, Zea mays subsp. mays
  peptide (1)..(310): Ceres Seq. ID no. 13577634
MPGDHGSKGDISFAGRFTASAIAACFAEICTIPLDTAKVRLQLQKNVVAAAASGDAAPALPKYRGLLGTAATIAREEGAAALWKGIVPGLHRQCIYGGLRIGLYEPVKSFYVGKDHVGDVPLSKKIAAGFTTGAIAISIANPTDLVKVRLQAEGKLAPGVPRRYTGAMDAYSKIARQEGVAALWTGLGPNVARNAIINAAELASYDQVKQSILKLPGFKDDVVTHLFAGLGAGFFAVCVGSPVDVVKSRMMGDSAYKSTLDCFVKTLKNDGPLAFYKGFLPNFARLGSWNVIMFLTLEQVQKLFVRKATS

SEQ ID NO: 14719 - DNA, 337 bp, Zea mays subsp. mays
  misc_feature (1)..(337): Ceres Seq. ID no. 15178947
  misc_feature (1)..(337): Ortholog of  Ceres SEQ ID NO 15177678 as cited in SEQ ID NO 0
gcatactatgcagggaaactgtgaatagggactctgagattgaggtcatcattcaggaagcagaggatgctgttctcccatggtccagtgaaaacatgttcttagaaactttatctgaaatcatggaccgtcacctccacaaggaatgagtttagaaattcagaataacttatctagttgctccagctgtatccggtttgttgtaagtattgtagacaaggggtgtcaagggactaatgatttcatttgtttgtatcctctcaaatgatttcacttggttgtaattgctcgagtactttgcttatgcacattttgtgaataatatatttgtttggtt

SEQ ID NO: 14720 - protein, 48 aa, Zea mays subsp. mays
  peptide (1)..(48): Ceres Seq. ID no. 15178948
ILCRETVNRDSEIEVIIQEAEDAVLPWSSENMFLETLSEIMDRHLHKE

SEQ ID NO: 14721 - protein, 40 aa, Zea mays subsp. mays
  peptide (1)..(40): Ceres Seq. ID no. 15178949
MSLEIQNNLSSCSSCIRFVVSIVDKGCQGTNDFICLYPLK

SEQ ID NO: 14722 - DNA, 658 bp, Zea mays subsp. mays
  misc_feature (1)..(658): Ceres Seq. ID no. 12467996
  misc_feature (1)..(658): Ortholog of  Ceres SEQ ID NO 13584744 as cited in SEQ ID NO 69137
ttttatgattatatggagagtggcagcttatgggatgttttacatgaaggctcatccaagaagaacaaacttgactgggtgactcgcctacggatcgctcttggtgcagctcaaggcctcgcttaccttcaccatgactgcagcccacgaataattcaccgggacgtaaaatcaaagaatatactcctcgacaaagattatgaggcgcatcttacagacttcggcatcgctaagagcttatgtgtctcgaagactcacacgtcaacctacgtcatgggcactattggttacattgatcctgagtacgcccgcacctcccgcctcaacgagaagtctgatgtctacagctacggcatcgttctgctggagctgctgaccggcaagaagccagtggacaacgagtgcaatctccatcacttggtaactattcttcagtctcctgcatttgtcgagttagaagtcggaagtcgcttccttctctttacatcgctttggattccagcagtgcccaataattgctgaacaacgaaccattaggcttgtgttcctacaaggggaccagcgacactaaacctagcatgtgagtagatctatctgcactgcagaccagctgtggactgatgcgctgatccattggattggnggctgaaagctccat

SEQ ID NO: 14723 - protein, 173 aa, Zea mays subsp. mays
  peptide (1)..(173): Ceres Seq. ID no. 12467997
FYDYMESGSLWDVLHEGSSKKNKLDWVTRLRIALGAAQGLAYLHHDCSPRIIHRDVKSKNILLDKDYEAHLTDFGIAKSLCVSKTHTSTYVMGTIGYIDPEYARTSRLNEKSDVYSYGIVLLELLTGKKPVDNECNLHHLVTILQSPAFVELEVGSRFLLFTSLWIPAVPNNC

SEQ ID NO: 14724 - protein, 169 aa, Zea mays subsp. mays
  peptide (1)..(169): Ceres Seq. ID no. 12467998
MESGSLWDVLHEGSSKKNKLDWVTRLRIALGAAQGLAYLHHDCSPRIIHRDVKSKNILLDKDYEAHLTDFGIAKSLCVSKTHTSTYVMGTIGYIDPEYARTSRLNEKSDVYSYGIVLLELLTGKKPVDNECNLHHLVTILQSPAFVELEVGSRFLLFTSLWIPAVPNNC

SEQ ID NO: 14725 - DNA, 657 bp, Zea mays subsp. mays
  misc_feature (1)..(657): Ceres Seq. ID no. 3632567
  misc_feature (1)..(657): Ortholog of  Ceres SEQ ID NO 15176177 as cited in SEQ ID NO 0
aacattcacagtccgcaggccgcagcagctgaatttcgaaggagactgtttcataaacaggagccaggcaccggactttccaggaggataccacctcccgaacatggtgcgtcgacgacccgccaccggggcagccccgagaccccacctcgccgccgtcggtcgcgggctgctcctcgcgtccgtcctcgcggccgctgcctcctccctcccagtagccgagtcgtcctgcccgcgagacaactcactggtgagagacataagccgaatgcagcagcgcaactacgggagggaaggattctcgcatataactgtcacaggtgctcttgctcacgggacgaaggaggtggaagtgtggctacaaacatttggtccaggtcaaaggaccccaatccacaggcattcttgtgaagaggttttcattgtcctcaaggggaaaggcacgctcttactcgggtcgagctcgctgaagtacccaggacagccgcaggaagttcctgtctttcagaataccacattttcgatccctgtaaatgatccacatcaggtctggaattctaatgagcacgaagatttgcaagttcttgtgatcatatcgcgcccaccggtcaagattggcatctcctgttacagatttatatacgatgattggagtat

SEQ ID NO: 14726 - protein, 218 aa, Zea mays subsp. mays
  peptide (1)..(218): Ceres Seq. ID no. 3632568
TFTVRRPQQLNFEGDCFINRSQAPDFPGGYHLPNMVRRRPATGAAPRPHLAAVGRGLLLASVLAAAASSLPVAESSCPRDNSLVRDISRMQQRNYGREGFSHITVTGALAHGTKEVEVWLQTFGPGQRTPIHRHSCEEVFIVLKGKGTLLLGSSSLKYPGQPQEVPVFQNTTFSIPVNDPHQVWNSNEHEDLQVLVIISRPPVKIGISCYRFIYDDWS

SEQ ID NO: 14727 - protein, 184 aa, Zea mays subsp. mays
  peptide (1)..(184): Ceres Seq. ID no. 3632569
MVRRRPATGAAPRPHLAAVGRGLLLASVLAAAASSLPVAESSCPRDNSLVRDISRMQQRNYGREGFSHITVTGALAHGTKEVEVWLQTFGPGQRTPIHRHSCEEVFIVLKGKGTLLLGSSSLKYPGQPQEVPVFQNTTFSIPVNDPHQVWNSNEHEDLQVLVIISRPPVKIGISCYRFIYDDWS

SEQ ID NO: 14728 - protein, 136 aa, Zea mays subsp. mays
  peptide (1)..(136): Ceres Seq. ID no. 3632570
NIHSPQAAAAEFRRRLFHKQEPGTGLSRRIPPPEHGASTTRHRGSPETPPRRRRSRAAPRVRPRGRCLLPPSSRVVLPARQLTGERHKPNAAAQLREGRILAYNCHRCSCSRDEGGGSVATNIWSRSKDPNPQAFL

SEQ ID NO: 14729 - DNA, 483 bp, Zea mays subsp. mays
  misc_feature (1)..(483): Ceres Seq. ID no. 5761972
  misc_feature (1)..(483): Ortholog of  Ceres SEQ ID NO 14308851 as cited in SEQ ID NO 55618
aatgaagatcctcacggaaaggggttattccttcaccacgacggcagaacgggaaatcgtgagagacataaaggagaagctggcctttgtcgccctagactacgagcaggagctggagaccgctaagagcagctcctccgtcgagaagagctacgagctgcccgatgggcaggtcatcacgatcggcgcggagaggttcagatgcccagaggtgcttttccagccgtcgctgatcgggatggaagctcccggcatccacgagaccacctacaactcgatcatgaaatgtgacgttgatatcargaaggacctgtacgggaacatcgtcctcagtggagggacgaccatgttccctggcatcgctgacaggatgagcaaggagattactgccctcgcaccgagcagcatgaagatcaaggtcgtggcgcctcctgagagaaaatacagtgtctggattggtggctcgatccttgcgtcgctcag

SEQ ID NO: 14730 - protein, 160 aa, Zea mays subsp. mays
  peptide (1)..(160): Ceres Seq. ID no. 5761973
  misc_feature (101)..(101): Xaa is any aa, unknown or other
MKILTERGYSFTTTAEREIVRDIKEKLAFVALDYEQELETAKSSSSVEKSYELPDGQVITIGAERFRCPEVLFQPSLIGMEAPGIHETTYNSIMKCDVDIXKDLYGNIVLSGGTTMFPGIADRMSKEITALAPSSMKIKVVAPPERKYSVWIGGSILASL

SEQ ID NO: 14731 - protein, 81 aa, Zea mays subsp. mays
  peptide (1)..(81): Ceres Seq. ID no. 5761974
  misc_feature (22)..(22): Xaa is any aa, unknown or other
MEAPGIHETTYNSIMKCDVDIXKDLYGNIVLSGGTTMFPGIADRMSKEITALAPSSMKIKVVAPPERKYSVWIGGSILASL

SEQ ID NO: 14732 - DNA, 505 bp, Zea mays subsp. mays
  misc_feature (1)..(505): Ceres Seq. ID no. 3632665
  misc_feature (1)..(505): Ortholog of  Ceres SEQ ID NO 13623192 as cited in SEQ ID NO 1286
  misc_feature (1)..(505): Ortholog of  Ceres SEQ ID NO 13594171 as cited in SEQ ID NO 60359
  misc_feature (1)..(505): Ortholog of  Ceres SEQ ID NO 14301866 as cited in SEQ ID NO 60955
  misc_feature (1)..(505): Ortholog of  Ceres SEQ ID NO 13590645 as cited in SEQ ID NO 62109
tgcgcatcgcacagttccaccagcatctggcagagaagctggacctggacatgtcggccctgcaatacatgatgaaggaataccctgggaacgaagaagagcggatgagagccgcagttggtaagtttgggctgtcagggaaggctcaggtgatgccgatgaggaatctgtctgacgggcagaggagccgtgtcatctttgcgtggctggcatacaggcagccgcagctattgctgctggacgagccgacgaaccatcttgatatcgagaccatcgactccctagcggaggcgctgaacgagtgggacggcggtctggtcctggtgagccatgacttcaggctgatcaaccaggttgctcatgagatctgggtttgtgagaatcaggcagtgacaaggtgggaaggcgatatcmtggatttcaaggagcacttgrraagcaaggcttgkctatcggattaaagggaavgccttggctttccttaccttctctttggagatgkatt

SEQ ID NO: 14733 - protein, 152 aa, Zea mays subsp. mays
  peptide (1)..(152): Ceres Seq. ID no. 3632666
  misc_feature (138)..(138): Xaa is any aa, unknown or other
  misc_feature (145)..(145): Xaa is any aa, unknown or other
  misc_feature (149)..(149): Xaa is any aa, unknown or other
RIAQFHQHLAEKLDLDMSALQYMMKEYPGNEEERMRAAVGKFGLSGKAQVMPMRNLSDGQRSRVIFAWLAYRQPQLLLLDEPTNHLDIETIDSLAEALNEWDGGLVLVSHDFRLINQVAHEIWVCENQAVTRWEGDIXDFKEHLXSKAXLSD

SEQ ID NO: 14734 - protein, 136 aa, Zea mays subsp. mays
  peptide (1)..(136): Ceres Seq. ID no. 3632667
  misc_feature (122)..(122): Xaa is any aa, unknown or other
  misc_feature (129)..(129): Xaa is any aa, unknown or other
  misc_feature (133)..(133): Xaa is any aa, unknown or other
MSALQYMMKEYPGNEEERMRAAVGKFGLSGKAQVMPMRNLSDGQRSRVIFAWLAYRQPQLLLLDEPTNHLDIETIDSLAEALNEWDGGLVLVSHDFRLINQVAHEIWVCENQAVTRWEGDIXDFKEHLXSKAXLSD

SEQ ID NO: 14735 - protein, 130 aa, Zea mays subsp. mays
  peptide (1)..(130): Ceres Seq. ID no. 3632668
  misc_feature (116)..(116): Xaa is any aa, unknown or other
  misc_feature (123)..(123): Xaa is any aa, unknown or other
  misc_feature (127)..(127): Xaa is any aa, unknown or other
MMKEYPGNEEERMRAAVGKFGLSGKAQVMPMRNLSDGQRSRVIFAWLAYRQPQLLLLDEPTNHLDIETIDSLAEALNEWDGGLVLVSHDFRLINQVAHEIWVCENQAVTRWEGDIXDFKEHLXSKAXLSD

SEQ ID NO: 14736 - DNA, 966 bp, Zea mays subsp. mays
  misc_feature (1)..(966): Ceres Seq. ID no. 12467954
  misc_feature (1)..(966): Ortholog of  Ceres SEQ ID NO 14308413 as cited in SEQ ID NO 55196
tctactttgattttgagcatttgaagcaatctgcgtccgtgattgaccagagccagttctggcaagattggggacagtggcacaagaaagataggctcaagaacttctacactgaagacatcaggatgaccccaatgaaacttcgtgacatcaaggacacattgatcatgaggaagtttgggaatgttgagcctgataactattggtcacgtgtgtgcgagggtgagactgagggaataatcaagcgcccatggcatttcctgtggaaatctcgtcgcttgatggagattgtatctgccattgcctcacggatgaactgggactttgactcggtccatgttgtcagaggggagaaagcgcagaacacacaactttggccaaaccttgacagagatacctcaccagacagtctccttatggcacttaatgataaggttggtgctggccggtatttgtacattgctaccaatgaacctgacaaatcgttctttaacccactcaaggaaaagtataaaacacacttccttgatgatttcaagtacctgtgggatgagaatagtgagtggttcactgaaactaaggagctgagcaatggtcagccagtagaatttgatggctatatgaggattgcagttgacactgaggtattcttgagggggaagaggcatgtggagacattcaacgagcttacacgtgattgcaaggatggcgtgaatacatgctcagcttcttcctgaacatttggtgggctaaggtgagctgatactatgaaatattatgcttcagaggatattttcgactgtgttattggtgtctcttatgccacgcctagtcttgttgtagctaagtagctggtatcactttttgttataccactgttttgtgtttccagattacattagtacattcagttcatgcattgggcttgtgctgtttagttgaacatgcattattgcagttgtcttc

SEQ ID NO: 14737 - protein, 244 aa, Zea mays subsp. mays
  peptide (1)..(244): Ceres Seq. ID no. 12467955
YFDFEHLKQSASVIDQSQFWQDWGQWHKKDRLKNFYTEDIRMTPMKLRDIKDTLIMRKFGNVEPDNYWSRVCEGETEGIIKRPWHFLWKSRRLMEIVSAIASRMNWDFDSVHVVRGEKAQNTQLWPNLDRDTSPDSLLMALNDKVGAGRYLYIATNEPDKSFFNPLKEKYKTHFLDDFKYLWDENSEWFTETKELSNGQPVEFDGYMRIAVDTEVFLRGKRHVETFNELTRDCKDGVNTCSASS

SEQ ID NO: 14738 - protein, 203 aa, Zea mays subsp. mays
  peptide (1)..(203): Ceres Seq. ID no. 12467956
MTPMKLRDIKDTLIMRKFGNVEPDNYWSRVCEGETEGIIKRPWHFLWKSRRLMEIVSAIASRMNWDFDSVHVVRGEKAQNTQLWPNLDRDTSPDSLLMALNDKVGAGRYLYIATNEPDKSFFNPLKEKYKTHFLDDFKYLWDENSEWFTETKELSNGQPVEFDGYMRIAVDTEVFLRGKRHVETFNELTRDCKDGVNTCSASS

SEQ ID NO: 14739 - protein, 200 aa, Zea mays subsp. mays
  peptide (1)..(200): Ceres Seq. ID no. 12467957
MKLRDIKDTLIMRKFGNVEPDNYWSRVCEGETEGIIKRPWHFLWKSRRLMEIVSAIASRMNWDFDSVHVVRGEKAQNTQLWPNLDRDTSPDSLLMALNDKVGAGRYLYIATNEPDKSFFNPLKEKYKTHFLDDFKYLWDENSEWFTETKELSNGQPVEFDGYMRIAVDTEVFLRGKRHVETFNELTRDCKDGVNTCSASS

SEQ ID NO: 14740 - DNA, 638 bp, Zea mays subsp. mays
  misc_feature (1)..(638): Ceres Seq. ID no. 12468946
  misc_feature (1)..(638): Ortholog of  Ceres SEQ ID NO 12627139 as cited in SEQ ID NO 64036
aaaccgcagaagccagatctgcctctcctttttcgacgagaaacacagacaccctggttggtttgtcaacaaaacagagcgcatctattgggagcaatggttcatcaatttgcaagtcatgttccccaaaagatacagcaagtcaaacagctccaaagggctgacaaacatccaagcaaatgccgtggaggagaccagcacaaggcgtgctgcattggaggcgtcgattaacgaagtgctgttccagatcataaagttcgccaacgagaaaaaggaccacattcctgctatccctgacaggattttcaatcacgagatcatgatcccaagctcggattctgtatttggatggaacacggacgtcattcgcagagttctgaatagcgggcacccatactcgctttaactgaagacgacatctcagtgggcgcccgtattcagtttattagcgtgctgccgccctgtttggaagacggctctgttaaccatcgtggtgaaccatataatatgcctaaggaaaaacctagttctgtgtacatcaccctgctcatctggcatgtacatactgtgttgggatcttgctcatcggtcaaacattnttaagttcgattaagtttataaataacaatattatgatt

SEQ ID NO: 14741 - protein, 134 aa, Zea mays subsp. mays
  peptide (1)..(134): Ceres Seq. ID no. 12468947
NRRSQICLSFFDEKHRHPGWFVNKTERIYWEQWFINLQVMFPKRYSKSNSSKGLTNIQANAVEETSTRRAALEASINEVLFQIIKFANEKKDHIPAIPDRIFNHEIMIPSSDSVFGWNTDVIRRVLNSGHPYSL

SEQ ID NO: 14742 - protein, 95 aa, Zea mays subsp. mays
  peptide (1)..(95): Ceres Seq. ID no. 12468948
MFPKRYSKSNSSKGLTNIQANAVEETSTRRAALEASINEVLFQIIKFANEKKDHIPAIPDRIFNHEIMIPSSDSVFGWNTDVIRRVLNSGHPYSL

SEQ ID NO: 14743 - protein, 76 aa, Zea mays subsp. mays
  peptide (1)..(76): Ceres Seq. ID no. 12468949
KPQKPDLPLLFRRETQTPWLVCQQNRAHLLGAMVHQFASHVPQKIQQVKQLQRADKHPSKCRGGDQHKACCIGGVD

SEQ ID NO: 14744 - DNA, 693 bp, Zea mays subsp. mays
  misc_feature (1)..(693): Ceres Seq. ID no. 12462542
  misc_feature (1)..(693): Ortholog of  Ceres SEQ ID NO 15176246 as cited in SEQ ID NO 55282
  misc_feature (1)..(693): Ortholog of  Ceres SEQ ID NO 14301514 as cited in SEQ ID NO 65663
  misc_feature (1)..(693): Ortholog of  Ceres SEQ ID NO 13596315 as cited in SEQ ID NO 67929
  misc_feature (1)..(693): Ortholog of  Ceres SEQ ID NO 13596167 as cited in SEQ ID NO 68704
  misc_feature (1)..(693): Ortholog of  Ceres SEQ ID NO 13655131 as cited in SEQ ID NO 68906
gctcgcctctgatctctgcgtcatcgaggagatcaggatacgcccgttcgaagctacttttcagcatggccatccgatttactcttcgaaggcggtgagaatccggctgggtcattccaagcttgaccctggaagagagacttttgtttcggatgaggatgagaacctgactgcgatcgctgatgagaactacatgtggacatacacgtcgccagagtttcctatgcttcaggaaaatgtgttgcaaaccttcaagcttccacgcccggctctttgcattggtggtatagtgaagattgaactactggggaggatacagaaacaatttacagatgataagtattacatatgtgtctgccatgtccaagtgacggggcgctcgctctcaccagatttaatgatagacctctccgatcctgctggttactcgaacctcaagtatctgccgggtgccggtaacttgcgcccagaagacctaatcagcattgacgccaaggactcaccggactggcgctcgcttgtttccaggtacaggcagatgaggcaactggctatggtgtacatgctgcttggacccgtgcagttgcagtttatggatgaagacgaagctgacttgcagatgtaggctttgttttccctgaatccgatnttgtgtatcctaattgaacagagcttgctntgataaatatagcg

SEQ ID NO: 14745 - protein, 207 aa, Zea mays subsp. mays
  peptide (1)..(207): Ceres Seq. ID no. 12462543
LASDLCVIEEIRIRPFEATFQHGHPIYSSKAVRIRLGHSKLDPGRETFVSDEDENLTAIADENYMWTYTSPEFPMLQENVLQTFKLPRPALCIGGIVKIELLGRIQKQFTDDKYYICVCHVQVTGRSLSPDLMIDLSDPAGYSNLKYLPGAGNLRPEDLISIDAKDSPDWRSLVSRYRQMRQLAMVYMLLGPVQLQFMDEDEADLQM

SEQ ID NO: 14746 - protein, 143 aa, Zea mays subsp. mays
  peptide (1)..(143): Ceres Seq. ID no. 12462544
MWTYTSPEFPMLQENVLQTFKLPRPALCIGGIVKIELLGRIQKQFTDDKYYICVCHVQVTGRSLSPDLMIDLSDPAGYSNLKYLPGAGNLRPEDLISIDAKDSPDWRSLVSRYRQMRQLAMVYMLLGPVQLQFMDEDEADLQM

SEQ ID NO: 14747 - protein, 133 aa, Zea mays subsp. mays
  peptide (1)..(133): Ceres Seq. ID no. 12462545
MLQENVLQTFKLPRPALCIGGIVKIELLGRIQKQFTDDKYYICVCHVQVTGRSLSPDLMIDLSDPAGYSNLKYLPGAGNLRPEDLISIDAKDSPDWRSLVSRYRQMRQLAMVYMLLGPVQLQFMDEDEADLQM

SEQ ID NO: 14748 - DNA, 552 bp, Zea mays subsp. mays
  misc_feature (1)..(552): Ceres Seq. ID no. 12469663
  misc_feature (1)..(552): Ortholog of  Ceres SEQ ID NO 13584744 as cited in SEQ ID NO 69137
cagaggttgaagcactctctatggcacaacatgagaatcttgtgccactatggggttattgtatccagggaaactcgaggctcctcatatattctttcatggagaatgggagtcttgatgattggcttcacaacacggacaatgccaactcatttctagattggccaacaagactcaagattgcacaaggagcaggacggggcctttcttatatccacaacacctgcaaccctaacattgttcaccgtgacgtcaagtccagcaacatcttacttgatagagaattcaatgcttatgtcgctgattttggccttgcaagattgatccttccttacaacacacatgtcacgacagagctagtaggcactcttggttacattcctcccgagtatggacaagcctgggtggccaccctgagaggtgatatatatagttttggagtggtcttgcttgagctgctcacagggaagaggcctgtccaggttttgaccaagacgaaagaacttgtccaatgggtaagagagatgaggtcccaangggaaggatattgag

SEQ ID NO: 14749 - protein, 182 aa, Zea mays subsp. mays
  peptide (1)..(182): Ceres Seq. ID no. 12469664
  misc_feature (179)..(179): Xaa is any aa, unknown or other
EVEALSMAQHENLVPLWGYCIQGNSRLLIYSFMENGSLDDWLHNTDNANSFLDWPTRLKIAQGAGRGLSYIHNTCNPNIVHRDVKSSNILLDREFNAYVADFGLARLILPYNTHVTTELVGTLGYIPPEYGQAWVATLRGDIYSFGVVLLELLTGKRPVQVLTKTKELVQWVREMRSQXEGY

SEQ ID NO: 14750 - protein, 176 aa, Zea mays subsp. mays
  peptide (1)..(176): Ceres Seq. ID no. 12469665
  misc_feature (173)..(173): Xaa is any aa, unknown or other
MAQHENLVPLWGYCIQGNSRLLIYSFMENGSLDDWLHNTDNANSFLDWPTRLKIAQGAGRGLSYIHNTCNPNIVHRDVKSSNILLDREFNAYVADFGLARLILPYNTHVTTELVGTLGYIPPEYGQAWVATLRGDIYSFGVVLLELLTGKRPVQVLTKTKELVQWVREMRSQXEGY

SEQ ID NO: 14751 - protein, 150 aa, Zea mays subsp. mays
  peptide (1)..(150): Ceres Seq. ID no. 12469666
  misc_feature (147)..(147): Xaa is any aa, unknown or other
MENGSLDDWLHNTDNANSFLDWPTRLKIAQGAGRGLSYIHNTCNPNIVHRDVKSSNILLDREFNAYVADFGLARLILPYNTHVTTELVGTLGYIPPEYGQAWVATLRGDIYSFGVVLLELLTGKRPVQVLTKTKELVQWVREMRSQXEGY

SEQ ID NO: 14752 - DNA, 383 bp, Zea mays subsp. mays
  misc_feature (1)..(383): Ceres Seq. ID no. 4356909
  misc_feature (1)..(383): Ortholog of  Ceres SEQ ID NO 15179179 as cited in SEQ ID NO 0
tttgaaatgggtgatcatcggccacctcctgtacattcgatggaatatatgggtgctgatagaatgccatacttgtatggtgttgaacaaggaggtcctcgcccttttctagaacagccttcgccaagaacctgccctcctgaggcaccaaggacaaacagtgaagttcccagaaacatgtctgatgcagtgccagctacagatttcagaaagggaccagtggcaattgaaaaccaagtggctacaccaacaggcacaactgaagttatcattccttgcaattatataggctttgtctgtggaaacaatggcagtgaaattgaagaaatagagaagatgtcaggtgcttcaattacagttcatgatcctaaagctggcgacgc

SEQ ID NO: 14753 - protein, 127 aa, Zea mays subsp. mays
  peptide (1)..(127): Ceres Seq. ID no. 4356910
FEMGDHRPPPVHSMEYMGADRMPYLYGVEQGGPRPFLEQPSPRTCPPEAPRTNSEVPRNMSDAVPATDFRKGPVAIENQVATPTGTTEVIIPCNYIGFVCGNNGSEIEEIEKMSGASITVHDPKAGD

SEQ ID NO: 14754 - protein, 125 aa, Zea mays subsp. mays
  peptide (1)..(125): Ceres Seq. ID no. 4356911
MGDHRPPPVHSMEYMGADRMPYLYGVEQGGPRPFLEQPSPRTCPPEAPRTNSEVPRNMSDAVPATDFRKGPVAIENQVATPTGTTEVIIPCNYIGFVCGNNGSEIEEIEKMSGASITVHDPKAGD

SEQ ID NO: 14755 - protein, 114 aa, Zea mays subsp. mays
  peptide (1)..(114): Ceres Seq. ID no. 4356912
MEYMGADRMPYLYGVEQGGPRPFLEQPSPRTCPPEAPRTNSEVPRNMSDAVPATDFRKGPVAIENQVATPTGTTEVIIPCNYIGFVCGNNGSEIEEIEKMSGASITVHDPKAGD

SEQ ID NO: 14756 - DNA, 739 bp, Zea mays subsp. mays
  misc_feature (1)..(739): Ceres Seq. ID no. 13504114
  misc_feature (1)..(739): Ortholog of  Ceres SEQ ID NO 15176895 as cited in SEQ ID NO 54714
actttcttcgagcgtcgacaggctttccggctgccgaccccacccgggcggctcgccggggtcctctacagacgcagcgggtcgacttctgtcagggtgctacgatgatgcggcgtgcgtccctgtcctgctcgagcacaagctccggcggggaggggaggctaacgtacaaggatggtggcgtggacatagacgccgacgccgagcttgtccgccgcatagctaggatggcacccgggattggcggcttcggcggtctctttccctacaatgacgattaccttgttgttagcaccgacggggtcgggacgaagctgaagcttgctttcgaaagtggtattcatgacacaatcggcattgacctggtggcaatgaacgtcaatgacattgttactttaggtgcaaaaccactgttcttcctagattactatgcaacaagcaagcttgatgttgatcttgcagagaaggttatcaatgggattagggatgggtgtgaacaatcagtcggaggagatgtaagatttctgaaatcgaattaccatgacttagcaattcaaccatgcggtattgcgccattatccttgagaaggatgcccggtccttgtaccctgtgcattgatcgggtagagagccnaggccagggtcggaggctngaatgcgtacccgagcctgtcctatagatgagatgtttgagttgtagcagttgaaacaacgctcaacatggtaaaaagttcttggt

SEQ ID NO: 14757 - protein, 225 aa, Zea mays subsp. mays
  peptide (1)..(225): Ceres Seq. ID no. 13504115
  misc_feature (211)..(211): Xaa is any aa, unknown or other
  misc_feature (217)..(217): Xaa is any aa, unknown or other
FLRASTGFPAADPTRAARRGPLQTQRVDFCQGATMMRRASLSCSSTSSGGEGRLTYKDGGVDIDADAELVRRIARMAPGIGGFGGLFPYNDDYLVVSTDGVGTKLKLAFESGIHDTIGIDLVAMNVNDIVTLGAKPLFFLDYYATSKLDVDLAEKVINGIRDGCEQSVGGDVRFLKSNYHDLAIQPCGIAPLSLRRMPGPCTLCIDRVESXGQGRRXECVPEPVL

SEQ ID NO: 14758 - protein, 191 aa, Zea mays subsp. mays
  peptide (1)..(191): Ceres Seq. ID no. 13504116
  misc_feature (177)..(177): Xaa is any aa, unknown or other
  misc_feature (183)..(183): Xaa is any aa, unknown or other
MMRRASLSCSSTSSGGEGRLTYKDGGVDIDADAELVRRIARMAPGIGGFGGLFPYNDDYLVVSTDGVGTKLKLAFESGIHDTIGIDLVAMNVNDIVTLGAKPLFFLDYYATSKLDVDLAEKVINGIRDGCEQSVGGDVRFLKSNYHDLAIQPCGIAPLSLRRMPGPCTLCIDRVESXGQGRRXECVPEPVL

SEQ ID NO: 14759 - protein, 190 aa, Zea mays subsp. mays
  peptide (1)..(190): Ceres Seq. ID no. 13504117
  misc_feature (176)..(176): Xaa is any aa, unknown or other
  misc_feature (182)..(182): Xaa is any aa, unknown or other
MRRASLSCSSTSSGGEGRLTYKDGGVDIDADAELVRRIARMAPGIGGFGGLFPYNDDYLVVSTDGVGTKLKLAFESGIHDTIGIDLVAMNVNDIVTLGAKPLFFLDYYATSKLDVDLAEKVINGIRDGCEQSVGGDVRFLKSNYHDLAIQPCGIAPLSLRRMPGPCTLCIDRVESXGQGRRXECVPEPVL

SEQ ID NO: 14760 - DNA, 901 bp, Zea mays subsp. mays
  misc_feature (1)..(901): Ceres Seq. ID no. 12455262
  misc_feature (1)..(901): Ortholog of  Ceres SEQ ID NO 12582036 as cited in SEQ ID NO 50981
  misc_feature (1)..(901): Ortholog of  Ceres SEQ ID NO 15173523 as cited in SEQ ID NO 61797
ctcccctcctccgcacaaacgcgtcgcatccgctccacaggatcctcggcgccgagtccaagatcttctacctcaagatgaagggtgactaccacaggtaccttgctgagttcaagtcaggtgcagagaggaaggatgctgcggagagcaccatgaatgcctacaaagctgctcaggatattgctcttgctgatctggccccaacccaccccatcaggctcgggcttgctctcaacttctcagtgttctactacgagatcctcaactcccctgaccgtgcttgcaaccttgcaaagcaggcctttgatgaggcaatctccgaactagacagcctgggagaggagtcctacaaggacagcactctgatcatgcagctcctgcgtgacaacttgaccctatggacttccgacaccaacgaggacgccggagatgagatcaaggaagcagctgctgcccccaaagaatccgcccccgagggccagtaagacggatccgatctcccgacctgatgcgtgtctgctgatgtcggggagtttaccaggactgtgccgttcttgatttctgatagcttatcttctagtacacctcgtgttgttctcttcgtcacggcgccggtgcgtgtgcgctgaagctgcctgccattgccattgccgctgtttttaattaagcacacactctagatgttatgcccgcatgctatgtttcgattctcaaagttgataaatgatggctggatgctggttttcgtgctccaagcctgctgcttcttccagggaaaaaaagacctgcccttgttgcagcgttgttgtttagaatgacctatatttgactggtattctgttacggtggctttgcaaagctgtttgtttggtttaatgtctcggaataatatgaattggct

SEQ ID NO: 14761 - protein, 160 aa, Zea mays subsp. mays
  peptide (1)..(160): Ceres Seq. ID no. 12455263
PLLRTNASHPLHRILGAESKIFYLKMKGDYHRYLAEFKSGAERKDAAESTMNAYKAAQDIALADLAPTHPIRLGLALNFSVFYYEILNSPDRACNLAKQAFDEAISELDSLGEESYKDSTLIMQLLRDNLTLWTSDTNEDAGDEIKEAAAAPKESAPEGQ

SEQ ID NO: 14762 - protein, 135 aa, Zea mays subsp. mays
  peptide (1)..(135): Ceres Seq. ID no. 12455264
MKGDYHRYLAEFKSGAERKDAAESTMNAYKAAQDIALADLAPTHPIRLGLALNFSVFYYEILNSPDRACNLAKQAFDEAISELDSLGEESYKDSTLIMQLLRDNLTLWTSDTNEDAGDEIKEAAAAPKESAPEGQ

SEQ ID NO: 14763 - protein, 110 aa, Zea mays subsp. mays
  peptide (1)..(110): Ceres Seq. ID no. 12455265
MNAYKAAQDIALADLAPTHPIRLGLALNFSVFYYEILNSPDRACNLAKQAFDEAISELDSLGEESYKDSTLIMQLLRDNLTLWTSDTNEDAGDEIKEAAAAPKESAPEGQ

SEQ ID NO: 14764 - DNA, 1144 bp, Zea mays subsp. mays; identical to SEQ ID NO: 12883
  misc_feature (1)..(1144): Ceres Seq. ID no. 12340675
  misc_feature (1)..(1144): Ortholog of  Ceres SEQ ID NO 15179153 as cited in SEQ ID NO 1066
  misc_feature (1)..(1144): Ortholog of  Ceres SEQ ID NO 15176047 as cited in SEQ ID NO 55988
  misc_feature (1)..(1144): Ortholog of  Ceres SEQ ID NO 13582167 as cited in SEQ ID NO 56203
  misc_feature (1)..(1144): Ortholog of  Ceres SEQ ID NO 13658295 as cited in SEQ ID NO 66515

SEQ ID NO: 14765 - protein, 257 aa, Zea mays subsp. mays; identical to SEQ ID NO: 12884
  peptide (1)..(257): Ceres Seq. ID no. 12340676

SEQ ID NO: 14766 - protein, 171 aa, Zea mays subsp. mays; identical to SEQ ID NO: 12885
  peptide (1)..(171): Ceres Seq. ID no. 12340677

SEQ ID NO: 14767 - protein, 151 aa, Zea mays subsp. mays; identical to SEQ ID NO: 12886
  peptide (1)..(151): Ceres Seq. ID no. 12340678

SEQ ID NO: 14768 - DNA, 978 bp, Zea mays subsp. mays
  misc_feature (1)..(978): Ceres Seq. ID no. 12469570
  misc_feature (1)..(978): Ortholog of  Ceres SEQ ID NO 15224625 as cited in SEQ ID NO 1390
cccgttgctcgtcgtcgtcctctgcatccgtcccctatttatccgtcccctcctctcccgcactagctcccaagttccatcccatcccgccacgaaattctccacgctccgatccaatcgcaacaatgaagttcggcaagagcctcaacaaccagatcgtggagacgctcccggactggcgcgacaagttcctgtcctacaaggacctcaagaagcggctgaagcagatcggcgccggctctggcgagcggcggagcaagcgccagcgggtgggggacgggcgcggcggatcctcgccgcctgcgatgaccccggaggaggccggattcgtcgcgctcctcgacgccgagctcgacaagttcaacgccttcttcctcgagaaggaggaggactacgtcatccggctgaagggctggtcaagatcctcaagaagtacgacaagaggaccggcgcgctgatccgcctgcccttcatccggaacgtgatgcagganccgttctgcgccaccgacgtgctgtacaagctcgtcaaggggtgcgaggagatgctggaccagntcctcctgccccggaaccagcagcggcccgtgccgagcgacaacggcggggaaggagacagcgacggcgacgacgacaagcaacgaccggcggagccaggcgcctcatcgctgcccancggcggcggcggtggcgctggcgacatggagctggaggagatcgaggacatggagagcatgtacatgaagagtacggtggccgcgctcagggcgctcagggagatcaggagcgggagctccacggtgagcgcgttctccctgccgccactacggtgattgacacgttgtgttcggttcagtagcgaagcgagacagaacggggccgactgcgctgttgctgtaggtagtgtttggttcaaagaagacacgaacaaaatgaaagaaaatctgtaaaatgatagtaatattcatctagtattctc

SEQ ID NO: 14769 - protein, 276 aa, Zea mays subsp. mays
  peptide (1)..(276): Ceres Seq. ID no. 12469571
  misc_feature (164)..(164): Xaa is any aa, unknown or other
  misc_feature (186)..(186): Xaa is any aa, unknown or other
  misc_feature (225)..(225): Xaa is any aa, unknown or other
PLLVVVLCIRPLFIRPLLSRTSSQVPSHPATKFSTLRSNRNNEVRQEPQQPDRGDAPGLARQVPVLQGPQEAAEADRRRLWRAAEQAPAGGGRARRILAACDDPGGGRIRRAPRRRARQVQRLLPREGGGLRHPAEGLVKILKKYDKRTGALIRLPFIRNVMQXPFCATDVLYKLVKGCEEMLDQXLLPRNQQRPVPSDNGGEGDSDGDDDKQRPAEPGASSLPXGGGGGAGDMELEEIEDMESMYMKSTVAALRALREIRSGSSTVSAFSLPPLR

SEQ ID NO: 14770 - protein, 151 aa, Zea mays subsp. mays
  peptide (1)..(151): Ceres Seq. ID no. 12469572
RCSSSSSASVPYLSVPSSPALAPKFHPIPPRNSPRSDPIATMKFGKSLNNQIVETLPDWRDKFLSYKDLKKRLKQIGAGSGERRSKRQRVGDGRGGSSPPAMTPEEAGFVALLDAELDKFNAFFLEKEEDYVIRLKGWSRSSRSTTRGPAR

SEQ ID NO: 14771 - DNA, 1315 bp, Zea mays subsp. mays; identical to SEQ ID NO: 14233
  misc_feature (1)..(1315): Ceres Seq. ID no. 13635214
  misc_feature (1)..(1315): Ortholog of  Ceres SEQ ID NO 13590307 as cited in SEQ ID NO 67154

SEQ ID NO: 14772 - protein, 153 aa, Zea mays subsp. mays; identical to SEQ ID NO: 14234
  peptide (1)..(153): Ceres Seq. ID no. 15220341
  misc_feature (10)..(10): Xaa is any aa, unknown or other
  misc_feature (11)..(11): Xaa is any aa, unknown or other
  misc_feature (26)..(26): Xaa is any aa, unknown or other
  misc_feature (27)..(27): Xaa is any aa, unknown or other
  misc_feature (29)..(29): Xaa is any aa, unknown or other
  misc_feature (30)..(30): Xaa is any aa, unknown or other
  misc_feature (32)..(32): Xaa is any aa, unknown or other
  misc_feature (33)..(33): Xaa is any aa, unknown or other
  misc_feature (34)..(34): Xaa is any aa, unknown or other
  misc_feature (40)..(40): Xaa is any aa, unknown or other
  misc_feature (47)..(47): Xaa is any aa, unknown or other
  misc_feature (50)..(50): Xaa is any aa, unknown or other
  misc_feature (55)..(55): Xaa is any aa, unknown or other
  misc_feature (56)..(56): Xaa is any aa, unknown or other
  misc_feature (63)..(63): Xaa is any aa, unknown or other
  misc_feature (78)..(78): Xaa is any aa, unknown or other
  misc_feature (87)..(87): Xaa is any aa, unknown or other
  misc_feature (93)..(93): Xaa is any aa, unknown or other
  misc_feature (97)..(97): Xaa is any aa, unknown or other
  misc_feature (104)..(104): Xaa is any aa, unknown or other
  misc_feature (106)..(106): Xaa is any aa, unknown or other
  misc_feature (117)..(117): Xaa is any aa, unknown or other
  misc_feature (118)..(118): Xaa is any aa, unknown or other
  misc_feature (123)..(123): Xaa is any aa, unknown or other
  misc_feature (132)..(132): Xaa is any aa, unknown or other
  misc_feature (133)..(133): Xaa is any aa, unknown or other
  misc_feature (140)..(140): Xaa is any aa, unknown or other
  misc_feature (148)..(148): Xaa is any aa, unknown or other

SEQ ID NO: 14773 - protein, 143 aa, Zea mays subsp. mays; identical to SEQ ID NO: 14235
  peptide (1)..(143): Ceres Seq. ID no. 15220342
  misc_feature (8)..(8): Xaa is any aa, unknown or other
  misc_feature (9)..(9): Xaa is any aa, unknown or other
  misc_feature (15)..(15): Xaa is any aa, unknown or other
  misc_feature (24)..(24): Xaa is any aa, unknown or other
  misc_feature (25)..(25): Xaa is any aa, unknown or other
  misc_feature (32)..(32): Xaa is any aa, unknown or other
  misc_feature (39)..(39): Xaa is any aa, unknown or other
  misc_feature (49)..(49): Xaa is any aa, unknown or other
  misc_feature (50)..(50): Xaa is any aa, unknown or other
  misc_feature (62)..(62): Xaa is any aa, unknown or other
  misc_feature (75)..(75): Xaa is any aa, unknown or other
  misc_feature (77)..(77): Xaa is any aa, unknown or other
  misc_feature (78)..(78): Xaa is any aa, unknown or other
  misc_feature (79)..(79): Xaa is any aa, unknown or other
  misc_feature (86)..(86): Xaa is any aa, unknown or other
  misc_feature (101)..(101): Xaa is any aa, unknown or other
  misc_feature (104)..(104): Xaa is any aa, unknown or other
  misc_feature (119)..(119): Xaa is any aa, unknown or other

SEQ ID NO: 14774 - protein, 130 aa, Zea mays subsp. mays; identical to SEQ ID NO: 14236
  peptide (1)..(130): Ceres Seq. ID no. 15220343
  misc_feature (2)..(2): Xaa is any aa, unknown or other
  misc_feature (11)..(11): Xaa is any aa, unknown or other
  misc_feature (12)..(12): Xaa is any aa, unknown or other
  misc_feature (19)..(19): Xaa is any aa, unknown or other
  misc_feature (26)..(26): Xaa is any aa, unknown or other
  misc_feature (36)..(36): Xaa is any aa, unknown or other
  misc_feature (37)..(37): Xaa is any aa, unknown or other
  misc_feature (49)..(49): Xaa is any aa, unknown or other
  misc_feature (62)..(62): Xaa is any aa, unknown or other
  misc_feature (64)..(64): Xaa is any aa, unknown or other
  misc_feature (65)..(65): Xaa is any aa, unknown or other
  misc_feature (66)..(66): Xaa is any aa, unknown or other
  misc_feature (73)..(73): Xaa is any aa, unknown or other
  misc_feature (88)..(88): Xaa is any aa, unknown or other
  misc_feature (91)..(91): Xaa is any aa, unknown or other
  misc_feature (106)..(106): Xaa is any aa, unknown or other

SEQ ID NO: 14775 - DNA, 1015 bp, Zea mays subsp. mays; identical to SEQ ID NO: 3770
  misc_feature (1)..(1015): Ceres Seq. ID no. 12595679
  misc_feature (1)..(1015): Ortholog of  Ceres SEQ ID NO 12610385 as cited in SEQ ID NO 55938
  misc_feature (1)..(1015): Ortholog of  Ceres SEQ ID NO 15178805 as cited in SEQ ID NO 0

SEQ ID NO: 14776 - protein, 143 aa, Zea mays subsp. mays; identical to SEQ ID NO: 3771
  peptide (1)..(143): Ceres Seq. ID no. 12595680

SEQ ID NO: 14777 - protein, 91 aa, Zea mays subsp. mays; identical to SEQ ID NO: 3772
  peptide (1)..(91): Ceres Seq. ID no. 12595681

SEQ ID NO: 14778 - protein, 82 aa, Zea mays subsp. mays; identical to SEQ ID NO: 3773
  peptide (1)..(82): Ceres Seq. ID no. 12595682

SEQ ID NO: 14779 - protein, 81 aa, Zea mays subsp. mays; identical to SEQ ID NO: 3774
  peptide (1)..(81): Ceres Seq. ID no. 12595683

SEQ ID NO: 14780 - DNA, 1610 bp, Zea mays subsp. mays
  misc_feature (1)..(1610): Ceres Seq. ID no. 13504118
  misc_feature (1)..(1610): Ortholog of  Ceres SEQ ID NO 13654166 as cited in SEQ ID NO 68381
  misc_feature (1)..(1610): Ortholog of  Ceres SEQ ID NO 13599720 as cited in SEQ ID NO 0
gttgctctgaaatcatccgtgcattttctttctttttatttggcaagggactttccttctcttttctttctcctaatttatagtggtgaccaaacagataagggacctgcgcgtcgctgagagggaggaagacattggattctacgctggtttcctcggcgcagcatacatgatcggcagaggcgtcgcgtcggtcttctggggcgtggtggcggaccgcgttggccggaagcccgtcatcgcgttctccgtcctctcggtcgtggtgttcaacaccctgttcgggctgagcgccaagtactggatggctatcgctacgaggtttctcctgggcgccctcaacggcttccttgcgccagcgaaggcgtactccatcgaggtctgccggcctgagcagcaggctctgggtatatcggtcgtaagcacagcgtgggggatgggcgtcataatcggcccggccatcggtggctacctcgcgcagcctgccaaacagtatccgcacctgttccatgagaaatcagtgtttggaaggttcccgtacctgttgccatgcctgtgcatctcgttcttcgccgccttggttgtcataagctgcgcatggctcccggagaccctacacaagcacagaggcctggagagagcagcagctgaagtggcagaaggcacgacagcagcagcagcagctcaagaaagcaccccggagccggagccggagccacctaagagcagcctgctcaggaaccggccactcatgtcctccatcgtcacgtactgcgtcttctccctccacgacaccgcgtacgtcgagatattttctctgtggaccgtgagtggcagagatcacggcggcctcagcttcgcgtccaaggacgtcggccaagtcctcaccgtcgctggcgccagtctcctggtgtaccaaatcttcgcctaccgttgggtcaacaagatcctcggcccagtcaactcaacccgagtttcgtcggcgctatccataccgataatcgccgcttaccccttcatgacgcgcttgtcgggaataaggcttggtgtgcctctctacgtcgcggcgatgctcaaaagcgtcctcgccatcaccagagtcaccggcacatcgctcctgcagaacaacgctgtgccacaggagcagaggggcgctgcgaacgggatagctacgacggcgatgtctctgtccaaggcgttcgctccggccgtggccggcatcttgttctcgtgggcacagaagcgccagcatgccgcgttctttccaggtgaccagatggtgtttctgctcctgaatctgacggaggtcatcgggctcgtgctcaccttcaagcctttcctcgcggttccccagcagtacaaacagtgaaagcggtgctgcgtgcgtgcgtgctctgcatggatactatagagaggtagctagctgctagccagtgtgtgtgggcgagagcgagacgagggagatggacatgtcaagtagaagcagaggatatgatgtcattatacatatttactttgcgagatatgtagttcctcatgagtcttcgctgtgcggttttctaaaaaaaaattgagataaagttggtctctcaattatatggtgcattccg

SEQ ID NO: 14781 - protein, 399 aa, Zea mays subsp. mays
  peptide (1)..(399): Ceres Seq. ID no. 13504119
MIGRGVASVFWGVVADRVGRKPVIAFSVLSVVVFNTLFGLSAKYWMAIATRFLLGALNGFLAPAKAYSIEVCRPEQQALGISVVSTAWGMGVIIGPAIGGYLAQPAKQYPHLFHEKSVFGRFPYLLPCLCISFFAALVVISCAWLPETLHKHRGLERAAAEVAEGTTAAAAAQESTPEPEPEPPKSSLLRNRPLMSSIVTYCVFSLHDTAYVEIFSLWTVSGRDHGGLSFASKDVGQVLTVAGASLLVYQIFAYRWVNKILGPVNSTRVSSALSIPIIAAYPFMTRLSGIRLGVPLYVAAMLKSVLAITRVTGTSLLQNNAVPQEQRGAANGIATTAMSLSKAFAPAVAGILFSWAQKRQHAAFFPGDQMVFLLLNLTEVIGLVLTFKPFLAVPQQYKQ

SEQ ID NO: 14782 - protein, 354 aa, Zea mays subsp. mays
  peptide (1)..(354): Ceres Seq. ID no. 13504120
MAIATRFLLGALNGFLAPAKAYSIEVCRPEQQALGISVVSTAWGMGVIIGPAIGGYLAQPAKQYPHLFHEKSVFGRFPYLLPCLCISFFAALVVISCAWLPETLHKHRGLERAAAEVAEGTTAAAAAQESTPEPEPEPPKSSLLRNRPLMSSIVTYCVFSLHDTAYVEIFSLWTVSGRDHGGLSFASKDVGQVLTVAGASLLVYQIFAYRWVNKILGPVNSTRVSSALSIPIIAAYPFMTRLSGIRLGVPLYVAAMLKSVLAITRVTGTSLLQNNAVPQEQRGAANGIATTAMSLSKAFAPAVAGILFSWAQKRQHAAFFPGDQMVFLLLNLTEVIGLVLTFKPFLAVPQQYKQ

SEQ ID NO: 14783 - protein, 310 aa, Zea mays subsp. mays
  peptide (1)..(310): Ceres Seq. ID no. 13504121
MGVIIGPAIGGYLAQPAKQYPHLFHEKSVFGRFPYLLPCLCISFFAALVVISCAWLPETLHKHRGLERAAAEVAEGTTAAAAAQESTPEPEPEPPKSSLLRNRPLMSSIVTYCVFSLHDTAYVEIFSLWTVSGRDHGGLSFASKDVGQVLTVAGASLLVYQIFAYRWVNKILGPVNSTRVSSALSIPIIAAYPFMTRLSGIRLGVPLYVAAMLKSVLAITRVTGTSLLQNNAVPQEQRGAANGIATTAMSLSKAFAPAVAGILFSWAQKRQHAAFFPGDQMVFLLLNLTEVIGLVLTFKPFLAVPQQYKQ

SEQ ID NO: 14784 - DNA, 903 bp, Zea mays subsp. mays
  misc_feature (1)..(903): Ceres Seq. ID no. 12469489
  misc_feature (1)..(903): Ortholog of  Ceres SEQ ID NO 13595495 as cited in SEQ ID NO 56624
  misc_feature (1)..(903): Ortholog of  Ceres SEQ ID NO 12608406 as cited in SEQ ID NO 58017
  misc_feature (1)..(903): Ortholog of  Ceres SEQ ID NO 13599397 as cited in SEQ ID NO 0
gtggcgggatcggatcggatcggatcgacacccagccagcgcgtggtgagtagaacacccccaagaggccaggactgagactgaccatgggagaagcgtgcagggacgcggcggctgcgggccagcagctgcggcaggacgaagagggcggaggaggagggcgtcacgcggagaaggagctcgtcggtgacccaataacccacgactcggtcgtctcggcgaagctgtacgaggacgtgccggcgacgccgatgatggcgctcaaccacatctcccgcctgtgcgaatccgtcgacgcgtccgtccggttctacgtcaaggcgctcggcttcgtgctcatccagcgcccgccggcgctcgacttctccggcgcatggctcttcaactacggcgtgggtatccacttcgtgcagcgcgacgacgcgcggcgggcccccaacgtgaggccggaggaggcggagctggaccccatggacaaccacgtgtcgttccagtgcgaggacatgggcgccatggagcggcggctgcgggagatgcgcgtgcggtacatgaagcggaccatcaacgaggaggaagggtcgcccatcgaccagctnttnttcagggacccggacggcttcatgatcgagatctgcaactgcgagaacctggagctcgtccccgccggcgccttcggccgcctcagactgccccgcgaccgccacaacccgcccgtgngcatggtcgccggcagcgacgagtagagggggagggggctttcgcgtccacgtgaccctccgccctacaaggccagcaccacaggccgggggaaatagtttgtggctcatataatcgccgcgggcgcttatgctggattntgggccgagttccagttttgaattcgaatttgtgctagttttggtt

SEQ ID NO: 14785 - protein, 218 aa, Zea mays subsp. mays
  peptide (1)..(218): Ceres Seq. ID no. 12469490
  misc_feature (170)..(170): Xaa is any aa, unknown or other
  misc_feature (171)..(171): Xaa is any aa, unknown or other
  misc_feature (211)..(211): Xaa is any aa, unknown or other
MGEACRDAAAAGQQLRQDEEGGGGGRHAEKELVGDPITHDSVVSAKLYEDVPATPMMALNHISRLCESVDASVRFYVKALGFVLIQRPPALDFSGAWLFNYGVGIHFVQRDDARRAPNVRPEEAELDPMDNHVSFQCEDMGAMERRLREMRVRYMKRTINEEEGSPIDQXXFRDPDGFMIEICNCENLELVPAGAFGRLRLPRDRHNPPVXMVAGSDE

SEQ ID NO: 14786 - protein, 163 aa, Zea mays subsp. mays
  peptide (1)..(163): Ceres Seq. ID no. 12469491
  misc_feature (115)..(115): Xaa is any aa, unknown or other
  misc_feature (116)..(116): Xaa is any aa, unknown or other
  misc_feature (156)..(156): Xaa is any aa, unknown or other
MMALNHISRLCESVDASVRFYVKALGFVLIQRPPALDFSGAWLFNYGVGIHFVQRDDARRAPNVRPEEAELDPMDNHVSFQCEDMGAMERRLREMRVRYMKRTINEEEGSPIDQXXFRDPDGFMIEICNCENLELVPAGAFGRLRLPRDRHNPPVXMVAGSDE

SEQ ID NO: 14787 - protein, 162 aa, Zea mays subsp. mays
  peptide (1)..(162): Ceres Seq. ID no. 12469492
  misc_feature (114)..(114): Xaa is any aa, unknown or other
  misc_feature (115)..(115): Xaa is any aa, unknown or other
  misc_feature (155)..(155): Xaa is any aa, unknown or other
MALNHISRLCESVDASVRFYVKALGFVLIQRPPALDFSGAWLFNYGVGIHFVQRDDARRAPNVRPEEAELDPMDNHVSFQCEDMGAMERRLREMRVRYMKRTINEEEGSPIDQXXFRDPDGFMIEICNCENLELVPAGAFGRLRLPRDRHNPPVXMVAGSDE

SEQ ID NO: 14788 - DNA, 505 bp, Zea mays subsp. mays
  misc_feature (1)..(505): Ceres Seq. ID no. 11415248
  misc_feature (1)..(505): Ortholog of  Ceres SEQ ID NO 13583505 as cited in SEQ ID NO 62240
agaagtttagaagaacggggagggaagcacgcccccaaacgttccgaggtttcgcctctcggagcgcaccaacgccacccggagcgactcgccaccggcgcggagaaggagggcggaggctaggcgatggcggacgagaatgaggctgggaagaaagaggaagaggaatttagcacaggccctctgtcagtactaatgatgagtgttaagaacaacacccaggttctcatcaattgccgcaacaacaagaagctgcttggccgggttcgtgcttttgatcgccactgtaacatggtgctcgagaacgtgcgggagatgtggacagaggtccccaagactggcaagggcaaaaagaaggctctgcctgtgaacaaggatagattcatcagcaagatgttcctcaggggcgactcggtcatcatcgtgctgaggaaccccaagtgacagcccaaccggaagccaggtctctgttgaaaactgtagcttatgatgtatgttggggatg

SEQ ID NO: 14789 - protein, 105 aa, Zea mays subsp. mays
  peptide (1)..(105): Ceres Seq. ID no. 11415249
MADENEAGKKEEEEFSTGPLSVLMMSVKNNTQVLINCRNNKKLLGRVRAFDRHCNMVLENVREMWTEVPKTGKGKKKALPVNKDRFISKMFLRGDSVIIVLRNPK

SEQ ID NO: 14790 - protein, 82 aa, Zea mays subsp. mays; identical to SEQ ID NO: 12477
  peptide (1)..(82): Ceres Seq. ID no. 11415250

SEQ ID NO: 14791 - protein, 81 aa, Zea mays subsp. mays; identical to SEQ ID NO: 12478
  peptide (1)..(81): Ceres Seq. ID no. 11415251

SEQ ID NO: 14792 - DNA, 431 bp, Zea mays subsp. mays
  misc_feature (1)..(431): Ceres Seq. ID no. 4489669
  misc_feature (1)..(431): Ortholog of  Ceres SEQ ID NO 13595008 as cited in SEQ ID NO 56041
acaacaagctcgacggaacaactgactagaactagtacgtagaaatccaacactcgggacgaaattaaaagagacgagacgacgcatcatccggsgtggcggcgcaggagggcggcatgaggctggtgtcgcacccgatcgcggcgcacgacgggcggctgccgcggcagtacacggcggaggggcagggcgccaagaaggacatgtcgccgccgctggaatggtacggcgtgcccgagggcgcgcggtcgctggcgctgctggtgcaggacatcgacgccgaccccatcgtgccgtggacgcactgggtggtggccaacatcccgcccgccaccaggggcctccccgaggggttctccggcgccgcgggggcggggccggggcgcgaccagctcggcggactgcaggagggggtcaacgactggaagcag

SEQ ID NO: 14793 - protein, 105 aa, Zea mays subsp. mays
  peptide (1)..(105): Ceres Seq. ID no. 4489670
MRLVSHPIAAHDGRLPRQYTAEGQGAKKDMSPPLEWYGVPEGARSLALLVQDIDADPIVPWTHWVVANIPPATRGLPEGFSGAAGAGPGRDQLGGLQEGVNDWKQ

SEQ ID NO: 14794 - protein, 76 aa, Zea mays subsp. mays
  peptide (1)..(76): Ceres Seq. ID no. 4489671
MSPPLEWYGVPEGARSLALLVQDIDADPIVPWTHWVVANIPPATRGLPEGFSGAAGAGPGRDQLGGLQEGVNDWKQ

SEQ ID NO: 14795 - protein, 70 aa, Zea mays subsp. mays
  peptide (1)..(70): Ceres Seq. ID no. 4489672
MVRRARGRAVAGAAGAGHRRRPHRAVDALGGGQHPARHQGPPRGVLRRRGGGAGARPARRTAGGGQRLEA

SEQ ID NO: 14796 - DNA, 516 bp, Zea mays subsp. mays
  misc_feature (1)..(516): Ceres Seq. ID no. 13635370
  misc_feature (1)..(516): Ortholog of  Ceres SEQ ID NO 14302840 as cited in SEQ ID NO 62295
  misc_feature (1)..(516): Ortholog of  Ceres SEQ ID NO 13596892 as cited in SEQ ID NO 62900
attatcgcgctcaggctcgtgccgctcgtggtcgtacgctgcagcaggcgatcggagcaaactaagaagcgaacaggccgcccgtcgacgccatggcgccggatctggtgaacggcgtgctcaactgggtggggacgccggccatggtggccagcctgctgctcttctacccgccctactatctcttcaagacatgctactccttcctttcctggctcttccccgaggacctcgccggcaaggtcgtcctcatcactggcgcttcctccggcatcggcgagcaactggcctaccagtacgcgctgaatcgggcgtccctcgccctcgtcgcgagaagggagtcgagcctccggcacgtcgccgaccgagcactcgagctcggcgcgcgcgacgtcgtcgtcctcccaggcgacgtctccacccccgacgactgcgacaggttcgttcggaccgcgatcagtcactacgaccgattggaccatctcgtgtgcyatgctggcgtcgcgagcgtcggcg

SEQ ID NO: 14797 - protein, 171 aa, Zea mays subsp. mays
  peptide (1)..(171): Ceres Seq. ID no. 13635371
  misc_feature (164)..(164): Xaa is any aa, unknown or other
LSRSGSCRSWSYAAAGDRSKLRSEQAARRRHGAGSGERRAQLGGDAGHGGQPAALLPALLSLQDMLLLPFLALPRGPRRQGRPHHWRFLRHRRATGLPVRAESGVPRPRREKGVEPPARRRPSTRARRARRRRPPRRRLHPRRLRQVRSDRDQSLRPIGPSRVXCWRRERR

SEQ ID NO: 14798 - protein, 141 aa, Zea mays subsp. mays
  peptide (1)..(141): Ceres Seq. ID no. 13635372
  misc_feature (134)..(134): Xaa is any aa, unknown or other
MAPDLVNGVLNWVGTPAMVASLLLFYPPYYLFKTCYSFLSWLFPEDLAGKVVLITGASSGIGEQLAYQYALNRASLALVARRESSLRHVADRALELGARDVVVLPGDVSTPDDCDRFVRTAISHYDRLDHLVCXAGVASVG

SEQ ID NO: 14799 - protein, 124 aa, Zea mays subsp. mays
  peptide (1)..(124): Ceres Seq. ID no. 13635373
  misc_feature (117)..(117): Xaa is any aa, unknown or other
MVASLLLFYPPYYLFKTCYSFLSWLFPEDLAGKVVLITGASSGIGEQLAYQYALNRASLALVARRESSLRHVADRALELGARDVVVLPGDVSTPDDCDRFVRTAISHYDRLDHLVCXAGVASVG

SEQ ID NO: 14800 - DNA, 846 bp, Zea mays subsp. mays
  misc_feature (1)..(846): Ceres Seq. ID no. 12348321
  misc_feature (1)..(846): Ortholog of  Ceres SEQ ID NO 12583413 as cited in SEQ ID NO 56816
  misc_feature (1)..(846): Ortholog of  Ceres SEQ ID NO 15168480 as cited in SEQ ID NO 57927
  misc_feature (1)..(846): Ortholog of  Ceres SEQ ID NO 15177738 as cited in SEQ ID NO 0
atccgtagcgttccattccattccatcccatctccctcctcgcctacggcttcttccaccgcggcatcgtgcccggcctctgcttcggcgcgggcctggggattacgctgttcggcatggcctacatgttcgtccacgacggcctggtccaccgccgctttccggtcggccccatcgccgacgtgccctacttccgccgagtggctgcctcgcacaagatacaccacatggacaagttcggcggcgtcccgtatgggctcttcctgggaccaaaggagctggaggaggttggtggcctggacgagcttgttagcagtccggtgagtgaagctactgatactgaagacgcaggagaagaaaagacgcgtccagttgtatgcgttgtccgaacaagcgtgttcatgggccagagtgtgccaaatgagttctagctttaggcgagtgggccaaatgagtgtgggctgcgtcccagggtagtataagtactatgagtctgtaataatcaggacaagaagaatttagcatccagtagctaacagagctggaaaaggagctcgcgcgaaccagaagggccatctgatggattcgtacatggagctggaggaggttgtgagtccggcgcggcgagctcctccgcgcgctccgtggtttttgttttttgttttggtcgcttttttgttgatttcattgtcttgtttggtactggagggttggcgaatcgattttggatgcactggcgtagatgttggctgtccacttgccctgcatttcgaatggtctgggaaggcacggttcgtacatggaaaatgtccggtgccgtggaattactattgttttgtttgctgc

SEQ ID NO: 14801 - protein, 107 aa, Zea mays subsp. mays
  peptide (1)..(107): Ceres Seq. ID no. 12348322
IRSVPFHSIPSPSSPTASSTAASCPASASARAWGLRCSAWPTCSSTTAWSTAAFRSAPSPTCPTSAEWLPRTRYTTWTSSAASRMGSSWDQRSWRRLVAWTSLLAVR

SEQ ID NO: 14802 - protein, 104 aa, Zea mays subsp. mays
  peptide (1)..(104): Ceres Seq. ID no. 12348323
MAYMFVHDGLVHRRFPVGPIADVPYFRRVAASHKIHHMDKFGGVPYGLFLGPKELEEVGGLDELVSSPVSEATDTEDAGEEKTRPVVCVVRTSVFMGQSVPNEF

SEQ ID NO: 14803 - protein, 103 aa, Zea mays subsp. mays
  peptide (1)..(103): Ceres Seq. ID no. 12348324
SVAFHSIPSHLPPRLRLLPPRHRARPLLRRGPGDYAVRHGLHVRPRRPGPPPLSGRPHRRRALLPPSGCLAQDTPHGQVRRRPVWALPGTKGAGGGWWPGRAC

SEQ ID NO: 14804 - DNA, 2328 bp, Zea mays subsp. mays; identical to SEQ ID NO: 14429
  misc_feature (1)..(2328): Ceres Seq. ID no. 13635296
  misc_feature (1)..(2328): Ortholog of  Ceres SEQ ID NO 14315309 as cited in SEQ ID NO 53998
  misc_feature (1)..(2328): Ortholog of  Ceres SEQ ID NO 13638213 as cited in SEQ ID NO 57275

SEQ ID NO: 14805 - protein, 676 aa, Zea mays subsp. mays; identical to SEQ ID NO: 14430
  peptide (1)..(676): Ceres Seq. ID no. 15220344
  misc_feature (160)..(160): Xaa is any aa, unknown or other
  misc_feature (436)..(436): Xaa is any aa, unknown or other
  misc_feature (448)..(448): Xaa is any aa, unknown or other
  misc_feature (450)..(450): Xaa is any aa, unknown or other
  misc_feature (457)..(457): Xaa is any aa, unknown or other
  misc_feature (465)..(465): Xaa is any aa, unknown or other
  misc_feature (469)..(469): Xaa is any aa, unknown or other
  misc_feature (479)..(479): Xaa is any aa, unknown or other
  misc_feature (519)..(519): Xaa is any aa, unknown or other
  misc_feature (521)..(521): Xaa is any aa, unknown or other
  misc_feature (523)..(523): Xaa is any aa, unknown or other
  misc_feature (524)..(524): Xaa is any aa, unknown or other
  misc_feature (536)..(536): Xaa is any aa, unknown or other
  misc_feature (545)..(545): Xaa is any aa, unknown or other
  misc_feature (555)..(555): Xaa is any aa, unknown or other
  misc_feature (564)..(564): Xaa is any aa, unknown or other
  misc_feature (570)..(570): Xaa is any aa, unknown or other
  misc_feature (571)..(571): Xaa is any aa, unknown or other
  misc_feature (581)..(581): Xaa is any aa, unknown or other
  misc_feature (649)..(649): Xaa is any aa, unknown or other
  misc_feature (660)..(660): Xaa is any aa, unknown or other
  misc_feature (661)..(661): Xaa is any aa, unknown or other
  misc_feature (662)..(662): Xaa is any aa, unknown or other
  misc_feature (676)..(676): Xaa is any aa, unknown or other

SEQ ID NO: 14806 - protein, 601 aa, Zea mays subsp. mays; identical to SEQ ID NO: 14431
  peptide (1)..(601): Ceres Seq. ID no. 15220345
  misc_feature (85)..(85): Xaa is any aa, unknown or other
  misc_feature (361)..(361): Xaa is any aa, unknown or other
  misc_feature (373)..(373): Xaa is any aa, unknown or other
  misc_feature (375)..(375): Xaa is any aa, unknown or other
  misc_feature (382)..(382): Xaa is any aa, unknown or other
  misc_feature (390)..(390): Xaa is any aa, unknown or other
  misc_feature (394)..(394): Xaa is any aa, unknown or other
  misc_feature (404)..(404): Xaa is any aa, unknown or other
  misc_feature (444)..(444): Xaa is any aa, unknown or other
  misc_feature (446)..(446): Xaa is any aa, unknown or other
  misc_feature (448)..(448): Xaa is any aa, unknown or other
  misc_feature (449)..(449): Xaa is any aa, unknown or other
  misc_feature (461)..(461): Xaa is any aa, unknown or other
  misc_feature (470)..(470): Xaa is any aa, unknown or other
  misc_feature (480)..(480): Xaa is any aa, unknown or other
  misc_feature (489)..(489): Xaa is any aa, unknown or other
  misc_feature (495)..(495): Xaa is any aa, unknown or other
  misc_feature (496)..(496): Xaa is any aa, unknown or other
  misc_feature (506)..(506): Xaa is any aa, unknown or other
  misc_feature (574)..(574): Xaa is any aa, unknown or other
  misc_feature (585)..(585): Xaa is any aa, unknown or other
  misc_feature (586)..(586): Xaa is any aa, unknown or other
  misc_feature (587)..(587): Xaa is any aa, unknown or other
  misc_feature (601)..(601): Xaa is any aa, unknown or other

SEQ ID NO: 14807 - protein, 589 aa, Zea mays subsp. mays; identical to SEQ ID NO: 14432
  peptide (1)..(589): Ceres Seq. ID no. 15220346
  misc_feature (73)..(73): Xaa is any aa, unknown or other
  misc_feature (349)..(349): Xaa is any aa, unknown or other
  misc_feature (361)..(361): Xaa is any aa, unknown or other
  misc_feature (363)..(363): Xaa is any aa, unknown or other
  misc_feature (370)..(370): Xaa is any aa, unknown or other
  misc_feature (378)..(378): Xaa is any aa, unknown or other
  misc_feature (382)..(382): Xaa is any aa, unknown or other
  misc_feature (392)..(392): Xaa is any aa, unknown or other
  misc_feature (432)..(432): Xaa is any aa, unknown or other
  misc_feature (434)..(434): Xaa is any aa, unknown or other
  misc_feature (436)..(436): Xaa is any aa, unknown or other
  misc_feature (437)..(437): Xaa is any aa, unknown or other
  misc_feature (449)..(449): Xaa is any aa, unknown or other
  misc_feature (458)..(458): Xaa is any aa, unknown or other
  misc_feature (468)..(468): Xaa is any aa, unknown or other
  misc_feature (477)..(477): Xaa is any aa, unknown or other
  misc_feature (483)..(483): Xaa is any aa, unknown or other
  misc_feature (484)..(484): Xaa is any aa, unknown or other
  misc_feature (494)..(494): Xaa is any aa, unknown or other
  misc_feature (562)..(562): Xaa is any aa, unknown or other
  misc_feature (573)..(573): Xaa is any aa, unknown or other
  misc_feature (574)..(574): Xaa is any aa, unknown or other
  misc_feature (575)..(575): Xaa is any aa, unknown or other
  misc_feature (589)..(589): Xaa is any aa, unknown or other

SEQ ID NO: 14808 - DNA, 549 bp, Zea mays subsp. mays
  misc_feature (1)..(549): Ceres Seq. ID no. 13504101
  misc_feature (1)..(549): Ortholog of  Ceres SEQ ID NO 12329459 as cited in SEQ ID NO 20533
  misc_feature (1)..(549): Ortholog of  Ceres SEQ ID NO 14302474 as cited in SEQ ID NO 60589
accagagtcaccgcggtcggagttcaaatcccacaatcttcttgtagcacaccactgtcttcgtccaactcggcggcgatgtctgggcgcggcaagggcggcaaggggctgggcaagggcggcgcgaaacgccaccgtaaggttctccgcgacaacatccagggtatcacgaagccggcaatccggaggctggcgaggaggggcggcgtgaagcgtatctccgggcttatctacgaggaaacccgcggcgtgctcaagatcttcctcgagaatgtcatccgcgacgcggtcacctacaccgagcacgctcgccgcaagaccgtcaccgccatggatgttgtgtacgccctcaagcgccagggccgcactctgtacgggttcggtggttgagcgcatctcttccctcgtctgcagcggctgccggtggcgtttcctcagttccctctgccttgcttggcttgatgtagagagttatcagattaaaatatctctgatgtgcttcgttattgggtggaatcatgtgtcccagcagtgctgggaaatcaagat

SEQ ID NO: 14809 - protein, 129 aa, Zea mays subsp. mays
  peptide (1)..(129): Ceres Seq. ID no. 13504102
TRVTAVGVQIPQSSCSTPLSSSNSAAMSGRGKGGKGLGKGGAKRHRKVLRDNIQGITKPAIRRLARRGGVKRISGLIYEETRGVLKIFLENVIRDAVTYTEHARRKTVTAMDVVYALKRQGRTLYGFGG

SEQ ID NO: 14810 - protein, 103 aa, Zea mays subsp. mays; identical to SEQ ID NO: 7737
  peptide (1)..(103): Ceres Seq. ID no. 13504103

SEQ ID NO: 14811 - protein, 92 aa, Zea mays subsp. mays
  peptide (1)..(92): Ceres Seq. ID no. 13504104
MSSATRSPTPSTLAARPSPPWMLCTPSSARAALCTGSVVERISSLVCSGCRWRFLSSLCLAWLDVESYQIKISLMCFVIGWNHVSQQCWEIK

SEQ ID NO: 14812 - DNA, 924 bp, Zea mays subsp. mays
  misc_feature (1)..(924): Ceres Seq. ID no. 13502490
  misc_feature (1)..(924): Ortholog of  Ceres SEQ ID NO 13594544 as cited in SEQ ID NO 51236
tcccagctccgcctccctttcctaccttcttccctccgtctcccagctcgcgcaggcaggcgacacagcgacgctaaaaaccctagagcgaggaggcgtgccaggccagcggtttgcgatgacggcaccggcggacaaggggaagaaggccaagaccgatgccgacggcggcgaggagaacgagcaaatcgacggcgcccttgtcttctccatcgagaagctccaggagattcaggacgagctcgagaaggttaatgaggaagcaagtgacaaggttatggaggtggagcagaaatacagtgagattcgcagacctgtctatctcaagaggggtgacattatcaagaccatcccggacttttggctcacagcgtttttgagccatcctctactaagtgagcttctgactgaagaggatcagaagatattcaagtacttggactccattgatgtcgatgattctgatgttaaggcaggatattccatttaccttaacttctctgagaacccgtactttgaagacacaaagcttacaaagacctattcctttgttgatgatggaacaaccacaataaaagcttctcaaattaagtggaaggatggaatgggacctgcaaatggaaatggtattaacaagaagggaaacaagcggccattagtagtggaaagttttttctcctggtttagtgatacagagctcaagagtcttgctgatggtgtgcaagatgaggtggcggagatcatcaaggaagacttgtggcctaatcctttgaagtacttcaacaatgaggttgaagatgaatttgaaggagatgaagaagatgatgacgacgacgacgacgatgataatttggatggtgatgacaatgacgatgatggggaccaggagaactgagccctcgcgtttaggcggggaattatgtg

SEQ ID NO: 14813 - protein, 297 aa, Zea mays subsp. mays
  peptide (1)..(297): Ceres Seq. ID no. 13502491
PSSASLSYLLPSVSQLAQAGDTATLKTLERGGVPGQRFAMTAPADKGKKAKTDADGGEENEQIDGALVFSIEKLQEIQDELEKVNEEASDKVMEVEQKYSEIRRPVYLKRGDIIKTIPDFWLTAFLSHPLLSELLTEEDQKIFKYLDSIDVDDSDVKAGYSIYLNFSENPYFEDTKLTKTYSFVDDGTTTIKASQIKWKDGMGPANGNGINKKGNKRPLVVESFFSWFSDTELKSLADGVQDEVAEIIKEDLWPNPLKYFNNEVEDEFEGDEEDDDDDDDDDNLDGDDNDDDGDQEN

SEQ ID NO: 14814 - protein, 258 aa, Zea mays subsp. mays
  peptide (1)..(258): Ceres Seq. ID no. 13502492
MTAPADKGKKAKTDADGGEENEQIDGALVFSIEKLQEIQDELEKVNEEASDKVMEVEQKYSEIRRPVYLKRGDIIKTIPDFWLTAFLSHPLLSELLTEEDQKIFKYLDSIDVDDSDVKAGYSIYLNFSENPYFEDTKLTKTYSFVDDGTTTIKASQIKWKDGMGPANGNGINKKGNKRPLVVESFFSWFSDTELKSLADGVQDEVAEIIKEDLWPNPLKYFNNEVEDEFEGDEEDDDDDDDDDNLDGDDNDDDGDQEN

SEQ ID NO: 14815 - protein, 205 aa, Zea mays subsp. mays
  peptide (1)..(205): Ceres Seq. ID no. 13502493
MEVEQKYSEIRRPVYLKRGDIIKTIPDFWLTAFLSHPLLSELLTEEDQKIFKYLDSIDVDDSDVKAGYSIYLNFSENPYFEDTKLTKTYSFVDDGTTTIKASQIKWKDGMGPANGNGINKKGNKRPLVVESFFSWFSDTELKSLADGVQDEVAEIIKEDLWPNPLKYFNNEVEDEFEGDEEDDDDDDDDDNLDGDDNDDDGDQEN

SEQ ID NO: 14816 - DNA, 414 bp, Zea mays subsp. mays
  misc_feature (1)..(414): Ceres Seq. ID no. 4489390
  misc_feature (1)..(414): Ortholog of  Ceres SEQ ID NO 13624441 as cited in SEQ ID NO 0
actcacctctcgccaaacttcctcttccgagaatgccagattatccactgcggcctcttcctcgtgctcctcctccagtcctcccttcccaccatgattaccacccacctctccccagccctcaagcaccgctccccgtccccgctccactccacctaccactcccaccaccacctccccgtgcacctcccgctccccctcccccgccgccactgccacctcgctaagcccgccgccgccgcctcgccagaccttctcgcgagcatcgagyccgtggcctccgcggcctccgtgctggccgccatcgtgctggtccacgagtcgggccacttcctcgccgcggcgtcccggggcatccacgtctcccagttctccatcggcttcggcccggcgctggcccgcttccgcctcggc

SEQ ID NO: 14817 - protein, 138 aa, Zea mays subsp. mays
  peptide (1)..(138): Ceres Seq. ID no. 4489391
  misc_feature (91)..(91): Xaa is any aa, unknown or other
THLSPNFLFRECQIIHCGLFLVLLLQSSLPTMITTHLSPALKHRSPSPLHSTYHSHHHLPVHLPLPLPRRHCHLAKPAAAASPDLLASIEXVASAASVLAAIVLVHESGHFLAAASRGIHVSQFSIGFGPALARFRLG

SEQ ID NO: 14818 - protein, 107 aa, Zea mays subsp. mays
  peptide (1)..(107): Ceres Seq. ID no. 4489392
  misc_feature (60)..(60): Xaa is any aa, unknown or other
MITTHLSPALKHRSPSPLHSTYHSHHHLPVHLPLPLPRRHCHLAKPAAAASPDLLASIEXVASAASVLAAIVLVHESGHFLAAASRGIHVSQFSIGFGPALARFRLG

SEQ ID NO: 14819 - protein, 74 aa, Zea mays subsp. mays
  peptide (1)..(74): Ceres Seq. ID no. 4489393
SPLAKLPLPRMPDYPLRPLPRAPPPVLPSHHDYHPPLPSPQAPLPVPAPLHLPLPPPPPRAPPAPPPPPPLPPR

SEQ ID NO: 14820 - DNA, 1864 bp, Zea mays subsp. mays
  misc_feature (1)..(1864): Ceres Seq. ID no. 13502421
  misc_feature (1)..(1864): Ortholog of  Ceres SEQ ID NO 14314363 as cited in SEQ ID NO 52272
tggccatggtgcaaggcgaggagagttcttggaggatggagagggcagcgctgcctctcaaccaggcgctcgcgtacggagtccaagcccacgccgccgccgccgctgcaccgccgacctgcttcctggacttccagcctgcggccgcatccgctgcctacttcgggttcggtgagctggaggaggccctcatccacggtggtggcgccgccagcgccggcggcggcgtcgatccgggcgtgatcatcaagaacgacgtcgcgcaggcaaagtcagcggcaggatatctcgcgggcgctggcaccggcaggccccccacgctggagatcttcccttcgtggccaatgaggcaccaacagcagctgcacagtgggaattcgcagtcagtagggagcaccggcactgactcgagctcagctcagaacacaatgtctcagatggagttggtgtccccagcctcctctgcgccgcggcaggaggtcatgatggtgaccactgatgattacagctacaagccaggcctcgccgctgcgcccgctgctgccgccccgccgagctttcagcagcaccacccgctcccgctgcagctgcacggaggagagggagggggagaccatgacaagaggaagcatggatccacaagaaaagatggcaagttggtagatgccaagacggaacggcggctggcgcagaacagagaggctgcgaggaagagcaggctgaggaagaaggcttacgtgcagcagctcgagactagcaggatcaggcttcagcaggtcgagcatgagctccagagagcacggtcacagggcctgttcgttggagggtgcagcgccgccggggacatgagctctggcgccgccatgttcgacatggagtacgcgcggtggcttgacgacgacaccaagcggctggcggagctccgaggcgggctgcaggcgcacctgctggacggcaacctgggactcatcgtggaggagtgcatgcagcactacgacgagctgttccagctcaaggcggcgctcgcgcgctccgacgtcttccacctcctcaccggctcctgggccacccccgccgagcgctgcttcttctggatgggcggcttccgcccgtccgagctgctcaagatcctgataccgcagctggacccgctgacggagcagcagctgctggggatctgcaatctgcagcagtcgtcggagcaagcggaggaagctctcgcccagggcctgcaccagctgcaccagtccctggccgacacagtcgccgcgggcacgctcaacgacggcgccgccgcccccaactacatgaacatcatggccgtcgcacttgagaagctcgccagcctcgaaaatttctatcaacaggccgacaatctaaggcaccagacgttgcatcagatgcgccggatcctgaccactcggcaggctgcgcggtgcttcctctccattggggagtactacagccgcctcagagctctcagcaacctctgggcttcccgtccccgcgacaacttcatcgggacagagagcctcagccccacagcaacggaactgcaagccctgcaccaccagcagcagaaccagttcgccggattttgaggcctcacctggtgagggagggtgtaaaactttggccgcgagggtggtgttacaaagattagaggttttgagagggagatgcattgtaatgttctatcattaaagtactgagaaagcaacatcactaggcgaaaagggcggggagaaggaattgctgtagtgcgatgttgggtggctcacctgttcatatggctcttgaactgattgaagggttagcaccgcagaatttttgtgcgtgtcaggagagaacaaatcagttacac

SEQ ID NO: 14821 - protein, 532 aa, Zea mays subsp. mays
  peptide (1)..(532): Ceres Seq. ID no. 13502422
AMVQGEESSWRMERAALPLNQALAYGVQAHAAAAAAPPTCFLDFQPAAASAAYFGFGELEEALIHGGGAASAGGGVDPGVIIKNDVAQAKSAAGYLAGAGTGRPPTLEIFPSWPMRHQQQLHSGNSQSVGSTGTDSSSAQNTMSQMELVSPASSAPRQEVMMVTTDDYSYKPGLAAAPAAAAPPSFQQHHPLPLQLHGGEGGGDHDKRKHGSTRKDGKLVDAKTERRLAQNREAARKSRLRKKAYVQQLETSRIRLQQVEHELQRARSQGLFVGGCSAAGDMSSGAAMFDMEYARWLDDDTKRLAELRGGLQAHLLDGNLGLIVEECMQHYDELFQLKAALARSDVFHLLTGSWATPAERCFFWMGGFRPSELLKILIPQLDPLTEQQLLGICNLQQSSEQAEEALAQGLHQLHQSLADTVAAGTLNDGAAAPNYMNIMAVALEKLASLENFYQQADNLRHQTLHQMRRILTTRQAARCFLSIGEYYSRLRALSNLWASRPRDNFIGTESLSPTATELQALHHQQQNQFAGF

SEQ ID NO: 14822 - protein, 531 aa, Zea mays subsp. mays
  peptide (1)..(531): Ceres Seq. ID no. 13502423
MVQGEESSWRMERAALPLNQALAYGVQAHAAAAAAPPTCFLDFQPAAASAAYFGFGELEEALIHGGGAASAGGGVDPGVIIKNDVAQAKSAAGYLAGAGTGRPPTLEIFPSWPMRHQQQLHSGNSQSVGSTGTDSSSAQNTMSQMELVSPASSAPRQEVMMVTTDDYSYKPGLAAAPAAAAPPSFQQHHPLPLQLHGGEGGGDHDKRKHGSTRKDGKLVDAKTERRLAQNREAARKSRLRKKAYVQQLETSRIRLQQVEHELQRARSQGLFVGGCSAAGDMSSGAAMFDMEYARWLDDDTKRLAELRGGLQAHLLDGNLGLIVEECMQHYDELFQLKAALARSDVFHLLTGSWATPAERCFFWMGGFRPSELLKILIPQLDPLTEQQLLGICNLQQSSEQAEEALAQGLHQLHQSLADTVAAGTLNDGAAAPNYMNIMAVALEKLASLENFYQQADNLRHQTLHQMRRILTTRQAARCFLSIGEYYSRLRALSNLWASRPRDNFIGTESLSPTATELQALHHQQQNQFAGF

SEQ ID NO: 14823 - protein, 521 aa, Zea mays subsp. mays
  peptide (1)..(521): Ceres Seq. ID no. 13502424
MERAALPLNQALAYGVQAHAAAAAAPPTCFLDFQPAAASAAYFGFGELEEALIHGGGAASAGGGVDPGVIIKNDVAQAKSAAGYLAGAGTGRPPTLEIFPSWPMRHQQQLHSGNSQSVGSTGTDSSSAQNTMSQMELVSPASSAPRQEVMMVTTDDYSYKPGLAAAPAAAAPPSFQQHHPLPLQLHGGEGGGDHDKRKHGSTRKDGKLVDAKTERRLAQNREAARKSRLRKKAYVQQLETSRIRLQQVEHELQRARSQGLFVGGCSAAGDMSSGAAMFDMEYARWLDDDTKRLAELRGGLQAHLLDGNLGLIVEECMQHYDELFQLKAALARSDVFHLLTGSWATPAERCFFWMGGFRPSELLKILIPQLDPLTEQQLLGICNLQQSSEQAEEALAQGLHQLHQSLADTVAAGTLNDGAAAPNYMNIMAVALEKLASLENFYQQADNLRHQTLHQMRRILTTRQAARCFLSIGEYYSRLRALSNLWASRPRDNFIGTESLSPTATELQALHHQQQNQFAGF

SEQ ID NO: 14824 - DNA, 377 bp, Zea mays subsp. mays
  misc_feature (1)..(377): Ceres Seq. ID no. 13635381
  misc_feature (1)..(377): Ortholog of  Ceres SEQ ID NO 13582184 as cited in SEQ ID NO 56002
aagaaccctagcgcccgtcctgccgccgctgcagccgccatcgcacggccatgggtatcgatctcgtagccggcggccgcaacaagaagaccaagcgcacggcgcccaagtccgacgatgtctacctcaagctcctcgtcaagctctaccgcttccttgtgcgcaggacaaagagcaacttcaacgccgtgatcctcaagcgcctcttcatgagcaagaccaaccgcccgccgctctcgatgcgccgcctcgtcaggttcatggaggggaagggtgatcagatcgccgtgattgtgggcaccgtgaccgacgacaagaggatcagcgaggtgccggcgatgaaggtctgcgcgctcaggttcactgagacagcgagg

SEQ ID NO: 14825 - protein, 109 aa, Zea mays subsp. mays
  peptide (1)..(109): Ceres Seq. ID no. 13635382
MGIDLVAGGRNKKTKRTAPKSDDVYLKLLVKLYRFLVRRTKSNFNAVILKRLFMSKTNRPPLSMRRLVRFMEGKGDQIAVIVGTVTDDKRISEVPAMKVCALRFTETAR

SEQ ID NO: 14826 - protein, 91 aa, Zea mays subsp. mays
  peptide (1)..(91): Ceres Seq. ID no. 13635383
RTLAPVLPPLQPPSHGHGYRSRSRRPQQEDQAHGAQVRRCLPQAPRQALPLPCAQDKEQLQRRDPQAPLHEQDQPPAALDAPPRQVHGGEG

SEQ ID NO: 14827 - protein, 56 aa, Zea mays subsp. mays
  peptide (1)..(56): Ceres Seq. ID no. 13635384
MSKTNRPPLSMRRLVRFMEGKGDQIAVIVGTVTDDKRISEVPAMKVCALRFTETAR

SEQ ID NO: 14828 - DNA, 800 bp, Zea mays subsp. mays
  misc_feature (1)..(800): Ceres Seq. ID no. 13600565
  misc_feature (1)..(800): Ortholog of  Ceres SEQ ID NO 13639514 as cited in SEQ ID NO 55736
  misc_feature (1)..(800): Ortholog of  Ceres SEQ ID NO 14312254 as cited in SEQ ID NO 59148
  misc_feature (1)..(800): Ortholog of  Ceres SEQ ID NO 13662804 as cited in SEQ ID NO 65394
  misc_feature (1)..(800): Ortholog of  Ceres SEQ ID NO 13656519 as cited in SEQ ID NO 69226
cccaacattagcacaaagaacacaatagaccactgatttcacaatgaaaagggagacaatgccttcatggctagaactgttgcttgcaacacaattctttacgacttgtgctaaccatcttcttgctagtcgcaatgaatgtaacctattttgcacccagtgtgagaccaaaccagctgctttctgtaactattgtcgttcaagtgatcattccacccaccgtgtaatccagataaggcgttcatcgtaccatgacgttgtgagggtgtccgagattgaggatatctttgatgtcagcgatgtgcaaacttatgtaatcaatagtgcaaggattgtattcctgaatgagcggccacaactgcgtgcttctagtgtccccatttgtaaggcacccacatcatcaacacatagctgtgagacatgtagccgtgtgctacttgatgcatttcgcttctgctctcttggatgcaatcttagaggcttaaatatggaagctggtatgcaagctatggttggcaacaaccctcggtccaatggtatggatcatgtggctaggattgacaatgttggttcaagtactacaaatgaccaaaacagctgcaatgacaagaactacgaagaaccaccaccaaaaagggttgctcgtcacagacgcaagggaattccccaacgtgcgccattcttctaatctgaacatcatgacaatgtccagtaaatgttgtgggaaataagaagagataatatttgtcatgggtgaaatgaatgaatgaaataaataaaagaatgaatgaatggcccct

SEQ ID NO: 14829 - protein, 214 aa, Zea mays subsp. mays
  peptide (1)..(214): Ceres Seq. ID no. 13600566
MKRETMPSWLELLLATQFFTTCANHLLASRNECNLFCTQCETKPAAFCNYCRSSDHSTHRVIQIRRSSYHDVVRVSEIEDIFDVSDVQTYVINSARIVFLNERPQLRASSVPICKAPTSSTHSCETCSRVLLDAFRFCSLGCNLRGLNMEAGMQAMVGNNPRSNGMDHVARIDNVGSSTTNDQNSCNDKNYEEPPPKRVARHRRKGIPQRAPFF

SEQ ID NO: 14830 - protein, 209 aa, Zea mays subsp. mays
  peptide (1)..(209): Ceres Seq. ID no. 13600567
MPSWLELLLATQFFTTCANHLLASRNECNLFCTQCETKPAAFCNYCRSSDHSTHRVIQIRRSSYHDVVRVSEIEDIFDVSDVQTYVINSARIVFLNERPQLRASSVPICKAPTSSTHSCETCSRVLLDAFRFCSLGCNLRGLNMEAGMQAMVGNNPRSNGMDHVARIDNVGSSTTNDQNSCNDKNYEEPPPKRVARHRRKGIPQRAPFF

SEQ ID NO: 14831 - DNA, 2211 bp, Zea mays subsp. mays
  misc_feature (1)..(2211): Ceres Seq. ID no. 13635385
  misc_feature (1)..(2211): Ortholog of  Ceres SEQ ID NO 13654290 as cited in SEQ ID NO 62197
  misc_feature (1)..(2211): Ortholog of  Ceres SEQ ID NO 14301924 as cited in SEQ ID NO 67731
actgccgcgccgctcccgcctccctcttctccatccgacgagctcgagaagccaccatgatctccgcgcgcaccgccgcagcttcccccgcctccctgtggaagcggggaggacaaagtgagggcggcggcagttgcgacggatgtcggacctacaggaacactttgcggagggccgcagcagcgaaggtgcgtgccttgccgtcgagggcggtggaggcggtcaaaatgggctccgccgcggaggtggagcaggaggaggcggaggtagccgcggccgcggacggcgtcgtcgtcgaggaccactacggcgaggacagcgccaccgaggagctgcccatcatgccctgggccttctccgtcgcaagcggttacaccctcttgagggatccacatcacaacaagggtcttgctttcacggagaaggagagggatgcacaccacttgcgtgggctgcttcctcctgcagttgttcctcaagaactccaaattaagaagatcatgcacaacctgcggcagtaccaggtccctttgcagcgctatatggccatgatggaccttcaggagaggaacgagaggcttttctacaagcttttaattgataacgtggaggagctgcttcctgtggtttatacaccaactgtaggtgaggcctgccagaagtatgggtccatctttcgacaaccacagggtctgtatgtcagcttgagggacaaagggaaggtcctagaagttctaaggaactggccacataggaacattcaagttatctgtgttactgatggtgagcgaatcttgggacttggagatttgggttctcagggaatgggaattcctgtaggcaaacttgctctatacactgctcttggaggagttcgtccatcagcttgtttgcctatcacaatcgatgttggcacaaataatgagaaactgcttaatgatgagttttacattggactccggcaaaaacgtgcaactggcgaggagtatcatgagcttatggaagagttcatggctgctgttaagcaaatctacggcgagaaagtcctcattcagtttgaggacttcgcgaatcataatgcttttaatttgcttgcaaaatatagcaagagccatcttgttttcaatgatgacatccagggcacagcatcagtggtccttgcaggtttgttagcagcactcaaggtggttggtgggaccttggcagagcacacttatttattccttggtgctggggagggtggaactggtattgcagaactcattgctcttgagatttcaaaacagacgtcggctccaattgaagagtgccgcaagaagatttggttggtggactcaaagggtttgattgttgactctcgtaaaaactccgttcagtcattcaaaaaaccttgggcacatgagcatgagggcttgacaactttgtacgatgctgttcagtgcatcaaacctacagttctgattgggacgtctggagttggaagaacattcacaaaagaagttgttgaggccatggcttccttcaatgagaggcctatcatcttttcactgtcaaatccaacctctcattctgaatgtactgctgaagaagcatataactggactcagggtcgtgtaatatttgccagtggcagtccatttgaccctgtggagtacgatgggaaggtttttgtacctggacagtcgaacaacgcctacattttccctggatttggcctcggtcttgttatctctggagccatccgtgtccacgaggacatgcttcttgccgcctcggaagcactagctgctcaggccacacaggagaacttcgacaagggatcaatcttcccgcccttcaccaacattagaaagatctctgcgcgcattgcccgagccgtggctgcaaaagcttatgaactcggtttggcgacccgtctgcctcccccaagggacctggtgaaatatgcacagagctgcatgtacactcctgtctaccgtaactaccggtagtgctgctgggatcaattctgcagtaataaaatatgtcgacgcagatgatcctgcaatgttgtagtttattttttcatttgttggccctgctgctgaccacctttgtggctgctagacactgtacctgtctatgcatatatgatactggaacatttggcgcgctgtgggcgtccctgtcatgagatcaattgcagaaataaaatgcaatttagatttgagc

SEQ ID NO: 14832 - protein, 662 aa, Zea mays subsp. mays
  peptide (1)..(662): Ceres Seq. ID no. 13635386
CRAAPASLFSIRRAREATMISARTAAASPASLWKRGGQSEGGGSCDGCRTYRNTLRRAAAAKVRALPSRAVEAVKMGSAAEVEQEEAEVAAAADGVVVEDHYGEDSATEELPIMPWAFSVASGYTLLRDPHHNKGLAFTEKERDAHHLRGLLPPAVVPQELQIKKIMHNLRQYQVPLQRYMAMMDLQERNERLFYKLLIDNVEELLPVVYTPTVGEACQKYGSIFRQPQGLYVSLRDKGKVLEVLRNWPHRNIQVICVTDGERILGLGDLGSQGMGIPVGKLALYTALGGVRPSACLPITIDVGTNNEKLLNDEFYIGLRQKRATGEEYHELMEEFMAAVKQIYGEKVLIQFEDFANHNAFNLLAKYSKSHLVFNDDIQGTASVVLAGLLAALKVVGGTLAEHTYLFLGAGEGGTGIAELIALEISKQTSAPIEECRKKIWLVDSKGLIVDSRKNSVQSFKKPWAHEHEGLTTLYDAVQCIKPTVLIGTSGVGRTFTKEVVEAMASFNERPIIFSLSNPTSHSECTAEEAYNWTQGRVIFASGSPFDPVEYDGKVFVPGQSNNAYIFPGFGLGLVISGAIRVHEDMLLAASEALAAQATQENFDKGSIFPPFTNIRKISARIARAVAAKAYELGLATRLPPPRDLVKYAQSCMYTPVYRNYR

SEQ ID NO: 14833 - protein, 644 aa, Zea mays subsp. mays
  peptide (1)..(644): Ceres Seq. ID no. 13635387
MISARTAAASPASLWKRGGQSEGGGSCDGCRTYRNTLRRAAAAKVRALPSRAVEAVKMGSAAEVEQEEAEVAAAADGVVVEDHYGEDSATEELPIMPWAFSVASGYTLLRDPHHNKGLAFTEKERDAHHLRGLLPPAVVPQELQIKKIMHNLRQYQVPLQRYMAMMDLQERNERLFYKLLIDNVEELLPVVYTPTVGEACQKYGSIFRQPQGLYVSLRDKGKVLEVLRNWPHRNIQVICVTDGERILGLGDLGSQGMGIPVGKLALYTALGGVRPSACLPITIDVGTNNEKLLNDEFYIGLRQKRATGEEYHELMEEFMAAVKQIYGEKVLIQFEDFANHNAFNLLAKYSKSHLVFNDDIQGTASVVLAGLLAALKVVGGTLAEHTYLFLGAGEGGTGIAELIALEISKQTSAPIEECRKKIWLVDSKGLIVDSRKNSVQSFKKPWAHEHEGLTTLYDAVQCIKPTVLIGTSGVGRTFTKEVVEAMASFNERPIIFSLSNPTSHSECTAEEAYNWTQGRVIFASGSPFDPVEYDGKVFVPGQSNNAYIFPGFGLGLVISGAIRVHEDMLLAASEALAAQATQENFDKGSIFPPFTNIRKISARIARAVAAKAYELGLATRLPPPRDLVKYAQSCMYTPVYRNYR

SEQ ID NO: 14834 - protein, 587 aa, Zea mays subsp. mays
  peptide (1)..(587): Ceres Seq. ID no. 13635388
MGSAAEVEQEEAEVAAAADGVVVEDHYGEDSATEELPIMPWAFSVASGYTLLRDPHHNKGLAFTEKERDAHHLRGLLPPAVVPQELQIKKIMHNLRQYQVPLQRYMAMMDLQERNERLFYKLLIDNVEELLPVVYTPTVGEACQKYGSIFRQPQGLYVSLRDKGKVLEVLRNWPHRNIQVICVTDGERILGLGDLGSQGMGIPVGKLALYTALGGVRPSACLPITIDVGTNNEKLLNDEFYIGLRQKRATGEEYHELMEEFMAAVKQIYGEKVLIQFEDFANHNAFNLLAKYSKSHLVFNDDIQGTASVVLAGLLAALKVVGGTLAEHTYLFLGAGEGGTGIAELIALEISKQTSAPIEECRKKIWLVDSKGLIVDSRKNSVQSFKKPWAHEHEGLTTLYDAVQCIKPTVLIGTSGVGRTFTKEVVEAMASFNERPIIFSLSNPTSHSECTAEEAYNWTQGRVIFASGSPFDPVEYDGKVFVPGQSNNAYIFPGFGLGLVISGAIRVHEDMLLAASEALAAQATQENFDKGSIFPPFTNIRKISARIARAVAAKAYELGLATRLPPPRDLVKYAQSCMYTPVYRNYR

SEQ ID NO: 14835 - DNA, 480 bp, Zea mays subsp. mays
  misc_feature (1)..(480): Ceres Seq. ID no. 4583495
  misc_feature (1)..(480): Ortholog of  Ceres SEQ ID NO 12613701 as cited in SEQ ID NO 67983
accaagctggtggttgaggttagaagaggagctagagcgagagagtcccatcgcaacacacaaaaggaagaggaagaggaagaggaaggcgagaacgatgggcttgctcctgctgctcctcgtcgcggcggcggcgacagctcctgcggccgacgcatggggcaaggaggggcactacatggtgtgcaagatcgctgagagctttctgacgaaagaggcctcgacggcggtgaaggagctgctgccggggtgggccggcggcgagctcgcggagacgtgctcttgggcggacacgcagaggttccggtaccgctggtccagcccgctgcacttcgccgacacgccaggggactgcgagttcgactacgcccgggactgccacaacaccaaaggggagaagaacatgtgcgtggtcggagccatcaacaactacacggcggcgctgaaagactcatcaagtccttttgatccgacggagag

SEQ ID NO: 14836 - protein, 159 aa, Zea mays subsp. mays
  peptide (1)..(159): Ceres Seq. ID no. 4583496
PSWWLRLEEELERESPIATHKRKRKRKRKARTMGLLLLLLVAAAATAPAADAWGKEGHYMVCKIAESFLTKEASTAVKELLPGWAGGELAETCSWADTQRFRYRWSSPLHFADTPGDCEFDYARDCHNTKGEKNMCVVGAINNYTAALKDSSSPFDPTE

SEQ ID NO: 14837 - protein, 127 aa, Zea mays subsp. mays
  peptide (1)..(127): Ceres Seq. ID no. 4583497
MGLLLLLLVAAAATAPAADAWGKEGHYMVCKIAESFLTKEASTAVKELLPGWAGGELAETCSWADTQRFRYRWSSPLHFADTPGDCEFDYARDCHNTKGEKNMCVVGAINNYTAALKDSSSPFDPTE

SEQ ID NO: 14838 - protein, 100 aa, Zea mays subsp. mays
  peptide (1)..(100): Ceres Seq. ID no. 4583498
MVCKIAESFLTKEASTAVKELLPGWAGGELAETCSWADTQRFRYRWSSPLHFADTPGDCEFDYARDCHNTKGEKNMCVVGAINNYTAALKDSSSPFDPTE

SEQ ID NO: 14839 - DNA, 756 bp, Zea mays subsp. mays
  misc_feature (1)..(756): Ceres Seq. ID no. 12469433
  misc_feature (1)..(756): Ortholog of  Ceres SEQ ID NO 13594766 as cited in SEQ ID NO 51913
  misc_feature (1)..(756): Ortholog of  Ceres SEQ ID NO 12609226 as cited in SEQ ID NO 59300
  misc_feature (1)..(756): Ortholog of  Ceres SEQ ID NO 13654942 as cited in SEQ ID NO 62533
  misc_feature (1)..(756): Ortholog of  Ceres SEQ ID NO 13599195 as cited in SEQ ID NO 0
acggcatcgttgtccacgccgagtcgccgactgatcacttctcttccagcgagtacacacatcacacagcgaagggcagcgcatcgtgctgcggcggccggaggtgatcgacaagcacctctctaggaataataaataatggcgcagttggtggacaaggcgaaggggttcgtcgccgacaagctggccaacatccagaagccggaggcggagctggccgacgtcacggtggggcacgtgggccgcgatggcgccacgctggcggggcgcgtggacgtgcgcaacccgtactcgcacgccatcccggtgtgtgaggtgacctacacgctgcggagcgccgggcggacggtggcgtcagggacggtgcccgacccggggtcgctcgccggcgacggggctaccacgcgcctcgacgtgcccgtcaaggtgccctacgacttcctggttagcctcgccaaggacgccggcagggactgggacatcgactatganatgcgtgtcgggctcaccgttgacctccccgtcgtcggcaaactcacgctgccgctcaccaagtccggcgagctcaagctccccaccctctccagcatnttctgatcgatcgatctgcgtgctgctcgctcgatccgtaactgcggccttgcgtgttcatgactgatctgcctactcgataatatgtaaaccgctctcttgagtgttgttgttgtgctgcttgagtagtacgagacctaataataataaactacagtgatgtgt

SEQ ID NO: 14840 - protein, 152 aa, Zea mays subsp. mays
  peptide (1)..(152): Ceres Seq. ID no. 12469434
  misc_feature (118)..(118): Xaa is any aa, unknown or other
  misc_feature (151)..(151): Xaa is any aa, unknown or other
MAQLVDKAKGFVADKLANIQKPEAELADVTVGHVGRDGATLAGRVDVRNPYSHAIPVCEVTYTLRSAGRTVASGTVPDPGSLAGDGATTRLDVPVKVPYDFLVSLAKDAGRDWDIDYXMRVGLTVDLPVVGKLTLPLTKSGELKLPTLSSXF

SEQ ID NO: 14841 - DNA, 497 bp, Zea mays subsp. mays
  misc_feature (1)..(497): Ceres Seq. ID no. 4488984
  misc_feature (1)..(497): Ortholog of  Ceres SEQ ID NO 13585342 as cited in SEQ ID NO 63601
gtttggctatagagcctacatgccgcagatcaggcaacagggggagcacgagtgcctgcaccgggacatgatggtcgggttcggcaagtggagctggagcccgctgcagctggagaacccgttcgccgacgccgacgatggccagggggcggggaaggtgcacctgtggcacggcgccgaggacctcatcgtgccggtcagcctttccaggtacatcagccagaagctgccgtgggtcgtctaccacgagctccccaagtcgggacatctcttcccgatcgccgaggggatggctgacatcattgtcaagtccctgctgctcggagaccatcatccgtcgtcgtcggcctcacagcctcctcattctccatgaatccaggtcgtcacgtagtccgttcgcatctcgtggcccgtctctcactgtttctgtaaagggaccgaatgaccgatggtgcagctttctctagcgcgtagctaggatgctctgtctttttttt

SEQ ID NO: 14842 - protein, 123 aa, Zea mays subsp. mays
  peptide (1)..(123): Ceres Seq. ID no. 4488985
FGYRAYMPQIRQQGEHECLHRDMMVGFGKWSWSPLQLENPFADADDGQGAGKVHLWHGAEDLIVPVSLSRYISQKLPWVVYHELPKSGHLFPIAEGMADIIVKSLLLGDHHPSSSASQPPHSP

SEQ ID NO: 14843 - protein, 117 aa, Zea mays subsp. mays
  peptide (1)..(117): Ceres Seq. ID no. 4488986
MPQIRQQGEHECLHRDMMVGFGKWSWSPLQLENPFADADDGQGAGKVHLWHGAEDLIVPVSLSRYISQKLPWVVYHELPKSGHLFPIAEGMADIIVKSLLLGDHHPSSSASQPPHSP

SEQ ID NO: 14844 - protein, 109 aa, Zea mays subsp. mays
  peptide (1)..(109): Ceres Seq. ID no. 4488987
MARGRGRCTCGTAPRTSSCRSAFPGTSARSCRGSSTTSSPSRDISSRSPRGWLTSLSSPCCSETIIRRRRPHSLLILHESRSSRSPFASRGPSLTVSVKGPNDRWCSFL

SEQ ID NO: 14845 - DNA, 1113 bp, Zea mays subsp. mays; identical to SEQ ID NO: 14415
  misc_feature (1)..(1113): Ceres Seq. ID no. 13635288
  misc_feature (1)..(1113): Ortholog of  Ceres SEQ ID NO 14304209 as cited in SEQ ID NO 56460
  misc_feature (1)..(1113): Ortholog of  Ceres SEQ ID NO 12586351 as cited in SEQ ID NO 64028
  misc_feature (1)..(1113): Ortholog of  Ceres SEQ ID NO 13654441 as cited in SEQ ID NO 67814
  misc_feature (1)..(1113): Ortholog of  Ceres SEQ ID NO 15177482 as cited in SEQ ID NO 0

SEQ ID NO: 14846 - protein, 253 aa, Zea mays subsp. mays; identical to SEQ ID NO: 14416
  peptide (1)..(253): Ceres Seq. ID no. 13635289

SEQ ID NO: 14847 - protein, 222 aa, Zea mays subsp. mays; identical to SEQ ID NO: 14417
  peptide (1)..(222): Ceres Seq. ID no. 13635290

SEQ ID NO: 14848 - protein, 141 aa, Zea mays subsp. mays; identical to SEQ ID NO: 14418
  peptide (1)..(141): Ceres Seq. ID no. 13635291

SEQ ID NO: 14849 - DNA, 892 bp, Zea mays subsp. mays
  misc_feature (1)..(892): Ceres Seq. ID no. 13504093
  misc_feature (1)..(892): Ortholog of  Ceres SEQ ID NO 12557850 as cited in SEQ ID NO 65
  misc_feature (1)..(892): Ortholog of  Ceres SEQ ID NO 14312702 as cited in SEQ ID NO 0
ccaccaaattaaaccgccggcgcctccacttcgcgttctcgcctcatctcctcccgctcagccgctgcaggatccggcggcgaaggtaaggcaagatgtacaccgcgaggaagaagatccagaaggataagggccttgagccctccgagttcgaggactccgtcgcccaggctttcttcgacctggagaacggtaaccaggagctcaagagcgacctcaaggacctttacatcaacggtgctatccagctggatgttgccgggagcaggaaggctgttgtgatccacgtcccataccgcttgcgtaaggccttcaggaagatccatgtcaggatcgtcagggagctggagaagaaattcagcggcaaggatgtggtaattgttgccacaaggaggancgtgaggccgcccaagaagggttcagctgttcagcgccctcgctccaggactntgactgctgtccacgatggcatcttggaggatgttgtcttcccagctgagattgtggggaagcgagtcaggtaccgtntggatggngccaagatcatcaaggtaacctacatgtnttattgaggaactgaaagatgccacatgatcttnttggacccaaaggagaggaacaaccccgaatacaagctggacacctacactacggtntaccgcaggctgtgtgggaaagatgtggtctttgagtaccctatgaccgaaaatgcataaatatgacgccccggatatccccatttcatttcgttgaatntgggtgtttctttggggtctcaactagactgctccgtatgtacttcaaaaaccatagttttgatgccaaagttgcctaggaatttggtactcgggaattggcagcggacgtgaacaatgttaagttttgagcattt

SEQ ID NO: 14850 - protein, 158 aa, Zea mays subsp. mays
  peptide (1)..(158): Ceres Seq. ID no. 13504094
  misc_feature (101)..(101): Xaa is any aa, unknown or other
  misc_feature (119)..(119): Xaa is any aa, unknown or other
  misc_feature (145)..(145): Xaa is any aa, unknown or other
  misc_feature (147)..(147): Xaa is any aa, unknown or other
  misc_feature (157)..(157): Xaa is any aa, unknown or other
MYTARKKIQKDKGLEPSEFEDSVAQAFFDLENGNQELKSDLKDLYINGAIQLDVAGSRKAVVIHVPYRLRKAFRKIHVRIVRELEKKFSGKDVVIVATRRXVRPPKKGSAVQRPRSRTXTAVHDGILEDVVFPAEIVGKRVRYRXDXAKIIKVTYMXY

SEQ ID NO: 14851 - DNA, 878 bp, Zea mays subsp. mays
  misc_feature (1)..(878): Ceres Seq. ID no. 12469416
  misc_feature (1)..(878): Ortholog of  Ceres SEQ ID NO 14311609 as cited in SEQ ID NO 58341
cattagcatccctgaaagcgctctttcctaatttccatacaaaagaaacactatcaagccaagaggagcttgctcctttcctgaagttctcatctcgcatggctgcaatcgatttcattgtctgtgaggaaagtgatgcttttgtggctaacaacattgggaacatggccaaaattctggctgggcaaaggagatattttggacacaagagaacaatccggccaaatgctaaacagctctatcccttattcatgaagaggggaaatatgtcatgggatgcatttgcctcacaggtgcgaacaatccagaaaggatatatgggagagcccatggaaatcacaccaggaagaggcgaatttcatgcaaaccctgccgcctgtatatgtgaaaagaccagcagaaactcagcaatagtcaaatccatttctggaaataacctggaacctgtaactgacagtggaataaggaaaaccattggcattagtagaccaccatatcctgtttatactgatgaagaggcagatggatntgatacagaagaagatccggacagcagtgggagaggagaggtgattgacactgaacctgacgatgattntgcggtcagacaggaggatcctgagctagaggagatcctgtcagattagttcagttgtgcggctgtttcctccggttaagctatgcaaatctgactgcatatacatgtgttgtatgtggcagcaattttatggtttgggcatcnccgaactagcttagatctgcanccgctggtgtacatagattttgtggtgtgcagctgtccaccctctttttnttagctgaatgagggcatgatcatgtttgtcacctgngcaagccagattngcnnnccttttttt

SEQ ID NO: 14852 - protein, 214 aa, Zea mays subsp. mays
  peptide (1)..(214): Ceres Seq. ID no. 12469417
  misc_feature (176)..(176): Xaa is any aa, unknown or other
  misc_feature (199)..(199): Xaa is any aa, unknown or other
LASLKALFPNFHTKETLSSQEELAPFLKFSSRMAAIDFIVCEESDAFVANNIGNMAKILAGQRRYFGHKRTIRPNAKQLYPLFMKRGNMSWDAFASQVRTIQKGYMGEPMEITPGRGEFHANPAACICEKTSRNSAIVKSISGNNLEPVTDSGIRKTIGISRPPYPVYTDEEADGXDTEEDPDSSGRGEVIDTEPDDDXAVRQEDPELEEILSD

SEQ ID NO: 14853 - protein, 182 aa, Zea mays subsp. mays
  peptide (1)..(182): Ceres Seq. ID no. 12469418
  misc_feature (144)..(144): Xaa is any aa, unknown or other
  misc_feature (167)..(167): Xaa is any aa, unknown or other
MAAIDFIVCEESDAFVANNIGNMAKILAGQRRYFGHKRTIRPNAKQLYPLFMKRGNMSWDAFASQVRTIQKGYMGEPMEITPGRGEFHANPAACICEKTSRNSAIVKSISGNNLEPVTDSGIRKTIGISRPPYPVYTDEEADGXDTEEDPDSSGRGEVIDTEPDDDXAVRQEDPELEEILSD

SEQ ID NO: 14854 - protein, 160 aa, Zea mays subsp. mays
  peptide (1)..(160): Ceres Seq. ID no. 12469419
  misc_feature (122)..(122): Xaa is any aa, unknown or other
  misc_feature (145)..(145): Xaa is any aa, unknown or other
MAKILAGQRRYFGHKRTIRPNAKQLYPLFMKRGNMSWDAFASQVRTIQKGYMGEPMEITPGRGEFHANPAACICEKTSRNSAIVKSISGNNLEPVTDSGIRKTIGISRPPYPVYTDEEADGXDTEEDPDSSGRGEVIDTEPDDDXAVRQEDPELEEILSD

SEQ ID NO: 14855 - DNA, 922 bp, Zea mays subsp. mays
  misc_feature (1)..(922): Ceres Seq. ID no. 13589090
  misc_feature (1)..(922): Ortholog of  Ceres SEQ ID NO 13638567 as cited in SEQ ID NO 51303
acggagggcaaggaaactcgctcccactctactcctatccactgcggcctggacgcgtgcgagagacttgaccaagcagcagcagcagggatggcgcctctgaagctgtacgggatgccgctgtcccccaacgtggtgcgcgtggccaccgtgctcaacgagaagggcctcgacttcgagatcgtccccgtcgacctcaccaccggcgcccacaagcagcccgacttcctcgccctcaaccctttcggccagatcccggctctcgtcgacggagacgaagtcctcttcgagtcccgtgcgatcaaccggtacatcgccagcaagtacgcgtcggagggcacggacctgctccccgcgacggcgtcggcggcgaagctggaggtgtggctagaggtggagtcgcaccacttctacccgaaccgggtcgccgctggtgttccagctgctcgtgaggccgctcctgggcggcgccccgacgcggcggtggtggacaagcacgcggagcagctcgccaaggtgctcgacgtgtacgagcgcacctcgcccgcaacaagtacctcgccggggacgagttcacgctcgccgacgccaaccacgcgctcctacctgctctacctcagcaagaccccaaggccggctcgtcgccgcccgccccacgtcaaggcctggtgggaggccatcgtcgcccgccccgcgttccagaagaccgtcgccgccatccccttgcccccgccgccctcctcctcggcttgacctcgccttgcgttgcgccgttgcctgggtcgcggatgctcggagccccgagtcgaataaaagaggcagcatcctgtcttgcatttgctcgtgcgccatgtgttaacagcctgtgtaataaacactgttgcctttcgtgtgtgttcattgccttttggttggtctttgc

SEQ ID NO: 14856 - protein, 250 aa, Zea mays subsp. mays
  peptide (1)..(250): Ceres Seq. ID no. 13589091
TEGKETRSHSTPIHCGLDACERLDQAAAAGMAPLKLYGMPLSPNVVRVATVLNEKGLDFEIVPVDLTTGAHKQPDFLALNPFGQIPALVDGDEVLFESRAINRYIASKYASEGTDLLPATASAAKLEVWLEVESHHFYPNRVAAGVPAAREAAPGRRPDAAVVDKHAEQLAKVLDVYERTSPATSTSPGTSSRSPTPTTRSYLLYLSKTPRPARRRPPHVKAWWEAIVARPAFQKTVAAIPLPPPPSSSA

SEQ ID NO: 14857 - protein, 220 aa, Zea mays subsp. mays
  peptide (1)..(220): Ceres Seq. ID no. 13589092
MAPLKLYGMPLSPNVVRVATVLNEKGLDFEIVPVDLTTGAHKQPDFLALNPFGQIPALVDGDEVLFESRAINRYIASKYASEGTDLLPATASAAKLEVWLEVESHHFYPNRVAAGVPAAREAAPGRRPDAAVVDKHAEQLAKVLDVYERTSPATSTSPGTSSRSPTPTTRSYLLYLSKTPRPARRRPPHVKAWWEAIVARPAFQKTVAAIPLPPPPSSSA

SEQ ID NO: 14858 - protein, 212 aa, Zea mays subsp. mays
  peptide (1)..(212): Ceres Seq. ID no. 13589093
MPLSPNVVRVATVLNEKGLDFEIVPVDLTTGAHKQPDFLALNPFGQIPALVDGDEVLFESRAINRYIASKYASEGTDLLPATASAAKLEVWLEVESHHFYPNRVAAGVPAAREAAPGRRPDAAVVDKHAEQLAKVLDVYERTSPATSTSPGTSSRSPTPTTRSYLLYLSKTPRPARRRPPHVKAWWEAIVARPAFQKTVAAIPLPPPPSSSA

SEQ ID NO: 14859 - DNA, 468 bp, Zea mays subsp. mays
  misc_feature (1)..(468): Ceres Seq. ID no. 4581778
  misc_feature (1)..(468): Ortholog of  Ceres SEQ ID NO 14307940 as cited in SEQ ID NO 0
  misc_feature (1)..(468): Ortholog of  Ceres SEQ ID NO 14308560 as cited in SEQ ID NO 0
gtttgttgagacaaccgttggctttgacaccatatgcaaggtgaacgcacaacttatcagcaatgtatgcactgatgctctatctgctgagaagtattactactttattcgcctgatgggacgcaaggcttctcatgtggcattggaatgtgctcttcaatcacatccaaacatggttatcctaggagaggaggtggctgcttccaaacttacaatttttgatattacgaagcagatttgtgatgcagttcaggcaagggctgaaaaagacaagaaccatggggttattcttattcctgagggccttgtggagagtattcctgaactatatgctctgcttcaggaaatccatggcctccatggcaaaggtgtttctgttgagaatatctcttctcagctttcaccttgggcatctgcactctttgagtttttgcccccttttatcaggaagcagctactactacatcc

SEQ ID NO: 14860 - protein, 155 aa, Zea mays subsp. mays
  peptide (1)..(155): Ceres Seq. ID no. 4581779
FVETTVGFDTICKVNAQLISNVCTDALSAEKYYYFIRLMGRKASHVALECALQSHPNMVILGEEVAASKLTIFDITKQICDAVQARAEKDKNHGVILIPEGLVESIPELYALLQEIHGLHGKGVSVENISSQLSPWASALFEFLPPFIRKQLLLH

SEQ ID NO: 14861 - protein, 117 aa, Zea mays subsp. mays
  peptide (1)..(117): Ceres Seq. ID no. 4581780
MGRKASHVALECALQSHPNMVILGEEVAASKLTIFDITKQICDAVQARAEKDKNHGVILIPEGLVESIPELYALLQEIHGLHGKGVSVENISSQLSPWASALFEFLPPFIRKQLLLH

SEQ ID NO: 14862 - protein, 98 aa, Zea mays subsp. mays
  peptide (1)..(98): Ceres Seq. ID no. 4581781
MVILGEEVAASKLTIFDITKQICDAVQARAEKDKNHGVILIPEGLVESIPELYALLQEIHGLHGKGVSVENISSQLSPWASALFEFLPPFIRKQLLLH

SEQ ID NO: 14863 - DNA, 626 bp, Zea mays subsp. mays
  misc_feature (1)..(626): Ceres Seq. ID no. 12469393
  misc_feature (1)..(626): Ortholog of  Ceres SEQ ID NO 13598527 as cited in SEQ ID NO 64914
attatgtagagacatttcaagaaagataatgcgaggtatagccttggctttgggaggggcaattgatgcttttgaaggggatacagctggagatcctttctgggtgttaaggttgattggttatcccgtagatattccagaagagcagcgcactgatactggctgtggagctcatacagattatggacttctaacactggttaaccaggatgatgacatatgtgcccttgaggtgcaaaatcgttctggtgagtggatatatgcaacgccgattcccggaacctttgtttgtaacatcggtgacatgctgaaggtttggacaaatggaatatatcagcccacccttcacagagttgtcaacaattcccagcattaccgtgtatctgttgcattcttctacgagtccaacttcgatgctgcagtagagcctgttgagttctgccgggagaaaaccggcggcgctgctaagtacgaaaaggttgtgtacggggagcatttggttcagaaagtattgacgaacttcgtcatgtaaatttgctaagtacgacaaataaatntgcattgcagcatcagaactccagacctatttggtgtgtagtgctgtaccagaaaggtagtaacggact

SEQ ID NO: 14864 - protein, 176 aa, Zea mays subsp. mays
  peptide (1)..(176): Ceres Seq. ID no. 12469394
LCRDISRKIMRGIALALGGAIDAFEGDTAGDPFWVLRLIGYPVDIPEEQRTDTGCGAHTDYGLLTLVNQDDDICALEVQNRSGEWIYATPIPGTFVCNIGDMLKVWTNGIYQPTLHRVVNNSQHYRVSVAFFYESNFDAAVEPVEFCREKTGGAAKYEKVVYGEHLVQKVLTNFVM

SEQ ID NO: 14865 - protein, 167 aa, Zea mays subsp. mays
  peptide (1)..(167): Ceres Seq. ID no. 12469395
MRGIALALGGAIDAFEGDTAGDPFWVLRLIGYPVDIPEEQRTDTGCGAHTDYGLLTLVNQDDDICALEVQNRSGEWIYATPIPGTFVCNIGDMLKVWTNGIYQPTLHRVVNNSQHYRVSVAFFYESNFDAAVEPVEFCREKTGGAAKYEKVVYGEHLVQKVLTNFVM

SEQ ID NO: 14866 - DNA, 519 bp, Zea mays subsp. mays
  misc_feature (1)..(519): Ceres Seq. ID no. 4488403
  misc_feature (1)..(519): Ortholog of  Ceres SEQ ID NO 13622393 as cited in SEQ ID NO 1256
agatcaggatccattaacacccctacgtacgcctttcctctggaaacccttctctcgcctgcctctcccccgccgcgccgccacttcccctctcccgtcaactccggcttccgcgcgaggtcgagctagcgtttggagttctcgagacctgctgtgatggcgacagagcaagcggcggagaactacacggtggaggacctcgtggccctgaacccctacaaccccgacatcctcmacgacctcgagaagttcgtcaatgagcaggtctcatctcagacatataacttggatgcaaatctcagccttcttcgcttgtaccagtttgagccagaaaggatgagcatacagattgtggcccacatactgattaagcaaatggaggagcaattcaaggtattgatagttctttctcactacctagagactgctaggttcagtcaattttgggatgaagcagcaaagaaccgccacatatcggaagcagtgccaggtttcgaacaagcaatccaatcctatgcg

SEQ ID NO: 14867 - protein, 121 aa, Zea mays subsp. mays
  peptide (1)..(121): Ceres Seq. ID no. 4488404
  misc_feature (27)..(27): Xaa is any aa, unknown or other
MATEQAAENYTVEDLVALNPYNPDILXDLEKFVNEQVSSQTYNLDANLSLLRLYQFEPERMSIQIVAHILIKQMEEQFKVLIVLSHYLETARFSQFWDEAAKNRHISEAVPGFEQAIQSYA

SEQ ID NO: 14868 - protein, 61 aa, Zea mays subsp. mays
  peptide (1)..(61): Ceres Seq. ID no. 4488405
MSIQIVAHILIKQMEEQFKVLIVLSHYLETARFSQFWDEAAKNRHISEAVPGFEQAIQSYA

SEQ ID NO: 14869 - DNA, 487 bp, Zea mays subsp. mays
  misc_feature (1)..(487): Ceres Seq. ID no. 13586835
  misc_feature (1)..(487): Ortholog of  Ceres SEQ ID NO 14302343 as cited in SEQ ID NO 67343
ataattttgggcattaattgcacgtctcctccccacctctccttccctccacccgtgccgtcgcctcgcctatccgatctgccacctcctcccgtctcgcacgttccttcccaactccgcagcgtagcctctccgcggcgcgatccagatccaggtttttcagcatgggcctggtgaaggaaggcatcgacatggaggagggaacccttgagatcggcatggagtacaggactgtatctggtgttgctgggcctctggtcatattggataaagtaaagggcccaaagtaccaagaaattgtaaacatccgacttggagatggcaccaatcgccgtggtcaagtcctggaagttgatggcgaaaaagctgttgtgcaggtctttgaaggaacttctggaatagacaacaaatacacaaccgtgcagtttacaggcgaggttttgaaaactcctgtctcacttgatatgcttgggcgcatttttaatgg

SEQ ID NO: 14870 - protein, 107 aa, Zea mays subsp. mays
  peptide (1)..(107): Ceres Seq. ID no. 13586836
MGLVKEGIDMEEGTLEIGMEYRTVSGVAGPLVILDKVKGPKYQEIVNIRLGDGTNRRGQVLEVDGEKAVVQVFEGTSGIDNKYTTVQFTGEVLKTPVSLDMLGRIFN

SEQ ID NO: 14871 - protein, 98 aa, Zea mays subsp. mays
  peptide (1)..(98): Ceres Seq. ID no. 13586837
MEEGTLEIGMEYRTVSGVAGPLVILDKVKGPKYQEIVNIRLGDGTNRRGQVLEVDGEKAVVQVFEGTSGIDNKYTTVQFTGEVLKTPVSLDMLGRIFN

SEQ ID NO: 14872 - protein, 89 aa, Zea mays subsp. mays
  peptide (1)..(89): Ceres Seq. ID no. 13586838
MEYRTVSGVAGPLVILDKVKGPKYQEIVNIRLGDGTNRRGQVLEVDGEKAVVQVFEGTSGIDNKYTTVQFTGEVLKTPVSLDMLGRIFN

SEQ ID NO: 14873 - DNA, 828 bp, Zea mays subsp. mays
  misc_feature (1)..(828): Ceres Seq. ID no. 12595473
  misc_feature (1)..(828): Ortholog of  Ceres SEQ ID NO 14309616 as cited in SEQ ID NO 52695
aaatccatgtactatgtttccacgtcatgcaacgcaacattccaaaaccatggatcatctataaatggctagctcccacatatgaactagtctctatcatcatccaatccagatcagcaaagcggcagtgcgtagagaggatcgtcgaacagaacagcatgaagatggtcatcgttctcgtcgtgtgcctggctctgtcagctgccagcgcctctgcaatgcagatgccctgcccctgcgcggggctgcagggcttgtacggcgctggcgccggcctgacgacgatgatgggcgccggcgggctgtacccctacgcggagtacctgaggcagccgcagtgcagcccgctggcggcggcgccctactacgccgggtgtgggcagccgagcgccatgttccagccgctccggcaacagtgctgccagcagcagatgaggatgatggacgtgcagtccgtcgcgcagcagctgcagatgatgatgcagcttgagcgtgccgctgccgccagcagcagcctgtacgagccagctctgatgcagcagcagcagcagctgctggcagcccagggtctcaaccccatggccatgatgatggcgcagaacatgccggccatgggtggactctaccagtaccagctgcccagctaccgcaccaacccctgtggcgtctccgctgccattccgccctactactgattcatgatatttgggaaatctcctctatccatctctctctatctatatatgtaataatgcagtaagacgacacacattatcatgtgtggtatgaccaataatatatgcatggtcataataaagttttggtttt

SEQ ID NO: 14874 - protein, 230 aa, Zea mays subsp. mays
  peptide (1)..(230): Ceres Seq. ID no. 12595474
IHVLCFHVMQRNIPKPWIIYKWLAPTYELVSIIIQSRSAKRQCVERIVEQNSMKMVIVLVVCLALSAASASAMQMPCPCAGLQGLYGAGAGLTTMMGAGGLYPYAEYLRQPQCSPLAAAPYYAGCGQPSAMFQPLRQQCCQQQMRMMDVQSVAQQLQMMMQLERAAAASSSLYEPALMQQQQQLLAAQGLNPMAMMMAQNMPAMGGLYQYQLPSYRTNPCGVSAAIPPYY

SEQ ID NO: 14875 - protein, 222 aa, Zea mays subsp. mays
  peptide (1)..(222): Ceres Seq. ID no. 12595475
MQRNIPKPWIIYKWLAPTYELVSIIIQSRSAKRQCVERIVEQNSMKMVIVLVVCLALSAASASAMQMPCPCAGLQGLYGAGAGLTTMMGAGGLYPYAEYLRQPQCSPLAAAPYYAGCGQPSAMFQPLRQQCCQQQMRMMDVQSVAQQLQMMMQLERAAAASSSLYEPALMQQQQQLLAAQGLNPMAMMMAQNMPAMGGLYQYQLPSYRTNPCGVSAAIPPYY

SEQ ID NO: 14876 - protein, 178 aa, Zea mays subsp. mays
  peptide (1)..(178): Ceres Seq. ID no. 12595476
MKMVIVLVVCLALSAASASAMQMPCPCAGLQGLYGAGAGLTTMMGAGGLYPYAEYLRQPQCSPLAAAPYYAGCGQPSAMFQPLRQQCCQQQMRMMDVQSVAQQLQMMMQLERAAAASSSLYEPALMQQQQQLLAAQGLNPMAMMMAQNMPAMGGLYQYQLPSYRTNPCGVSAAIPPYY

SEQ ID NO: 14877 - DNA, 1694 bp, Zea mays subsp. mays
  misc_feature (1)..(1694): Ceres Seq. ID no. 12344383
  misc_feature (1)..(1694): Ortholog of  Ceres SEQ ID NO 14314896 as cited in SEQ ID NO 54010
ttataaaacctagctcctcaagctccagacgcagtcgaccgccgcagaccgggagtagtcgacgcgccgtcactgaatcctcagatcacggctagccgtaatcacgccactctgctgactcccggcgagcagtgtaacattttccttcagccatgggcaaggagaagactcacatcaacattgtggtcattggacatgtcgactctggcaagtcgaccaccactggccacctgatctacaagctcggcggtattgacnagcgtgtgattgagaggttcgagaaagaggccgcggagatgaacaagcggtcattcaagtatgcctgggtgcttgacaagctcaagggcgagcgtgagagaggtatcacaattgatattgctttgtggaagttcgagaccaccaagtactactgcactgtcattgatgcccctggacaccgtgacttcatcaagaatatgattactggcacttcccaagctgactgcgctgttctnatcattgactccactactggtggttntgaggctggtatctccaaggatggacagacccgcgagcatgctctccttgctttcacgctnggagtgaagcagatgatttgctgttgcaacaagatggatgccaccacacccaagtactccaaggcccgttatgatgagattgtgaaggaagtctcttcctacctgaagaaggtnggatacaaccctgacaagatccactttgttcccatctctggtttcgaaggtgacaacatgattgagaggtccaccaaccttgactggtacaagggcccaaccctacttgaggctttggacttgatcaatgagccgaagaggccttcagacaagcccctgcgtctccccctacaggatgtgtacaagattggtggtatnggaactgttcctgttgggcgtgttgagactggtatcatcaagcctggtatggttgttacctttggtcctagtggccttactactgaggtgaagtctgttgaaatgcaccatgaggctctccaggaggcccttcctggtgacaatgttggcttcaatgttaagaatgttgctgtgaaggatctgaagcgtgggtatgtggcctccaactccaaggatgaccctgccaaggaggctgctagcttcacgtcccaggtcatcatcatgaaccaccctgggcagattggcaacggctatgccccagtgctggactgccacacctcgcacattgctgtcaagtttgcggagctcattaccaagattgataggcggtctggcaaagagcttgagaaggagcccaaattcctcaagaatggtgatgctggtatggtgaagatggttcccactaagcccatggtagtggagaccttttctgaatatcctcctcttggtcgctttgctgtccgtgacatgaggcaaacggtggctgtcggagtcatcaagagtgtggagaagaaggatccaactggagccaaggtgaccaaggctgccgcaaagaagaaatgatgtgtctggctggttctgtgtttgcttgagggaaacctagtggaaacataaaatatctcgtcttgttcacgtcattgtctgaactatgctcgcaacgtttgcctggtcgatttagaatggttattttcgttaaaaccagagtgttatttaagacttatccgaacatctggtgagccatatatggttactagttttgtt

SEQ ID NO: 14878 - protein, 447 aa, Zea mays subsp. mays
  peptide (1)..(447): Ceres Seq. ID no. 12344384
  misc_feature (36)..(36): Xaa is any aa, unknown or other
  misc_feature (114)..(114): Xaa is any aa, unknown or other
  misc_feature (123)..(123): Xaa is any aa, unknown or other
  misc_feature (143)..(143): Xaa is any aa, unknown or other
  misc_feature (181)..(181): Xaa is any aa, unknown or other
  misc_feature (247)..(247): Xaa is any aa, unknown or other
MGKEKTHINIVVIGHVDSGKSTTTGHLIYKLGGIDXRVIERFEKEAAEMNKRSFKYAWVLDKLKGERERGITIDIALWKFETTKYYCTVIDAPGHRDFIKNMITGTSQADCAVXIIDSTTGGXEAGISKDGQTREHALLAFTXGVKQMICCCNKMDATTPKYSKARYDEIVKEVSSYLKKXGYNPDKIHFVPISGFEGDNMIERSTNLDWYKGPTLLEALDLINEPKRPSDKPLRLPLQDVYKIGGXGTVPVGRVETGIIKPGMVVTFGPSGLTTEVKSVEMHHEALQEALPGDNVGFNVKNVAVKDLKRGYVASNSKDDPAKEAASFTSQVIIMNHPGQIGNGYAPVLDCHTSHIAVKFAELITKIDRRSGKELEKEPKFLKNGDAGMVKMVPTKPMVVETFSEYPPLGRFAVRDMRQTVAVGVIKSVEKKDPTGAKVTKAAAKKK

SEQ ID NO: 14879 - protein, 399 aa, Zea mays subsp. mays
  peptide (1)..(399): Ceres Seq. ID no. 12344385
  misc_feature (66)..(66): Xaa is any aa, unknown or other
  misc_feature (75)..(75): Xaa is any aa, unknown or other
  misc_feature (95)..(95): Xaa is any aa, unknown or other
  misc_feature (133)..(133): Xaa is any aa, unknown or other
  misc_feature (199)..(199): Xaa is any aa, unknown or other
MNKRSFKYAWVLDKLKGERERGITIDIALWKFETTKYYCTVIDAPGHRDFIKNMITGTSQADCAVXIIDSTTGGXEAGISKDGQTREHALLAFTXGVKQMICCCNKMDATTPKYSKARYDEIVKEVSSYLKKXGYNPDKIHFVPISGFEGDNMIERSTNLDWYKGPTLLEALDLINEPKRPSDKPLRLPLQDVYKIGGXGTVPVGRVETGIIKPGMVVTFGPSGLTTEVKSVEMHHEALQEALPGDNVGFNVKNVAVKDLKRGYVASNSKDDPAKEAASFTSQVIIMNHPGQIGNGYAPVLDCHTSHIAVKFAELITKIDRRSGKELEKEPKFLKNGDAGMVKMVPTKPMVVETFSEYPPLGRFAVRDMRQTVAVGVIKSVEKKDPTGAKVTKAAAKKK

SEQ ID NO: 14880 - protein, 346 aa, Zea mays subsp. mays
  peptide (1)..(346): Ceres Seq. ID no. 12344386
  misc_feature (13)..(13): Xaa is any aa, unknown or other
  misc_feature (22)..(22): Xaa is any aa, unknown or other
  misc_feature (42)..(42): Xaa is any aa, unknown or other
  misc_feature (80)..(80): Xaa is any aa, unknown or other
  misc_feature (146)..(146): Xaa is any aa, unknown or other
MITGTSQADCAVXIIDSTTGGXEAGISKDGQTREHALLAFTXGVKQMICCCNKMDATTPKYSKARYDEIVKEVSSYLKKXGYNPDKIHFVPISGFEGDNMIERSTNLDWYKGPTLLEALDLINEPKRPSDKPLRLPLQDVYKIGGXGTVPVGRVETGIIKPGMVVTFGPSGLTTEVKSVEMHHEALQEALPGDNVGFNVKNVAVKDLKRGYVASNSKDDPAKEAASFTSQVIIMNHPGQIGNGYAPVLDCHTSHIAVKFAELITKIDRRSGKELEKEPKFLKNGDAGMVKMVPTKPMVVETFSEYPPLGRFAVRDMRQTVAVGVIKSVEKKDPTGAKVTKAAAKKK

SEQ ID NO: 14881 - DNA, 874 bp, Zea mays subsp. mays
  misc_feature (1)..(874): Ceres Seq. ID no. 12469372
  misc_feature (1)..(874): Ortholog of  Ceres SEQ ID NO 15173847 as cited in SEQ ID NO 61751
gggatctgacggcaattccccaattcgattccatcccatgggttggcgttggcacgacgacgacggtgacagcggccggggcctcggcggtgtccctgacctcgctggtggcgggggcgatggggcgcagtgcgccacgcgacgggtggtgcagtcccgctgccacacggaggaagtcgagcccggccgatttgtccgcaagtgcgagaagacggagcagctcctccgcgactgcgtcggcaggccctctgaactggtggaatccaaaactgaaaacactgaagaagatgtcacagaagaaatgaagagcggttcactttctcttgggtttccaagaaacgagcccttcgcattccctggactccgcagtgacatggaagcccttgagaaagacttctttgggagcctagggaacgtcctggatgaagctgagcggatggccaacagcttcgtcagatcttttggttttccacctgctcatgacagcggatcaagtccatttcgaagacagcctgcagacaggcatattgaggaagataccgcaaagaataagactgagagcgactactcagaattcaggagcaagatttcagatgtgtaagcagctgtanagctgcagttatntggcctgtgtccatgagctgaaacctgagaagtgagagctttgcaatntcncggtccttatatgtttctctttggaacaaaataggnacttgcggcctgcaggtgctgtttagcctcgcttagtatggtaatngtaatggtagatgaagtgatttgcctgtcanaggtgaggagtattatntgttatgttcggttttgcagggccattttgtacagtactttttgcagacccagcatttgaaatgtttgc

SEQ ID NO: 14882 - protein, 199 aa, Zea mays subsp. mays
  peptide (1)..(199): Ceres Seq. ID no. 12469373
GSDGNSPIRFHPMGWRWHDDDGDSGRGLGGVPDLAGGGGDGAQCATRRVVQSRCHTEEVEPGRFVRKCEKTEQLLRDCVGRPSELVESKTENTEEDVTEEMKSGSLSLGFPRNEPFAFPGLRSDMEALEKDFFGSLGNVLDEAERMANSFVRSFGFPPAHDSGSSPFRRQPADRHIEEDTAKNKTESDYSEFRSKISDV

SEQ ID NO: 14883 - protein, 187 aa, Zea mays subsp. mays
  peptide (1)..(187): Ceres Seq. ID no. 12469374
MGWRWHDDDGDSGRGLGGVPDLAGGGGDGAQCATRRVVQSRCHTEEVEPGRFVRKCEKTEQLLRDCVGRPSELVESKTENTEEDVTEEMKSGSLSLGFPRNEPFAFPGLRSDMEALEKDFFGSLGNVLDEAERMANSFVRSFGFPPAHDSGSSPFRRQPADRHIEEDTAKNKTESDYSEFRSKISDV

SEQ ID NO: 14884 - protein, 100 aa, Zea mays subsp. mays
  peptide (1)..(100): Ceres Seq. ID no. 12469375
DLTAIPQFDSIPWVGVGTTTTVTAAGASAVSLTSLVAGAMGRSAPRDGWCSPAATRRKSSPADLSASARRRSSSSATASAGPLNWWNPKLKTLKKMSQKK

SEQ ID NO: 14885 - DNA, 905 bp, Zea mays subsp. mays
  misc_feature (1)..(905): Ceres Seq. ID no. 12469368
  misc_feature (1)..(905): Ortholog of  Ceres SEQ ID NO 14311131 as cited in SEQ ID NO 53729
  misc_feature (1)..(905): Ortholog of  Ceres SEQ ID NO 13594037 as cited in SEQ ID NO 55666
  misc_feature (1)..(905): Ortholog of  Ceres SEQ ID NO 13657707 as cited in SEQ ID NO 66407
tgttggactcggacctgttgctgcgtgcagccgcgtccgggtttgggttcatgatgcgcgacatgacggtggagaactgggcggggccggcggggcaccaggcggtggcgctgcgcgtgagcgccgaccgcgccgtcgtccaccgctgcagcatcgccgggtaccaggacacgctgtacgcgcattctaaccgccagttctaccgcgactgcgacatctacggcaccgtggacttcgtcttcggcaatgccgccgccgtgctccagcgctgcaacctctgggcgcgcgtgccgctgccgggccagaagaacaccgtcaccgcgcagagccggaacgattcgtgccagcgcaccggcatcgtcctccacgcctgccgcctcgtggcggccgcgccggcagaaggcctctcgcccgcggcggccccggcgcccgtcccggaccgttcgccgctgctcctctccccgacgacgtacctgggccggccatggaagtccttctccagggtggtggtgatgatgtcgtacatcggcccgcacgtgccgccgcagggatggatggagtggaacgccaccagcacctacgcactcgacaggctttacttcggcgagtacatgaactacgggcccggcgctgggttggccgggcgtgttgcgtggcctggccnccgcgtcatcaacagcaccgcggaagcggagagcttcacggtggcgcggttcatcgacggcgcgtcctggctgccggccgccggggtctccttcgttgccgggctctcgctgctgtaatcgtcttgatggaaatcccagggcacaccagggaccaggcaggctgagtgacaagtagacgtgataatgtacttttagtggcggcagttcgaatcaattcaaatcattttgctgtgagatttc

SEQ ID NO: 14886 - protein, 259 aa, Zea mays subsp. mays
  peptide (1)..(259): Ceres Seq. ID no. 12469369
  misc_feature (221)..(221): Xaa is any aa, unknown or other
LDSDLLLRAAASGFGFMMRDMTVENWAGPAGHQAVALRVSADRAVVHRCSIAGYQDTLYAHSNRQFYRDCDIYGTVDFVFGNAAAVLQRCNLWARVPLPGQKNTVTAQSRNDSCQRTGIVLHACRLVAAAPAEGLSPAAAPAPVPDRSPLLLSPTTYLGRPWKSFSRVVVMMSYIGPHVPPQGWMEWNATSTYALDRLYFGEYMNYGPGAGLAGRVAWPGXRVINSTAEAESFTVARFIDGASWLPAAGVSFVAGLSLL

SEQ ID NO: 14887 - protein, 243 aa, Zea mays subsp. mays
  peptide (1)..(243): Ceres Seq. ID no. 12469370
  misc_feature (205)..(205): Xaa is any aa, unknown or other
MMRDMTVENWAGPAGHQAVALRVSADRAVVHRCSIAGYQDTLYAHSNRQFYRDCDIYGTVDFVFGNAAAVLQRCNLWARVPLPGQKNTVTAQSRNDSCQRTGIVLHACRLVAAAPAEGLSPAAAPAPVPDRSPLLLSPTTYLGRPWKSFSRVVVMMSYIGPHVPPQGWMEWNATSTYALDRLYFGEYMNYGPGAGLAGRVAWPGXRVINSTAEAESFTVARFIDGASWLPAAGVSFVAGLSLL

SEQ ID NO: 14888 - protein, 242 aa, Zea mays subsp. mays
  peptide (1)..(242): Ceres Seq. ID no. 12469371
  misc_feature (204)..(204): Xaa is any aa, unknown or other
MRDMTVENWAGPAGHQAVALRVSADRAVVHRCSIAGYQDTLYAHSNRQFYRDCDIYGTVDFVFGNAAAVLQRCNLWARVPLPGQKNTVTAQSRNDSCQRTGIVLHACRLVAAAPAEGLSPAAAPAPVPDRSPLLLSPTTYLGRPWKSFSRVVVMMSYIGPHVPPQGWMEWNATSTYALDRLYFGEYMNYGPGAGLAGRVAWPGXRVINSTAEAESFTVARFIDGASWLPAAGVSFVAGLSLL

SEQ ID NO: 14889 - DNA, 771 bp, Zea mays subsp. mays
  misc_feature (1)..(771): Ceres Seq. ID no. 14306082
  misc_feature (1)..(771): Ortholog of  Ceres SEQ ID NO 12585210 as cited in SEQ ID NO 63226
accggatcaccagcctacagctcgtcacatctctctctccgcccggccggcctctagactcactctagccatatggccacggtgcacggcagcaggctcatcttcctcttcgaggccacgctcttctcggcgctgctgctcgtcccggcacgccctgcttccgccacagacggcagcgcgtacccggccggcgactgcccctacccgtgcctgccgccgcccgccgtcaccgccaactgcccgccgcctccgccggctgcggcgtcgtactcgtacccgccaccgccgggggcttacattccctacttccagcctgcggcgggtggcggtggtggcggcggtagtggggggtacggcggctacccggcgccgccgccgcccaaccccatcctgccgtggtacccatggtactacaagacgccgccgtcgtcctcggccgccacgtcgggcagggggagtcgcgttcttcttgggtcggccgccatggtagctgctgctgccctgctgatcatggcttagccgcagcccgcagcagtcgttctttttgcatcttcgatcttgtcctctcccccaggttttctttctttttttcttttgttgatttactgctcaggatttatattcagaggtatatatataacgaggcagcattatatatattgcttgtactcctaatttatcagctacatgtctctagttccatgattaaaatgattaccactcaactttgagtagtggagcaactatgggcgtgtttgccaccttggtccg

SEQ ID NO: 14890 - protein, 162 aa, Zea mays subsp. mays
  peptide (1)..(162): Ceres Seq. ID no. 14306083
PDHQPTARHISLSARPASRLTLAIWPRCTAAGSSSSSRPRSSRRCCSSRHALLPPQTAARTRPATAPTRACRRPPSPPTARRLRRLRRRTRTRHRRGLTFPTSSLRRVAVVAAVVGGTAATRRRRRPTPSCRGTHGTTRRRRRPRPPRRAGGVAFFLGRPPW

SEQ ID NO: 14891 - protein, 148 aa, Zea mays subsp. mays
  peptide (1)..(148): Ceres Seq. ID no. 14306084
MATVHGSRLIFLFEATLFSALLLVPARPASATDGSAYPAGDCPYPCLPPPAVTANCPPPPPAAASYSYPPPPGAYIPYFQPAAGGGGGGGSGGYGGYPAPPPPNPILPWYPWYYKTPPSSSAATSGRGSRVLLGSAAMVAAAALLIMA

SEQ ID NO: 14892 - protein, 108 aa, Zea mays subsp. mays
  peptide (1)..(108): Ceres Seq. ID no. 14306085
MVLQDAAVVLGRHVGQGESRSSWVGRHGSCCCPADHGLAAARSSRSFCIFDLVLSPRFSFFFSFVDLLLRIYIQRYIYNEAALYILLVLLIYQLHVSSSMIKMITTQL

SEQ ID NO: 14893 - DNA, 1114 bp, Zea mays subsp. mays
  misc_feature (1)..(1114): Ceres Seq. ID no. 14306124
  misc_feature (1)..(1114): Ortholog of  Ceres SEQ ID NO 14313336 as cited in SEQ ID NO 55501
  misc_feature (1)..(1114): Ortholog of  Ceres SEQ ID NO 13584744 as cited in SEQ ID NO 69137
aaaccggagcattccattgtaccccgcggtgacgcgtcccggccccggcggccggcgggtctgcctaccggtaccggccccgctcgctcgccgagtcaacggcttgactgcgcccgcccgccacgttcgtagtactatacaagtacatgcctttgccttccctttcctctcctctcctcctctcccacagtcccacccgtttcgcagtgcagaagccggcgaaacttccaagcccaaggaaggaaaaaaaaaactgtcacctttaactcgatcccctcttccccgcccgagtcagagcggcggcgccggagccggagccgacagcttccggcaagcgggggctacttggtgcggcgggctatttccgcggttttgtgccacagcgggactgaactgcccgcccaggctgccctatcagggtcaccaagattgaacaagactgaactgccgcgcttcaggatactgaactgccatctcagttaaatgatatactgcacaacagtgggcagcgatagtttgagacacattagcaatgagttgtttttctcaccttttcaagagaaaaagggggccacaacaacaagacgatccatctgacaattatttcactggttctgagaatataacaagattcagctacagggaactggttagagccacatcaaattttgaccaaggcaataagattggtgagggcggctatggacctgtctacaagggaacactcaaggatgggacacttattgccgtgaaggttctgtctttacattctagacaaggggcaaaggagtttcttaatgagcttcttgcaatctctgatgtaacacatgagaatcttgtcaaactctatggctgctgtgtagaaggaaaccacaggatccttatctacaattatcttgaaaataatagtcttgcacatacccttctagattcgcgacacagcaacatccagttcaactggagaactcgggtaaatatctgcatcggtgttgcccaaggattagctttcctccatggcagtgtcagccctcacattgttcaccgtgacatcaaggcgagcaatatacttcttgataaggatatgacgccaaaaatatctgattttggtctggca

SEQ ID NO: 14894 - protein, 194 aa, Zea mays subsp. mays
  peptide (1)..(194): Ceres Seq. ID no. 14306125
MSCFSHLFKRKRGPQQQDDPSDNYFTGSENITRFSYRELVRATSNFDQGNKIGEGGYGPVYKGTLKDGTLIAVKVLSLHSRQGAKEFLNELLAISDVTHENLVKLYGCCVEGNHRILIYNYLENNSLAHTLLDSRHSNIQFNWRTRVNICIGVAQGLAFLHGSVSPHIVHRDIKASNILLDKDMTPKISDFGLA

SEQ ID NO: 14895 - protein, 143 aa, Zea mays subsp. mays
  peptide (1)..(143): Ceres Seq. ID no. 14306126
NRSIPLYPAVTRPGPGGRRVCLPVPAPLARRVNGLTAPARHVRSTIQVHAFAFPFLSSPPLPQSHPFRSAEAGETSKPKEGKKKLSPLTRSPLPRPSQSGGAGAGADSFRQAGATWCGGLFPRFCATAGLNCPPRLPYQGHQD

SEQ ID NO: 14896 - DNA, 854 bp, Zea mays subsp. mays
  misc_feature (1)..(854): Ceres Seq. ID no. 13635448
  misc_feature (1)..(854): Ortholog of  Ceres SEQ ID NO 12586030 as cited in SEQ ID NO 63832
acccacccccacacccacgcgcccggcggcgtgctctctgctctctgctgtctgctctgcacccaggaccttcggccacaggagctcagccctatccctcgacggagctcgcggcggctcgacccttccccatctccagctgcacgcggtctccaccgcctggaatccagggcctccgacgccaccccacctacaccgactggaatcgaggaccgtcggcgccgccgtcccctgcctgctgcctcgactcaactgtgtcagggtattcgcaaacggtgacaaaggttctgtcttgccttgctgtggagccatggctgcaaagatacgcgtggtgatgaagtcttttatgagccaaagcaaccaggtcgtagggcttctgccattcacaaagaaggtcggactacctgaatcgcgagccttgtacaccgtgctgcggtcgccgcatatcgataagaagtccagggaacagttctcgatgcatgtcaagaaacagtttgtggaactgacagccaaaccgcacgagctccacaagaagttcttctggctaaaacgcctgcgcatacctggggcccagtacgaggtgcagatttctttcaagacacgcctggatatggcgagcctaaggtcccaggctccttgatggctcacgatgatcgttcttatcgtcccgcgaaagtttgaagtgctgagactggtactcagaacttgtatccatcaacatttcatatgaagacatgcttattttgatgactttcgaaaaatgtagctgctaactatttccagtgcagttttgagtgcttatggcttgattcacacaaatgtagctgctacgttcagaaataaaaaaattatgg

SEQ ID NO: 14897 - protein, 212 aa, Zea mays subsp. mays
  peptide (1)..(212): Ceres Seq. ID no. 13635449
PTPTPTRPAACSLLSAVCSAPRTFGHRSSALSLDGARGGSTLPHLQLHAVSTAWNPGPPTPPHLHRLESRTVGAAVPCLLPRLNCVRVFANGDKGSVLPCCGAMAAKIRVVMKSFMSQSNQVVGLLPFTKKVGLPESRALYTVLRSPHIDKKSREQFSMHVKKQFVELTAKPHELHKKFFWLKRLRIPGAQYEVQISFKTRLDMASLRSQAP

SEQ ID NO: 14898 - protein, 110 aa, Zea mays subsp. mays
  peptide (1)..(110): Ceres Seq. ID no. 13635450
PPPHPRARRRALCSLLSALHPGPSATGAQPYPSTELAAARPFPISSCTRSPPPGIQGLRRHPTYTDWNRGPSAPPSPACCLDSTVSGYSQTVTKVLSCLAVEPWLQRYAW

SEQ ID NO: 14899 - protein, 109 aa, Zea mays subsp. mays
  peptide (1)..(109): Ceres Seq. ID no. 13635451
MAAKIRVVMKSFMSQSNQVVGLLPFTKKVGLPESRALYTVLRSPHIDKKSREQFSMHVKKQFVELTAKPHELHKKFFWLKRLRIPGAQYEVQISFKTRLDMASLRSQAP

SEQ ID NO: 14900 - DNA, 456 bp, Zea mays subsp. mays
  misc_feature (1)..(456): Ceres Seq. ID no. 4487388
  misc_feature (1)..(456): Ortholog of  Ceres SEQ ID NO 15177022 as cited in SEQ ID NO 57405
  misc_feature (1)..(456): Ortholog of  Ceres SEQ ID NO 13597427 as cited in SEQ ID NO 64038
ccccgttcagtcgcagcccaggccgacgacggcagagagcgagccgacgccgccgcaccctcgtgccagaccttagctaaaagattggattcaaaggactgggttatgacatgtgaagctctcaacaatgttcgtcagttggcaatgtatcacaaggaacgattgcaggagcttctggagcctgtagttcctcttatcgtgaaatctgtgaagaacccaagaagtgctgtatgcaaaactgcactaatgacttgtgctgacatctttaaggcctatggtgacttaatggttcactcaatcgatccactgctagtacaactgtttctgaaggcttcacaagataagcgttttgtctgtgaagctgcagaggcagctcttatatcgatgacaagttggatctcccctttactactcttgccaagaatgctgccttacctcaagaacaagaatccacgg

SEQ ID NO: 14901 - protein, 152 aa, Zea mays subsp. mays
  peptide (1)..(152): Ceres Seq. ID no. 4487389
PRSVAAQADDGRERADAAAPSCQTLAKRLDSKDWVMTCEALNNVRQLAMYHKERLQELLEPVVPLIVKSVKNPRSAVCKTALMTCADIFKAYGDLMVHSIDPLLVQLFLKASQDKRFVCEAAEAALISMTSWISPLLLLPRMLPYLKNKNPR

SEQ ID NO: 14902 - protein, 117 aa, Zea mays subsp. mays
  peptide (1)..(117): Ceres Seq. ID no. 4487390
MTCEALNNVRQLAMYHKERLQELLEPVVPLIVKSVKNPRSAVCKTALMTCADIFKAYGDLMVHSIDPLLVQLFLKASQDKRFVCEAAEAALISMTSWISPLLLLPRMLPYLKNKNPR

SEQ ID NO: 14903 - protein, 104 aa, Zea mays subsp. mays
  peptide (1)..(104): Ceres Seq. ID no. 4487391
MYHKERLQELLEPVVPLIVKSVKNPRSAVCKTALMTCADIFKAYGDLMVHSIDPLLVQLFLKASQDKRFVCEAAEAALISMTSWISPLLLLPRMLPYLKNKNPR

SEQ ID NO: 14904 - DNA, 1094 bp, Zea mays subsp. mays; identical to SEQ ID NO: 14345
  misc_feature (1)..(1094): Ceres Seq. ID no. 13504098
  misc_feature (1)..(1094): Ortholog of  Ceres SEQ ID NO 15169466 as cited in SEQ ID NO 66135

SEQ ID NO: 14905 - protein, 214 aa, Zea mays subsp. mays; identical to SEQ ID NO: 14346
  peptide (1)..(214): Ceres Seq. ID no. 13504099
  misc_feature (161)..(161): Xaa is any aa, unknown or other

SEQ ID NO: 14906 - protein, 186 aa, Zea mays subsp. mays; identical to SEQ ID NO: 14347
  peptide (1)..(186): Ceres Seq. ID no. 13504100
  misc_feature (162)..(162): Xaa is any aa, unknown or other

SEQ ID NO: 14907 - DNA, 471 bp, Zea mays subsp. mays
  misc_feature (1)..(471): Ceres Seq. ID no. 4487301
  misc_feature (1)..(471): Ortholog of  Ceres SEQ ID NO 13656068 as cited in SEQ ID NO 69047
attggcaagggtttagggcgcagcagagtctggtgtctcttgctccgaccccgttggcgactgagacgcgatccccttctcctgcactgccgtcctccgtcgctgcgatgcctcggtattactgtgactactgcgacacctacctgacccatgactcgccatctgtccggaaacaacataatgctggatacaaacacaaggcgaatgttcgaacctactatcagcaatttgaggagcagcaaactcaaagtttaattgatcaaagaatcaaggagcatcttggacaagctgcagctttccaagcaggtgcccctttcaaccaacatctgcttgcattcccaggagctatggcccgccctcgtcttccaattctgccaacccctggcatgcctcatgggtttcctcaagcacctggcgcaccattgatgccaggaattaggccccngattttaccagctccaggttatcctg

SEQ ID NO: 14908 - protein, 156 aa, Zea mays subsp. mays
  peptide (1)..(156): Ceres Seq. ID no. 4487302
  misc_feature (148)..(148): Xaa is any aa, unknown or other
WQGFRAQQSLVSLAPTPLATETRSPSPALPSSVAAMPRYYCDYCDTYLTHDSPSVRKQHNAGYKHKANVRTYYQQFEEQQTQSLIDQRIKEHLGQAAAFQAGAPFNQHLLAFPGAMARPRLPILPTPGMPHGFPQAPGAPLMPGIRPXILPAPGYP

SEQ ID NO: 14909 - protein, 121 aa, Zea mays subsp. mays
  peptide (1)..(121): Ceres Seq. ID no. 4487303
  misc_feature (113)..(113): Xaa is any aa, unknown or other
MPRYYCDYCDTYLTHDSPSVRKQHNAGYKHKANVRTYYQQFEEQQTQSLIDQRIKEHLGQAAAFQAGAPFNQHLLAFPGAMARPRLPILPTPGMPHGFPQAPGAPLMPGIRPXILPAPGYP

SEQ ID NO: 14910 - DNA, 1181 bp, Zea mays subsp. mays
  misc_feature (1)..(1181): Ceres Seq. ID no. 13622983
  misc_feature (1)..(1181): Ortholog of  Ceres SEQ ID NO 12781552 as cited in SEQ ID NO 51997
  misc_feature (1)..(1181): Ortholog of  Ceres SEQ ID NO 15176548 as cited in SEQ ID NO 53387
  misc_feature (1)..(1181): Ortholog of  Ceres SEQ ID NO 15169228 as cited in SEQ ID NO 55423
  misc_feature (1)..(1181): Ortholog of  Ceres SEQ ID NO 14312196 as cited in SEQ ID NO 56984
  misc_feature (1)..(1181): Ortholog of  Ceres SEQ ID NO 13597237 as cited in SEQ ID NO 64136
  misc_feature (1)..(1181): Ortholog of  Ceres SEQ ID NO 13598601 as cited in SEQ ID NO 69129
aaacgatacacgccgcgatagaaacactcagacacaccctctccatccgcccctccaccctcctcttcctcctcccgtcgcggcttcccccgattggcatccggggcgggcccatcccccacccggccgccgcgcgcgtccatggacggcctgcacggtacggacgcctgcttctcccccgcgagggccgtctcgccgcaggtgaggctaccggggccgccggacgtgggcagtcagtacctggcggagctgctgcaggagcaccagaagctgggacccttcatgcaggtgctcccaatctgcagcaggctgctgaatcaagagagtaggtgttccgcaaggagctatgggttggcaaggacccccacagagccctgcttcttatatcgtcaagaagattttgcggttggaagtaccgacagaaacataccctaatttcaattttatcggtcgtcttcttggaccaaggggaaattctttaaagaggattgaagcctgtacaggctgtcgtgtattcatcagagggaaaggctcaattaaagattctggcaaggaggaacaactcaagggaagacctggctatgaacacttgagtgaacccctccatatcttgattgaagctgagttacctgctaatgtgattgatgcaagacttgcaaaggcacaagagatccttgaagagttgttgaaaccagtggacgagtcacaagactactacaagagacagcaactccgagaacttgccatgttgaattcgccactccgagaggagagtccacgttcaggcggtgctcctccaagtcccttcagtaagactgtctccggtaggccgaataaaacaggggacacagaattgtagatgacactatttatcactgtttgaagagagaagtttgaaataggggatctactggagatagcctaacggcggcatgaaaagagtgaaacaatgacacccattcctccatcttgatcctccggcaaccccacttagtccatgccttcacatcctattttccatgagcaaagctttcatgatggtgttggtagtgtgtgacatcctttaatgtactagcaggtgaattttgatctcccatcccatgtgacattaaccttgagtgacagatgactatgcgtagtgtatcctctatgactgtataattagaacatttgatttatct

SEQ ID NO: 14911 - protein, 170 aa, Zea mays subsp. mays
  peptide (1)..(170): Ceres Seq. ID no. 13622984
MGWQGPPQSPASYIVKKILRLEVPTETYPNFNFIGRLLGPRGNSLKRIEACTGCRVFIRGKGSIKDSGKEEQLKGRPGYEHLSEPLHILIEAELPANVIDARLAKAQEILEELLKPVDESQDYYKRQQLRELAMLNSPLREESPRSGGAPPSPFSKTVSGRPNKTGDTEL

SEQ ID NO: 14912 - protein, 108 aa, Zea mays subsp. mays
  peptide (1)..(108): Ceres Seq. ID no. 13622985
TIHAAIETLRHTLSIRPSTLLFLLPSRLPPIGIRGGPIPHPAAARVHGRPARYGRLLLPREGRLAAGEATGAAGRGQSVPGGAAAGAPEAGTLHAGAPNLQQAAESRE

SEQ ID NO: 14913 - protein, 97 aa, Zea mays subsp. mays
  peptide (1)..(97): Ceres Seq. ID no. 13622986
MDGLHGTDACFSPARAVSPQVRLPGPPDVGSQYLAELLQEHQKLGPFMQVLPICSRLLNQESRCSARSYGLARTPTEPCFLYRQEDFAVGSTDRNIP

SEQ ID NO: 14914 - DNA, 1863 bp, Zea mays subsp. mays
  misc_feature (1)..(1863): Ceres Seq. ID no. 13635478
  misc_feature (1)..(1863): Ortholog of  Ceres SEQ ID NO 14308221 as cited in SEQ ID NO 60363
gaattcgggaggcaagtgcgattttgatcttgcagccacctttttttgttctgttgtgtatctagtagttggaggagatatgcagtttgcacttgcattggacacgaactcaggtcctcaccagataagatcttgtgagggtgatgggattgacaggttggaaaaattaagtattgggggcagaaagcaggagaaagctttgagaaataggtgctttggtggtagagttgctgcaactacacaatgtattcttacctcagatgcttgtcctgaaactcttcattctcaaacacagtcctctaggaaaaattatgctgatgcaaaccgtgtatctgcgatcattttgggcggaggcactggatctcagctctttcctctgacaagcacaagagctacgcctgctgtacctgttggaggatgttacaggcttattgatatccctatgagtaactgcttcaacagtggtataaataagatatttgtgatgagtcagttcaattctacttcgcttaaccgccatattcatcgtacataccttgaaggcgggatcaactttgctgatggatctgtacaggtattagcggctacacaaatgcctgaagagccagctggatggttccagggtacagcagactctatcagaaaatttatctgggtactcgaggattattacagtcacaaatccattgacaacattgtaatcttgagtggcgatcagctttatcggatgaattacatggaacttgtgcagaaacatgtcgaggacgatgctgatatcactatatcatgtgctcctgttgatgagagccgagcttctaaaaatgggctagtgaagattgatcatactggacgtgtacttcaattctttgaaaaaccaaagggtgctgatttgaattctatgagagttgagaccaacttcctgagctatgctatagatgatgcacagaaatatccataccttgcatcaatgggcatttatgtcttcaagaaagatgcacttttagaccttctcaagtcaaaatatactcaattacatgactttggatctgaaatcctcccaagagctgtactagatcatagtgtgcaggcatgcatttttacgggctattgggaggatgttggaacaatcaaatcattctttgatgcaaacttggccctcactgagcagccttccaagtttgatttttacgatccaaaaacacctttcttcactgcaccccgatgcttgcctccgacgcaattggacaagtgcaagatgaaatatgcatttatctcagatggttgcttactgagagaatgcaacatcgagcattctgtgattggagtctgctcacgtgtcagctctggatgtgaactcaaggactccgtgatgatgggagcggacatctatgaaactgaagaagaagcttcaaagctactgttagctgggaaggtcccgattggaataggaaggaacacaaagataaggaactgtatcattgacatgaatgctaggattgggaagaacgtggtgatcacaaacagtaagggcatccaagaggctgatcacccggaagaaggcgtcatatagatcggctgcgtttgcgtctacaaaacaagaacctacaatggtattgcatcgatggatcgtgtaaccttggtatggtaagagccgcttgacaggaagtcgagcttcgggcgaagatgctagtctggcatgctgttccttgaccatttgtgctgctagtatgtacctgttataagctgccctagaagttgcagcaaacctttttatgaacctttgtatttccattaccctgctttggatcaactatatctgtcagtcctatatattactaaatttttaaacaaaccagattccgg

SEQ ID NO: 14915 - protein, 522 aa, Zea mays subsp. mays
  peptide (1)..(522): Ceres Seq. ID no. 13635479
NSGGKCDFDLAATFFCSVVYLVVGGDMQFALALDTNSGPHQIRSCEGDGIDRLEKLSIGGRKQEKALRNRCFGGRVAATTQCILTSDACPETLHSQTQSSRKNYADANRVSAIILGGGTGSQLFPLTSTRATPAVPVGGCYRLIDIPMSNCFNSGINKIFVMSQFNSTSLNRHIHRTYLEGGINFADGSVQVLAATQMPEEPAGWFQGTADSIRKFIWVLEDYYSHKSIDNIVILSGDQLYRMNYMELVQKHVEDDADITISCAPVDESRASKNGLVKIDHTGRVLQFFEKPKGADLNSMRVETNFLSYAIDDAQKYPYLASMGIYVFKKDALLDLLKSKYTQLHDFGSEILPRAVLDHSVQACIFTGYWEDVGTIKSFFDANLALTEQPSKFDFYDPKTPFFTAPRCLPPTQLDKCKMKYAFISDGCLLRECNIEHSVIGVCSRVSSGCELKDSVMMGADIYETEEEASKLLLAGKVPIGIGRNTKIRNCIIDMNARIGKNVVITNSKGIQEADHPEEGVI

SEQ ID NO: 14916 - protein, 496 aa, Zea mays subsp. mays
  peptide (1)..(496): Ceres Seq. ID no. 13635480
MQFALALDTNSGPHQIRSCEGDGIDRLEKLSIGGRKQEKALRNRCFGGRVAATTQCILTSDACPETLHSQTQSSRKNYADANRVSAIILGGGTGSQLFPLTSTRATPAVPVGGCYRLIDIPMSNCFNSGINKIFVMSQFNSTSLNRHIHRTYLEGGINFADGSVQVLAATQMPEEPAGWFQGTADSIRKFIWVLEDYYSHKSIDNIVILSGDQLYRMNYMELVQKHVEDDADITISCAPVDESRASKNGLVKIDHTGRVLQFFEKPKGADLNSMRVETNFLSYAIDDAQKYPYLASMGIYVFKKDALLDLLKSKYTQLHDFGSEILPRAVLDHSVQACIFTGYWEDVGTIKSFFDANLALTEQPSKFDFYDPKTPFFTAPRCLPPTQLDKCKMKYAFISDGCLLRECNIEHSVIGVCSRVSSGCELKDSVMMGADIYETEEEASKLLLAGKVPIGIGRNTKIRNCIIDMNARIGKNVVITNSKGIQEADHPEEGVI

SEQ ID NO: 14917 - protein, 375 aa, Zea mays subsp. mays
  peptide (1)..(375): Ceres Seq. ID no. 13635481
MSNCFNSGINKIFVMSQFNSTSLNRHIHRTYLEGGINFADGSVQVLAATQMPEEPAGWFQGTADSIRKFIWVLEDYYSHKSIDNIVILSGDQLYRMNYMELVQKHVEDDADITISCAPVDESRASKNGLVKIDHTGRVLQFFEKPKGADLNSMRVETNFLSYAIDDAQKYPYLASMGIYVFKKDALLDLLKSKYTQLHDFGSEILPRAVLDHSVQACIFTGYWEDVGTIKSFFDANLALTEQPSKFDFYDPKTPFFTAPRCLPPTQLDKCKMKYAFISDGCLLRECNIEHSVIGVCSRVSSGCELKDSVMMGADIYETEEEASKLLLAGKVPIGIGRNTKIRNCIIDMNARIGKNVVITNSKGIQEADHPEEGVI

SEQ ID NO: 14918 - DNA, 1486 bp, Zea mays subsp. mays; identical to SEQ ID NO: 12596
  misc_feature (1)..(1486): Ceres Seq. ID no. 13573960
  misc_feature (1)..(1486): Ortholog of  Ceres SEQ ID NO 14310524 as cited in SEQ ID NO 58840
  misc_feature (1)..(1486): Ortholog of  Ceres SEQ ID NO 15169541 as cited in SEQ ID NO 67500

SEQ ID NO: 14919 - protein, 404 aa, Zea mays subsp. mays; identical to SEQ ID NO: 12597
  peptide (1)..(404): Ceres Seq. ID no. 13573961

SEQ ID NO: 14920 - protein, 368 aa, Zea mays subsp. mays; identical to SEQ ID NO: 12598
  peptide (1)..(368): Ceres Seq. ID no. 13573962

SEQ ID NO: 14921 - protein, 338 aa, Zea mays subsp. mays; identical to SEQ ID NO: 12599
  peptide (1)..(338): Ceres Seq. ID no. 13573963

SEQ ID NO: 14922 - DNA, 503 bp, Zea mays subsp. mays
  misc_feature (1)..(503): Ceres Seq. ID no. 4486968
  misc_feature (1)..(503): Ortholog of  Ceres SEQ ID NO 13582876 as cited in SEQ ID NO 68251
  misc_feature (1)..(503): Ortholog of  Ceres SEQ ID NO 15179090 as cited in SEQ ID NO 0
gactcaaagtttgatacatcatgtgtttaggaaactgtgttcttctatatgcactggtttttccttgacaatacctacatgttcttgtgtgyccaagcgtgaagtgaaaagattcgccgatctmagttctgatgagattagtgacttatgggttactgcaaaggaagttggtgcacgtcttgagcagtaccacaaagcatcgtcacttacctttgctatccaggatggtcctcaagctggccaaacagttgcacatgtccacatccacctcatcccaaggaagaaaggggattttgagaaaaatgatgaaatatatgatgcgattgatgtgaaggagaaagaattgaaggagaagcttgacctggacattgagaggaaagataggagcatggaagagatggctaatgaggccaatgagtaccgtgctctttttagttagtttctaagctgagctgactgtttgctagaaataaggtttgctacctgttcttcattgttgcagt

SEQ ID NO: 14923 - protein, 145 aa, Zea mays subsp. mays
  peptide (1)..(145): Ceres Seq. ID no. 4486969
  misc_feature (31)..(31): Xaa is any aa, unknown or other
  misc_feature (41)..(41): Xaa is any aa, unknown or other
TQSLIHHVFRKLCSSICTGFSLTIPTCSCVXKREVKRFADXSSDEISDLWVTAKEVGARLEQYHKASSLTFAIQDGPQAGQTVAHVHIHLIPRKKGDFEKNDEIYDAIDVKEKELKEKLDLDIERKDRSMEEMANEANEYRALFS

SEQ ID NO: 14924 - DNA, 1047 bp, Zea mays subsp. mays
  misc_feature (1)..(1047): Ceres Seq. ID no. 12455278
  misc_feature (1)..(1047): Ortholog of  Ceres SEQ ID NO 13595292 as cited in SEQ ID NO 55879
  misc_feature (1)..(1047): Ortholog of  Ceres SEQ ID NO 12593564 as cited in SEQ ID NO 63168
aaagaggggagaagaagccaaggatgtactggttccagttcaacctccctgagctgtgatgggaatcgcattccctctataattcctataaataggggccctcccgctcccatcacaatcacccatcactcgctctattcccattccaagtccccgctcttggattcccgacgacgagctcggagcttcttcttccctgctcggtgctcgtcgcaacagctgccgccatgtctgccgcgaaccagctcgccgctctggtcagcaacatgtacgccacgggtttgcttgacgatcagttccagcagctccagctgctccaggaccccagcgcccctgacttcgtctccgaggtcgtcacgctcttctgtcaggacggcgagcggatcatcgaagagctggccaaactgctggagaagcccaacgtggattttgacagggttgacgcctttgtgcatcagctcaagggaagcagtgcaaatattggtgctcagaaggttaagaacacttgcattcagttccgcgaattctgtcagcagaagagcagagatgggtgcctcaaggtactggagacaatgaggattaacttctatgagctgcgtggcaagtttcagaccatgcttcagctggagcgtcaggtcaatggctttccccccaacaagtaaaccagatggtggagtggaccttcatgttaggatgatgcttgcacctttcaagtttcagaacattctgaatgagctcctcaattggtttctgggaagtcttgtaatagcttagcagcaagattagcgttgacaccaccgtagcagtagtcattgtcgtcaagtagttgtcctaaatgtctgtgctgggttatggatctcctgcaagcagttgcaggcttgcagctgttctatttactctagtagtttattttggagtagtcgctctcaataaatctgtcctaggagtctattggtggattattagtcagtcagtttctgggattcctggtggtgaagcaaaacaatgttatggctatcggttaataataatagtttgctgtgtttg

SEQ ID NO: 14925 - protein, 191 aa, Zea mays subsp. mays
  peptide (1)..(191): Ceres Seq. ID no. 12455279
KEGRRSQGCTGSSSTSLSCDGNRIPSIIPINRGPPAPITITHHSLYSHSKSPLLDSRRRARSFFFPARCSSQQLPPCLPRTSSPLWSATCTPRVCLTISSSSSSCSRTPAPLTSSPRSSRSSVRTASGSSKSWPNCWRSPTWILTGLTPLCISSREAVQILVLRRLRTLAFSSANSVSRRAEMGASRYWRQ

SEQ ID NO: 14926 - protein, 144 aa, Zea mays subsp. mays
  peptide (1)..(144): Ceres Seq. ID no. 12455280
MSAANQLAALVSNMYATGLLDDQFQQLQLLQDPSAPDFVSEVVTLFCQDGERIIEELAKLLEKPNVDFDRVDAFVHQLKGSSANIGAQKVKNTCIQFREFCQQKSRDGCLKVLETMRINFYELRGKFQTMLQLERQVNGFPPNK

SEQ ID NO: 14927 - protein, 131 aa, Zea mays subsp. mays
  peptide (1)..(131): Ceres Seq. ID no. 12455281
MYATGLLDDQFQQLQLLQDPSAPDFVSEVVTLFCQDGERIIEELAKLLEKPNVDFDRVDAFVHQLKGSSANIGAQKVKNTCIQFREFCQQKSRDGCLKVLETMRINFYELRGKFQTMLQLERQVNGFPPNK

SEQ ID NO: 14928 - DNA, 925 bp, Zea mays subsp. mays
  misc_feature (1)..(925): Ceres Seq. ID no. 12469239
  misc_feature (1)..(925): Ortholog of  Ceres SEQ ID NO 15225659 as cited in SEQ ID NO 61631
tcccccgtcacctcaaaaacctctccaaccccaccggtccaccaccgccagccacctctccctcgctctcactcaggtcccccgcaacacgacgagaggcagcaggaccggaaggcgccatggccaccacccgcgacgtctccgccgcctccgcggccgccatgttccacgtgtaccagcccatgccgatgccatccacggcggcggcccccgcgaaggcgggcaagaaggagggcggcaaggaccggcacagcaaggtgaacgggcgcgggcggcgcgtgcggatgccgatcgtgtgcgcggcgcgcgtgttccagctgacccgcgagctggggctcaagtcggacgggcagaccatcgagtggctgctccgccaggccgagccctccatcgtggccgccacgggctccggcaccaccccggccgtcttcgtctcctcctccgcgccgtccangtcctcctcctcccactcccactaccagcagcagcagcagcagcagcaggccnccgtcgtcgtcctgggcaagcgcccgcgcgaggagggcggcgacgccgcggcggcgtccgtgccggcgttntgggcggcggcgccgcggacgacggcagcagcggacgccagctggggcttctcgccgctggaggcccagcaggcggcggcggggtacgtgcccatggcacaggcgcagcagcagcagcaccaccaccaccacctcaacctgctcgccgcgctntccggtgccgcgaggcgcgccgaggcggcggaggagacccgatgactgctagcctagtagctacatgcatccgccactcgcgcgcatgcattggtcctttgttgtccgtgtgctcgctcttggcagcgtaaacgttcttgatttttgtttgtgtgtgtgcccttgtgatcttggctcgttagctagagtaatcc

SEQ ID NO: 14929 - protein, 286 aa, Zea mays subsp. mays
  peptide (1)..(286): Ceres Seq. ID no. 12469240
  misc_feature (151)..(151): Xaa is any aa, unknown or other
  misc_feature (169)..(169): Xaa is any aa, unknown or other
  misc_feature (193)..(193): Xaa is any aa, unknown or other
  misc_feature (244)..(244): Xaa is any aa, unknown or other
PPSPQKPLQPHRSTTASHLSLALTQVPRNTTRGSRTGRRHGHHPRRLRRLRGRHVPRVPAHADAIHGGGPREGGQEGGRQGPAQQGERARAARADADRVRGARVPADPRAGAQVGRADHRVAAPPGRALHRGRHGLRHHPGRLRLLLRAVXVLLLPLPLPAAAAAAAGXRRRPGQAPARGGRRRRGGVRAGVXGGGAADDGSSGRQLGLLAAGGPAGGGGVRAHGTGAAAAAPPPPPQPARRAXRCREARRGGGGDPMTASLVATCIRHSRACIGPLLSVCSLLAA

SEQ ID NO: 14930 - protein, 257 aa, Zea mays subsp. mays
  peptide (1)..(257): Ceres Seq. ID no. 12469241
  misc_feature (151)..(151): Xaa is any aa, unknown or other
  misc_feature (169)..(169): Xaa is any aa, unknown or other
  misc_feature (192)..(192): Xaa is any aa, unknown or other
  misc_feature (243)..(243): Xaa is any aa, unknown or other
PRHLKNLSNPTGPPPPATSPSLSLRSPATRREAAGPEGAMATTRDVSAASAAAMFHVYQPMPMPSTAAAPAKAGKKEGGKDRHSKVNGRGRRVRMPIVCAARVFQLTRELGLKSDGQTIEWLLRQAEPSIVAATGSGTTPAVFVSSSAPSXSSSSHSHYQQQQQQQQAXVVVLGKRPREEGGDAAAASVPAXWAAAPRTTAAADASWGFSPLEAQQAAAGYVPMAQAQQQQHHHHHLNLLAAXSGAARRAEAAEETR

SEQ ID NO: 14931 - protein, 218 aa, Zea mays subsp. mays
  peptide (1)..(218): Ceres Seq. ID no. 12469242
  misc_feature (112)..(112): Xaa is any aa, unknown or other
  misc_feature (130)..(130): Xaa is any aa, unknown or other
  misc_feature (153)..(153): Xaa is any aa, unknown or other
  misc_feature (204)..(204): Xaa is any aa, unknown or other
MATTRDVSAASAAAMFHVYQPMPMPSTAAAPAKAGKKEGGKDRHSKVNGRGRRVRMPIVCAARVFQLTRELGLKSDGQTIEWLLRQAEPSIVAATGSGTTPAVFVSSSAPSXSSSSHSHYQQQQQQQQAXVVVLGKRPREEGGDAAAASVPAXWAAAPRTTAAADASWGFSPLEAQQAAAGYVPMAQAQQQQHHHHHLNLLAAXSGAARRAEAAEETR

SEQ ID NO: 14932 - DNA, 1617 bp, Zea mays subsp. mays
  misc_feature (1)..(1617): Ceres Seq. ID no. 13599123
  misc_feature (1)..(1617): Ortholog of  Ceres SEQ ID NO 15179416 as cited in SEQ ID NO 0
catatggctcaatgctgaaaaatctgacatttgtcaagacttttgcctctggaatacttgttcccaaaagctatatctggcctgttacaccagataattacctgctgccttatacttcagtggttgatgatgctcacaaagcaggactagaaatctatgccgctgattttgcaaatgacttaaccatcagctataactacagctttgatccattagcggaatatcttttcttcattgataacggtgccttctctgttgatggtgtattgactgatttcccgattactccttcagaggcagttggttgctttagtaacctgaacaccagcaagattgatcatgctaaacctctagttatctcgcataatggtgctagtggtgactacccagactgcactgaccaagcttatgaaaaggcagttgccgatggtgcggatgtcattgactgtcctgttcaagtgactaaagatggcatactgatatgcatgagctctgttgacctaatggatgttactactgttgcaaaatcacaatttgcttcgcaagtaactaccatcaacagtctgaaggctgggtctggagtcttcaccttcaaccttacttgggatgatatttctaagaacctaaagcccatgatatcgaacccaatgagcacctataatctgtacagaaatcctagaaacaagaacgcaggaaacttcatgagattgtcagactttttgacctttgcaaatggaaaggatttgtcaggaatcatgataactgttgagcatgctgcattcatggcagaggagcttgggtttggtgtggtagatgcagtgatcaaagcacttgatgactctggttatagcaaacagactgcccagaatgttatgattcagtcaaccaacagctcagttctggtgaagttcaagcaggaaaccaagtacaaccttgtctacatgatcgaagaaagtgtccgagatgccgcaccttcctcccttgcggacattaagaagtttgctgatgctgtttctgttggcaccacatctgttttcccggaaacccattactatttgacgaaccagaccaataagcttgttccgacccttaagtctgccggcctccaagtttacgtttacgtgctcatgaatgagtttgcttcccagccaaatgacttcttcgcagacgccacttcacagatcaatgcttatgtgcaaagtgctaaggtggatggtgtcatcactgatttccctgggactgctcacagatacaaactgaactcctgcacgagcatgggaaagaacatgccactattcatgcagcctccgcaaccaggtggcctcctttcaaccattctcccagatgcacagccaccagcagcagcgccaatgccgctcttgacggacgctgacgtcgcagaaccagccctacctccggtcagcaacaccaccacggctgcatcgccttcgcatgccgccctcagaatgcgaacccatgtcttgagcatcgccacattgctgatgctatgtgcttccctcctcatctgaagatagtcttgcccaacatcatacgcggcgtggcgcattagagctgaggattttcacattgagctgctaatagcaattctttccacct

SEQ ID NO: 14933 - protein, 508 aa, Zea mays subsp. mays
  peptide (1)..(508): Ceres Seq. ID no. 13599124
YGSMLKNLTFVKTFASGILVPKSYIWPVTPDNYLLPYTSVVDDAHKAGLEIYAADFANDLTISYNYSFDPLAEYLFFIDNGAFSVDGVLTDFPITPSEAVGCFSNLNTSKIDHAKPLVISHNGASGDYPDCTDQAYEKAVADGADVIDCPVQVTKDGILICMSSVDLMDVTTVAKSQFASQVTTINSLKAGSGVFTFNLTWDDISKNLKPMISNPMSTYNLYRNPRNKNAGNFMRLSDFLTFANGKDLSGIMITVEHAAFMAEELGFGVVDAVIKALDDSGYSKQTAQNVMIQSTNSSVLVKFKQETKYNLVYMIEESVRDAAPSSLADIKKFADAVSVGTTSVFPETHYYLTNQTNKLVPTLKSAGLQVYVYVLMNEFASQPNDFFADATSQINAYVQSAKVDGVITDFPGTAHRYKLNSCTSMGKNMPLFMQPPQPGGLLSTILPDAQPPAAAPMPLLTDADVAEPALPPVSNTTTAASPSHAALRMRTHVLSIATLLMLCASLLI

SEQ ID NO: 14934 - protein, 505 aa, Zea mays subsp. mays
  peptide (1)..(505): Ceres Seq. ID no. 13599125
MLKNLTFVKTFASGILVPKSYIWPVTPDNYLLPYTSVVDDAHKAGLEIYAADFANDLTISYNYSFDPLAEYLFFIDNGAFSVDGVLTDFPITPSEAVGCFSNLNTSKIDHAKPLVISHNGASGDYPDCTDQAYEKAVADGADVIDCPVQVTKDGILICMSSVDLMDVTTVAKSQFASQVTTINSLKAGSGVFTFNLTWDDISKNLKPMISNPMSTYNLYRNPRNKNAGNFMRLSDFLTFANGKDLSGIMITVEHAAFMAEELGFGVVDAVIKALDDSGYSKQTAQNVMIQSTNSSVLVKFKQETKYNLVYMIEESVRDAAPSSLADIKKFADAVSVGTTSVFPETHYYLTNQTNKLVPTLKSAGLQVYVYVLMNEFASQPNDFFADATSQINAYVQSAKVDGVITDFPGTAHRYKLNSCTSMGKNMPLFMQPPQPGGLLSTILPDAQPPAAAPMPLLTDADVAEPALPPVSNTTTAASPSHAALRMRTHVLSIATLLMLCASLLI

SEQ ID NO: 14935 - protein, 347 aa, Zea mays subsp. mays
  peptide (1)..(347): Ceres Seq. ID no. 13599126
MSSVDLMDVTTVAKSQFASQVTTINSLKAGSGVFTFNLTWDDISKNLKPMISNPMSTYNLYRNPRNKNAGNFMRLSDFLTFANGKDLSGIMITVEHAAFMAEELGFGVVDAVIKALDDSGYSKQTAQNVMIQSTNSSVLVKFKQETKYNLVYMIEESVRDAAPSSLADIKKFADAVSVGTTSVFPETHYYLTNQTNKLVPTLKSAGLQVYVYVLMNEFASQPNDFFADATSQINAYVQSAKVDGVITDFPGTAHRYKLNSCTSMGKNMPLFMQPPQPGGLLSTILPDAQPPAAAPMPLLTDADVAEPALPPVSNTTTAASPSHAALRMRTHVLSIATLLMLCASLLI

SEQ ID NO: 14936 - DNA, 495 bp, Zea mays subsp. mays
  misc_feature (1)..(495): Ceres Seq. ID no. 4581901
  misc_feature (1)..(495): Ortholog of  Ceres SEQ ID NO 12778278 as cited in SEQ ID NO 63035
ttgaagatgggtgactgtgatctttcagatctnattgggtttttccaaacctccaaagcattgcaagaattcgccggtggtgccttttttgaagttggagagtacaccaagtacgaaaaggtcattttcccacctaggctatgcttcttagggggtcttaccttcatgggtaaaaacgagatgccagttatctttccgtattccacaatgcttaagaaactggacttgcagttcactttcctcaccactgaagaccactgtcagcttattgctaaatgccccaacctaagtgttctcgaggtgaggaatgtgattggggatagaggactagaagttgttgctgctacatgcaagaagctacgaaggctcagaattgagcgtggcgacgatgatcctggccaagaagagcagggaggagtctctcagataggtttgacagccgtagccgttggctgccgcgaactagagtacatagctgcctatgtatctgatatc

SEQ ID NO: 14937 - protein, 165 aa, Zea mays subsp. mays
  peptide (1)..(165): Ceres Seq. ID no. 4581902
  misc_feature (11)..(11): Xaa is any aa, unknown or other
LKMGDCDLSDXIGFFQTSKALQEFAGGAFFEVGEYTKYEKVIFPPRLCFLGGLTFMGKNEMPVIFPYSTMLKKLDLQFTFLTTEDHCQLIAKCPNLSVLEVRNVIGDRGLEVVAATCKKLRRLRIERGDDDPGQEEQGGVSQIGLTAVAVGCRELEYIAAYVSDI

SEQ ID NO: 14938 - protein, 163 aa, Zea mays subsp. mays
  peptide (1)..(163): Ceres Seq. ID no. 4581903
  misc_feature (9)..(9): Xaa is any aa, unknown or other
MGDCDLSDXIGFFQTSKALQEFAGGAFFEVGEYTKYEKVIFPPRLCFLGGLTFMGKNEMPVIFPYSTMLKKLDLQFTFLTTEDHCQLIAKCPNLSVLEVRNVIGDRGLEVVAATCKKLRRLRIERGDDDPGQEEQGGVSQIGLTAVAVGCRELEYIAAYVSDI

SEQ ID NO: 14939 - protein, 110 aa, Zea mays subsp. mays
  peptide (1)..(110): Ceres Seq. ID no. 4581904
MGKNEMPVIFPYSTMLKKLDLQFTFLTTEDHCQLIAKCPNLSVLEVRNVIGDRGLEVVAATCKKLRRLRIERGDDDPGQEEQGGVSQIGLTAVAVGCRELEYIAAYVSDI

SEQ ID NO: 14940 - DNA, 2065 bp, Zea mays subsp. mays
  misc_feature (1)..(2065): Ceres Seq. ID no. 13636855
  misc_feature (1)..(2065): Ortholog of  Ceres SEQ ID NO 14307682 as cited in SEQ ID NO 54529
ctttaaatgggacgcgcacctccgcctgggtctgtctgcgcagggacgcggacgcggcggcaccggcaagcaattgtctcatctgctccactccatctccatttaacgcactctccactccttcgcggcgggggtttaggcgcacggcggcaggccaattaacgccgctgcggcgagcgccgggggggaaatgggcggcgacggcacgagggcgctggaccagacgccgacgtgggccgtggccgccgtctgcgctgtcatcgtcgcggcgtccatactcctcgagggcttcctccaccacctcggtcagttgctcaacaagaagcggaagaaggcgctgtttgacgctctggagaaggttaaatcggagctgatgactctggggttcatatcgcctctgctgaccgtgacgggaaggtacatcgcgcgcatctgcatcccggagggagccgcaaacaccatgctgccctgccgcctgtccggtcactcggtggcggaagagcccaagggccatggccgacggcacctatctgaagatccaaccaaccttttttcctgccgcaaaggcatggtgtcgcttgtttcagccgacggcatgcatcagctgcacattttcgtgttcttcttggccgtcttccatgttaccttcagtttcttcacaatgtccttgggtagagcaaagactcgtatatggaaggtgtgggaaaaggaaacttgctcccctcagtataattatttaaatgacccctcaaagttcaggcttacgcaccaaacatcttttgtgaggcaacatgcaagttgttggagcaaaagcacaatcacgctctattttgtgagcttctttaggcagttcttcagatccgtccgtaagacagactactttactttgcgacatggattcatttcagctcatttatctccggggactaggttcaattttcgaaagtacattaaaaggtccttggaggatgatttcaagacagttgttggcattagtccaccactatgggcttctgctttggctgtcatgctgttcaatgttcatggatggcacaacttattctggttctctgcaattccccttgtagttattctagcagttggaacaaagctgcaggctataattgctatgatggctattgaaattgcagagaggcatacagttatccaaggcatgccggtggtaaaactaagtgatgatcatttctggttcgggaagcctcgtttggttctccacctcattcatttcgcatcatttcagaacgcatttgaaattacatatttcttttggatctggtacgaatttggcctgaggtcctgcttccatgacaactttgagtttatcattgcaagagtctgccttggggctatcgtccagtttatgtgcagctacatcacccttccactctatgcccttgtttctcagatgggttcagaaatgaagcgaacaattttcgacgagcagacagcgaaggccctgaagaaatggcacaaggccgtggtgaagaagaaacaccacaaggattcctcacacaattcttccgagactcctagcactgacacaacaggacctgcaggggaagcgggtgagtggcagcggctgcacgaggtgccggtccggcacctccaccggtacaagaccatcgcgcacgtcggcggcgtgaggagcccgttgtcggacccggactacagcgacacggacgacaccgagccgctgtcgttgcagactaggcacctgataccgccggcgaagcagcggagcctcgacaccgagcgcgcggaggtgcgcgtgaacgtcgtagagacagcggcggcgccaagcgacgtcctccaagacagcttctcgttcccaaggctgcttcctcctcgccatgtgccggacaagtaaagtggccagcagtctgcttagtactacagactgtcctatatagagatagtagaatagtagtttcaagttataagtcgatttggctagttatacaacttttgttatttatttagataaaggctatgtctatatagcaaaagttgtaaaactagaaaaatcaaaatgatttataatttg

SEQ ID NO: 14941 - protein, 565 aa, Zea mays subsp. mays
  peptide (1)..(565): Ceres Seq. ID no. 13636856
MGGDGTRALDQTPTWAVAAVCAVIVAASILLEGFLHHLGQLLNKKRKKALFDALEKVKSELMTLGFISPLLTVTGRYIARICIPEGAANTMLPCRLSGHSVAEEPKGHGRRHLSEDPTNLFSCRKGMVSLVSADGMHQLHIFVFFLAVFHVTFSFFTMSLGRAKTRIWKVWEKETCSPQYNYLNDPSKFRLTHQTSFVRQHASCWSKSTITLYFVSFFRQFFRSVRKTDYFTLRHGFISAHLSPGTRFNFRKYIKRSLEDDFKTVVGISPPLWASALAVMLFNVHGWHNLFWFSAIPLVVILAVGTKLQAIIAMMAIEIAERHTVIQGMPVVKLSDDHFWFGKPRLVLHLIHFASFQNAFEITYFFWIWYEFGLRSCFHDNFEFIIARVCLGAIVQFMCSYITLPLYALVSQMGSEMKRTIFDEQTAKALKKWHKAVVKKKHHKDSSHNSSETPSTDTTGPAGEAGEWQRLHEVPVRHLHRYKTIAHVGGVRSPLSDPDYSDTDDTEPLSLQTRHLIPPAKQRSLDTERAEVRVNVVETAAAPSDVLQDSFSFPRLLPPRHVPDK

SEQ ID NO: 14942 - protein, 504 aa, Zea mays subsp. mays
  peptide (1)..(504): Ceres Seq. ID no. 13636857
MTLGFISPLLTVTGRYIARICIPEGAANTMLPCRLSGHSVAEEPKGHGRRHLSEDPTNLFSCRKGMVSLVSADGMHQLHIFVFFLAVFHVTFSFFTMSLGRAKTRIWKVWEKETCSPQYNYLNDPSKFRLTHQTSFVRQHASCWSKSTITLYFVSFFRQFFRSVRKTDYFTLRHGFISAHLSPGTRFNFRKYIKRSLEDDFKTVVGISPPLWASALAVMLFNVHGWHNLFWFSAIPLVVILAVGTKLQAIIAMMAIEIAERHTVIQGMPVVKLSDDHFWFGKPRLVLHLIHFASFQNAFEITYFFWIWYEFGLRSCFHDNFEFIIARVCLGAIVQFMCSYITLPLYALVSQMGSEMKRTIFDEQTAKALKKWHKAVVKKKHHKDSSHNSSETPSTDTTGPAGEAGEWQRLHEVPVRHLHRYKTIAHVGGVRSPLSDPDYSDTDDTEPLSLQTRHLIPPAKQRSLDTERAEVRVNVVETAAAPSDVLQDSFSFPRLLPPRHVPDK

SEQ ID NO: 14943 - protein, 475 aa, Zea mays subsp. mays
  peptide (1)..(475): Ceres Seq. ID no. 13636858
MLPCRLSGHSVAEEPKGHGRRHLSEDPTNLFSCRKGMVSLVSADGMHQLHIFVFFLAVFHVTFSFFTMSLGRAKTRIWKVWEKETCSPQYNYLNDPSKFRLTHQTSFVRQHASCWSKSTITLYFVSFFRQFFRSVRKTDYFTLRHGFISAHLSPGTRFNFRKYIKRSLEDDFKTVVGISPPLWASALAVMLFNVHGWHNLFWFSAIPLVVILAVGTKLQAIIAMMAIEIAERHTVIQGMPVVKLSDDHFWFGKPRLVLHLIHFASFQNAFEITYFFWIWYEFGLRSCFHDNFEFIIARVCLGAIVQFMCSYITLPLYALVSQMGSEMKRTIFDEQTAKALKKWHKAVVKKKHHKDSSHNSSETPSTDTTGPAGEAGEWQRLHEVPVRHLHRYKTIAHVGGVRSPLSDPDYSDTDDTEPLSLQTRHLIPPAKQRSLDTERAEVRVNVVETAAAPSDVLQDSFSFPRLLPPRHVPDK

SEQ ID NO: 14944 - DNA, 702 bp, Zea mays subsp. mays
  misc_feature (1)..(702): Ceres Seq. ID no. 12469805
  misc_feature (1)..(702): Ortholog of  Ceres SEQ ID NO 13599079 as cited in SEQ ID NO 607
  misc_feature (1)..(702): Ortholog of  Ceres SEQ ID NO 13587596 as cited in SEQ ID NO 641
  misc_feature (1)..(702): Ortholog of  Ceres SEQ ID NO 13599626 as cited in SEQ ID NO 0
ctcctgctcgtcaccggtgaccacggcggcctcgccagcctacagccaccaccagacgacgttccaggcacctgcaccgccgccgtcatgcggcgcaatgacgatggcggccgctgcgccgcatgtgcagggcttccacgtcggcgacgacgacactaccaccgcgatggcgatgcaccgtcatcagcagatgatgcgcgagctggcggaggcgcctctgcaccaggaggcagacgacttcgaggacttcgtgacgcggctgcccaaggcggaggacttcggcctgcagggcttccaggaggtggcccccgaggtgttcgacgacgccgccggcatctgggaccacgcggccgcctgggagcccccccaccatgatgatcgactctggcgcccagccccagcagcagctcgtcgtccctctttgactcgctcgtcgatgacgccgcgcgccctgcaccagctactgcttcgttcccagctgcatcgaactggccggtgtacgtggcggagtgatacgacgcgcgcgccatgcatgacaccactgcacaggtggttcctgcatgtgttgcttacgcctcgagacgtacgtacataataccagtatgtatgtaccggatggttactntgatatgactgtatttctcctagttattcgtgagtttcatttggataatgtttcaggttttgtaaaatatatacttt

SEQ ID NO: 14945 - protein, 197 aa, Zea mays subsp. mays
  peptide (1)..(197): Ceres Seq. ID no. 12469806
SCSSPVTTAASPAYSHHQTTFQAPAPPPSCGAMTMAAAAPHVQGFHVGDDDTTTAMAMHRHQQMMRELAEAPLHQEADDFEDFVTRLPKAEDFGLQGFQEVAPEVFDDAAGIWDHAAAWEPPHHDDRLWRPAPAAARRPSLTRSSMTPRALHQLLLRSQLHRTGRCTWRSDTTRAPCMTPLHRWFLHVLLTPRDVRT

SEQ ID NO: 14946 - protein, 165 aa, Zea mays subsp. mays
  peptide (1)..(165): Ceres Seq. ID no. 12469807
MTMAAAAPHVQGFHVGDDDTTTAMAMHRHQQMMRELAEAPLHQEADDFEDFVTRLPKAEDFGLQGFQEVAPEVFDDAAGIWDHAAAWEPPHHDDRLWRPAPAAARRPSLTRSSMTPRALHQLLLRSQLHRTGRCTWRSDTTRAPCMTPLHRWFLHVLLTPRDVRT

SEQ ID NO: 14947 - protein, 163 aa, Zea mays subsp. mays
  peptide (1)..(163): Ceres Seq. ID no. 12469808
MAAAAPHVQGFHVGDDDTTTAMAMHRHQQMMRELAEAPLHQEADDFEDFVTRLPKAEDFGLQGFQEVAPEVFDDAAGIWDHAAAWEPPHHDDRLWRPAPAAARRPSLTRSSMTPRALHQLLLRSQLHRTGRCTWRSDTTRAPCMTPLHRWFLHVLLTPRDVRT

SEQ ID NO: 14948 - DNA, 989 bp, Zea mays subsp. mays
  misc_feature (1)..(989): Ceres Seq. ID no. 12469861
  misc_feature (1)..(989): Ortholog of  Ceres SEQ ID NO 14307018 as cited in SEQ ID NO 59674
cagagctcctggactaggcttagtctgcagtgatattgtgaaaggagttcctgcaatttttggtcattttctgacctcactccctgcgatacactcgataattgtatttgtgtgtatcaggaatgtgccagttccggtggttcctcaaagtgaaaggttccttttccaacgtgtatgctcaaggggctatcacttgttccgctgtatagcgagatacgggtataaagacaagaagcaggagcaccatagcgtatttgagcgtcttctgattgaaggccttgagaaattcatacaaagagaggcagtagagctatccctacaaagcgaagacgacattgactcggacgaagagcctccaacccctgtgaagatcatcacagcaccaaatggcagcctgtactcgctcgacgtccctctcctggcagactatgtgccttcaacagagctcattcatgaagccagctgctccacgcctcaacacgatcctgtactggattatgcacagaaccttgaactggagctggcgttcatcgagcagtccaagcggtctggggtcatctacctcatcgataatcccatcatcaaggccaggaaggactcatggttcttcaagaagctgatgataaactatttcttcgcgttcctgaggaacaactgccgccgggcgatcatgttgatgagcatcccgcattcaaacatgatgcaggtgcgcatgacttcttatgtctgattgctggaactgcactggttctgttcatggatgtctgatacaaaccacactgacagtaaaagaatgaacgtggcaaatgcaaagaggatatcggcacttttgtttttgttcataatttgatgatggcttaggttgttgtcggaatctatctcccctgtagttgtacaatgccaaaatatagttggaagttttagctggtacaccattagggtgctgtattaaccttttttactcttgtgcagtaaagattctttttgtc

SEQ ID NO: 14949 - protein, 242 aa, Zea mays subsp. mays
  peptide (1)..(242): Ceres Seq. ID no. 12469862
RAPGLGLVCSDIVKGVPAIFGHFLTSLPAIHSIIVFVCIRNVPVPVVPQSERFLFQRVCSRGYHLFRCIARYGYKDKKQEHHSVFERLLIEGLEKFIQREAVELSLQSEDDIDSDEEPPTPVKIITAPNGSLYSLDVPLLADYVPSTELIHEASCSTPQHDPVLDYAQNLELELAFIEQSKRSGVIYLIDNPIIKARKDSWFFKKLMINYFFAFLRNNCRRAIMLMSIPHSNMMQVRMTSYV

SEQ ID NO: 14950 - DNA, 1159 bp, Zea mays subsp. mays
  misc_feature (1)..(1159): Ceres Seq. ID no. 13600661
  misc_feature (1)..(1159): Ortholog of  Ceres SEQ ID NO 12588845 as cited in SEQ ID NO 448
  misc_feature (1)..(1159): Ortholog of  Ceres SEQ ID NO 14315553 as cited in SEQ ID NO 60445
  misc_feature (1)..(1159): Ortholog of  Ceres SEQ ID NO 15224319 as cited in SEQ ID NO 66044
  misc_feature (1)..(1159): Ortholog of  Ceres SEQ ID NO 13598045 as cited in SEQ ID NO 66822
tcttcttgagaaacactccgctctctctttcctcctgcgattctccatctctttccctgctccgtctcgtcgttgtcttcccctttttttcctcagccacctctctccctcgctagagcaaaaaccttgccacgaatcgccgacactccaacccggaagaggcaacgaggtgactccgcgcctcggtcatgggtgacagccaatactccttctcgcttaccactttcagcccgtcgggaaagcttgtgcagatagagcacgcgctcacggctgtcggatccgggcagacctccctagggatcaaagctgccaacggtgtagtgattgccactgagaagaaactgccttctattttggtggatgaaacatctgtgcaaaagattcaggcactaacaccaaatattggagttgtctatagtgggatgggtccagattttcgtgttctggtgagaaaaagtcgaaagcaggcacagcagtattatcggttgtacaaggagcatatacctgtaacacagcttgtgcgagagactgctgctgtgatgcaggagttcacacagtcaggtggtgtaagaccatttggagtatcgctgttgattgctgggtatgatgacaatggcccacagttgtatcaggttgatccctcaggatcatacttctcctggaaggcatcagccatgggaaaaaatgtgtcaaatgcaaagacatttcttgaaaagagatacacagaggatatggagcttgatgatgccatccacactgcaattttgactttgaaagaaggatatgaggggcaaatttcctccaacaacattgaaatcggaattattcgagctgaccgtgagttcaaagttctaagcccatcagagatcaaggatttcttggaagaggtggagtaagttgtctgttgatgatttactgtttcaaacaagaatagcagcatcacttatgagcagccagcctgaagcttgtcttggttttatcactctgtaaactgatttgctccagcgacatgtcttggttttatcactctgtaaactgatttgctccagcgacatgtggttcttacatttgaaaccctcctgagcgcatactgtagacaaatgagatacgtaagatggatgttgtatttgacagtctctgcagtttgtttatgtgatcc

SEQ ID NO: 14951 - protein, 235 aa, Zea mays subsp. mays
  peptide (1)..(235): Ceres Seq. ID no. 13600662
MGDSQYSFSLTTFSPSGKLVQIEHALTAVGSGQTSLGIKAANGVVIATEKKLPSILVDETSVQKIQALTPNIGVVYSGMGPDFRVLVRKSRKQAQQYYRLYKEHIPVTQLVRETAAVMQEFTQSGGVRPFGVSLLIAGYDDNGPQLYQVDPSGSYFSWKASAMGKNVSNAKTFLEKRYTEDMELDDAIHTAILTLKEGYEGQISSNNIEIGIIRADREFKVLSPSEIKDFLEEVE

SEQ ID NO: 14952 - protein, 157 aa, Zea mays subsp. mays
  peptide (1)..(157): Ceres Seq. ID no. 13600663
MGPDFRVLVRKSRKQAQQYYRLYKEHIPVTQLVRETAAVMQEFTQSGGVRPFGVSLLIAGYDDNGPQLYQVDPSGSYFSWKASAMGKNVSNAKTFLEKRYTEDMELDDAIHTAILTLKEGYEGQISSNNIEIGIIRADREFKVLSPSEIKDFLEEVE

SEQ ID NO: 14953 - protein, 118 aa, Zea mays subsp. mays
  peptide (1)..(118): Ceres Seq. ID no. 13600664
MQEFTQSGGVRPFGVSLLIAGYDDNGPQLYQVDPSGSYFSWKASAMGKNVSNAKTFLEKRYTEDMELDDAIHTAILTLKEGYEGQISSNNIEIGIIRADREFKVLSPSEIKDFLEEVE

SEQ ID NO: 14954 - DNA, 916 bp, Zea mays subsp. mays; identical to SEQ ID NO: 5212
  misc_feature (1)..(916): Ceres Seq. ID no. 13625767
  misc_feature (1)..(916): Ortholog of  Ceres SEQ ID NO 12610334 as cited in SEQ ID NO 56235
  misc_feature (1)..(916): Ortholog of  Ceres SEQ ID NO 13654825 as cited in SEQ ID NO 62409

SEQ ID NO: 14955 - protein, 269 aa, Zea mays subsp. mays; identical to SEQ ID NO: 5213
  peptide (1)..(269): Ceres Seq. ID no. 13625768
  misc_feature (42)..(42): Xaa is any aa, unknown or other

SEQ ID NO: 14956 - protein, 183 aa, Zea mays subsp. mays; identical to SEQ ID NO: 5214
  peptide (1)..(183): Ceres Seq. ID no. 13625769

SEQ ID NO: 14957 - DNA, 846 bp, Zea mays subsp. mays
  misc_feature (1)..(846): Ceres Seq. ID no. 12634889
  misc_feature (1)..(846): Ortholog of  Ceres SEQ ID NO 13638927 as cited in SEQ ID NO 55786
attaaaaaccatatacgaggccacccagggtacggcggcgctcggttccgtggcggggagtgttttccaggcggcggcgcggtagcgtgaaaccgggcgaccgagcaagcgacggccatggcgttctggcagacgcgcgattttctcttctgtggcatatgcggcaccctcctcaccttcgactccgtccgctccgcctcctgccctctatgcggcttcaagcgcgatgccaaagaaattgaagggaaagaaatacagtacacgatgaccgccgaggatattcgaagagggttaaagacacaaacggaggacgttgttgggcaaagaccagtgacaaataaagcctgtccaaaatgcgaccatccaaaagctgaattttacaacatacaggttagcaactaatccttcagcattggatgaccaatccttccaggttttacgtatccaattattgctcttgacaccggaaattgcagatgcgttcagcagatgagggagagacgacgttctacatgtgtaaaggatgcggctgtaatttcaaagacgaatgaggagttatcctaccacttctacggatatatggcattggtgccgaagaaatttccagcgttgacagactagtactccctccgccctttttttatttatcatcgtctagttcaaaaatgaacggccgataaatattcgagaattgcaatctactccttgacattgttacattacatggatgcgcagatccatgcgttgtgcaaactttcttttgatggaacctgttttgtattttattcgagtgtgtagatgtctacttgcaacctttttacatttattccaaactataagacgttt

SEQ ID NO: 14958 - protein, 94 aa, Zea mays subsp. mays
  peptide (1)..(94): Ceres Seq. ID no. 12634890
MAFWQTRDFLFCGICGTLLTFDSVRSASCPLCGFKRDAKEIEGKEIQYTMTAEDIRRGLKTQTEDVVGQRPVTNKACPKCDHPKAEFYNIQVSN

SEQ ID NO: 14959 - DNA, 484 bp, Zea mays subsp. mays
  misc_feature (1)..(484): Ceres Seq. ID no. 4579105
  misc_feature (1)..(484): Ortholog of  Ceres SEQ ID NO 13581579 as cited in SEQ ID NO 58361
  misc_feature (1)..(484): Ortholog of  Ceres SEQ ID NO 13597870 as cited in SEQ ID NO 64982
  misc_feature (1)..(484): Ortholog of  Ceres SEQ ID NO 13595926 as cited in SEQ ID NO 67778
aagtaaataatgtgccctgccgttccccccacctccacccacctcaaccgcagggctgcgacgccgccgtcctgatcgcgtccaagaacaacgacgccgagaaggacgcgccggacaacgagtcgctcgccggcgacggcttcgacaccatcaaccgggtcaaggcggccgtcgagaagaggtgccccggcgtggtgtcctgcgccgacatcatcgcgctcgccgccagagacgtcgtctacctggcggatggcccctactggcgcgtcgagctcggccgtctggacgggctcgattccagggccagcgacgtcaaggggaagctgccggacccggacatgcacgtcaaggacctcacgccggtgttccagcggaacggcttcacggaggtggacatggtcgcgctctccggcgcgcacaccgtcggcttcgcgcactgcagctgcttcaccgacaggctctacagctacggcggcgcgcggac

SEQ ID NO: 14960 - protein, 160 aa, Zea mays subsp. mays
  peptide (1)..(160): Ceres Seq. ID no. 4579106
VNNVPCRSPHLHPPQPQGCDAAVLIASKNNDAEKDAPDNESLAGDGFDTINRVKAAVEKRCPGVVSCADIIALAARDVVYLADGPYWRVELGRLDGLDSRASDVKGKLPDPDMHVKDLTPVFQRNGFTEVDMVALSGAHTVGFAHCSCFTDRLYSYGGAR

SEQ ID NO: 14961 - DNA, 1071 bp, Zea mays subsp. mays
  misc_feature (1)..(1071): Ceres Seq. ID no. 13599122
  misc_feature (1)..(1071): Ortholog of  Ceres SEQ ID NO 12609335 as cited in SEQ ID NO 51835
  misc_feature (1)..(1071): Ortholog of  Ceres SEQ ID NO 12626248 as cited in SEQ ID NO 65768
ctaatcgaaaaaccgcaaggatccaccacaacagcgaaggagaaagcagaccaacctagccacccagggagaaagaggccaaaagggaggggagagtgtcgtcatggcttccattgtcgcttccaggagggccgttcctctagttcgcgctctggagaagctcatcgcagcgtcctccgctcccgggactggctccgccctcaggccggtggcagtcgccggcggcctccgcggctacaacaccggcgctccgctccgacgctacgagggggccgagtcggaagacgatagcgtccgcgagtacgatgggcggcacggcggccgggactacgctgtgcccagcctgttctcaggtagtcgtcatcttcgcttcatgccagacccatttgctttgctctctcaactctcaaatgagatggtggtgagactacatcgcttcgaaatggctgtgctgagtgctgacttcgtcttgttggtccctgtccagatattttccgtgatccgcttagtgcgccgcacagcattggccgcctgctgaaccttgtggacgacttggcggtggcggcgccaggtcgtgcggtgcgccgtggctggaacgcgaaggaggacgaggaggcgctgcacctgagggtggacatgccaggcctggggaaggagcacgtcaaggtgtgggcggagcagaacagcctggtgatcaagggcgagggcgagaaggaggatagcgaggacgaggccgccccgcctccgagatacagcggtcgcatcgagctcgcgccagaggtttacaggatggacaagatcaaggcggagatgaagaacggcgtgctcaaggtggtcgtgccgaaggtgaaggagcagcagcgcaaggacgtgttccaagtcaacgtcgagtagatgtttccaaatagaagcaagtgccggtacgggatggaggattggaggggcactgccaaactaggattcctctctctcaatctgatctggattctggaatcagatttctcttctttcatttttctcgtctatcttctatcagtatgaaataagcaacgtcgcttcagttttcgtgcc

SEQ ID NO: 14962 - protein, 144 aa, Zea mays subsp. mays
  peptide (1)..(144): Ceres Seq. ID no. 15222515
MASIVASRRAVPLVRALEKLIAASSAPGTGSALRPVAVAGGLRGYNTGAPLRRYEGAESEDDSVREYDGRHGGRDYAVPSLFSGSRHLRFMPDPFALLSQLSNEMVVRLHRFEMAVLSADFVLLVPVQIFSVIRLVRRTALAAC

SEQ ID NO: 14963 - protein, 96 aa, Zea mays subsp. mays
  peptide (1)..(96): Ceres Seq. ID no. 15222516
LIEKPQGSTTTAKEKADQPSHPGRKRPKGRGECRHGFHCRFQEGRSSSSRSGEAHRSVLRSRDWLRPQAGGSRRRPPRLQHRRSAPTLRGGRVGRR

SEQ ID NO: 14964 - protein, 85 aa, Zea mays subsp. mays
  peptide (1)..(85): Ceres Seq. ID no. 15222517
MPGLGKEHVKVWAEQNSLVIKGEGEKEDSEDEAAPPPRYSGRIELAPEVYRMDKIKAEMKNGVLKVVVPKVKEQQRKDVFQVNVE

SEQ ID NO: 14965 - DNA, 896 bp, Zea mays subsp. mays
  misc_feature (1)..(896): Ceres Seq. ID no. 12469177
  misc_feature (1)..(896): Ortholog of  Ceres SEQ ID NO 14305101 as cited in SEQ ID NO 0
agcgcgacgaagcggcgccgccagctccccaaaacctccccagctgccacctcctctgcctccctgcgtcccccgagcaaagcagaacaaggggggaaaaagttgatatacgcttgcagcgatggcctttgccgcccgcgccgcgctcgtgcgcgtcctccctccgcgaccatcgccgacctcccaaccgaagcagctcaagcaaggtctaggcggccgcggcgggtcctcgctcgccgttcgggcgaaggactccgatgacttcggggcccttctgtcggagaagctcgatgcgcaggcgcctgagaagcgggatgggcgggatggttttgggagggaggcgagtagcgtggaggaggagaaggaggtgcagggcgagccggcttcgtggggtgtgctcaaccagatcggcgtcgagttggactctgacaaatcatattctgctctcatatatggcacatctgctcttgttgcaatttggatatcatcaattgtggtttctgcacttgattcagtccctttggttcctcaagtgatggaagttgttggtcttggcttcncaatttggttcacatcgagatacctgatatttaaggagaaccgtgatgaacttttcacgagagtcagctccatcaagaagcaaattttggggtntcatgagaactgagcgtctctcttacgttctgttctgttaactggtactgtgttttattgaanatgtttttttttggaataaacagtacatttttttgtttttcgcctgcatttttactaatcgaaaggtaagtgcactgtactcttttcgttgattccaactaattttaggtgagtgtagggctgcgatgacctaaagtgcgactttctttgcatgctttgcggggcccgctgaggcggct

SEQ ID NO: 14966 - protein, 181 aa, Zea mays subsp. mays
  peptide (1)..(181): Ceres Seq. ID no. 12469178
  misc_feature (147)..(147): Xaa is any aa, unknown or other
  misc_feature (178)..(178): Xaa is any aa, unknown or other
MAFAARAALVRVLPPRPSPTSQPKQLKQGLGGRGGSSLAVRAKDSDDFGALLSEKLDAQAPEKRDGRDGFGREASSVEEEKEVQGEPASWGVLNQIGVELDSDKSYSALIYGTSALVAIWISSIVVSALDSVPLVPQVMEVVGLGFXIWFTSRYLIFKENRDELFTRVSSIKKQILGXHEN

SEQ ID NO: 14967 - protein, 92 aa, Zea mays subsp. mays
  peptide (1)..(92): Ceres Seq. ID no. 12469179
MTSGPFCRRSSMRRRLRSGMGGMVLGGRRVAWRRRRRCRASRLRGVCSTRSASSWTLTNHILLSYMAHLLLLQFGYHQLWFLHLIQSLWFLK

SEQ ID NO: 14968 - DNA, 828 bp, Zea mays subsp. mays
  misc_feature (1)..(828): Ceres Seq. ID no. 12455151
  misc_feature (1)..(828): Ortholog of  Ceres SEQ ID NO 15226209 as cited in SEQ ID NO 0
acacagacacagcgcggagccgccacttctcttctcagcgctcccaatctggcggcggcggcacgccggcacccacccgcagttgacatgattaagtcaagtatcgaagaagagcttgatagctacatatttgatggacaaggtcatgatgattctattgacacaagtgacttagaaaaatatttggcagatccaatactaaaggttggtaaaagtaatcaacacacttttgacatattagcatggtggaaagcacacaaagaagaatatcctgtcttgggccagcttgctcgtgatgtcttagctatgcaagtgtcaacagtagcttcagaatcttcttttagtgttggtggtcgtgtacttaatccatttcgtactcgccttgaccctaccatggtagaagcgcttgtctgcaccaaagattggatagctggagcaagaaaaggttccaaggctaagagtgttgctattcctaatatggtttgtgaaatggaggaacttgaggctcttgatagaaatctttcacttgaggatgaagacctagatgatgatcatgatgatggaccagaggcatcgttgtaagcttgttgatgaagacctagatgatgataatgcaacatgaatgctctgaatgttttcattgtacttgttgcgtaatgctttgtgatcttgcgaacttgggacttgtggacttgtggttgtgtactttgtgatctgtgtgatgaacttgttatattgtgaacttgtgatctgtgtgatccacttattatattgtgaacttgtgatcaacttgttatattgtgaacttgtgatctgtgtgatccactt

SEQ ID NO: 14969 - protein, 193 aa, Zea mays subsp. mays
  peptide (1)..(193): Ceres Seq. ID no. 12455152
TQTQRGAATSLLSAPNLAAAARRHPPAVDMIKSSIEEELDSYIFDGQGHDDSIDTSDLEKYLADPILKVGKSNQHTFDILAWWKAHKEEYPVLGQLARDVLAMQVSTVASESSFSVGGRVLNPFRTRLDPTMVEALVCTKDWIAGARKGSKAKSVAIPNMVCEMEELEALDRNLSLEDEDLDDDHDDGPEASL

SEQ ID NO: 14970 - protein, 164 aa, Zea mays subsp. mays
  peptide (1)..(164): Ceres Seq. ID no. 12455153
MIKSSIEEELDSYIFDGQGHDDSIDTSDLEKYLADPILKVGKSNQHTFDILAWWKAHKEEYPVLGQLARDVLAMQVSTVASESSFSVGGRVLNPFRTRLDPTMVEALVCTKDWIAGARKGSKAKSVAIPNMVCEMEELEALDRNLSLEDEDLDDDHDDGPEASL

SEQ ID NO: 14971 - DNA, 489 bp, Zea mays subsp. mays
  misc_feature (1)..(489): Ceres Seq. ID no. 13622994
  misc_feature (1)..(489): Ortholog of  Ceres SEQ ID NO 15170447 as cited in SEQ ID NO 52849
  misc_feature (1)..(489): Ortholog of  Ceres SEQ ID NO 13589042 as cited in SEQ ID NO 60626
  misc_feature (1)..(489): Ortholog of  Ceres SEQ ID NO 14302887 as cited in SEQ ID NO 66146
attccctactaactgctaactggcagcagcttctggatcgggccatcggggtcggtggatctcactgttttcttttcctgctgcttgctgcatttttcgcagggtgtgggagctgagttgggaggaggactgctgctgcagccatgaaggccctcattctcgtcggaggcttcggcacccgcctgcgcccgctcacgctcagcgtccccaagccgctcgtggatttcggcaacaagcccatgatcctgcaccagatcgaggctctgaaggaagttggtgttacagaggttgtcctggccatcaattaccagcctgaggtcatgctcaactttctcaaggacttcgagagcaagcttggcatcaagatcacctgctcgcaggagacggagcccctcgggaccgcaggcccgctggccctggcccgcgacaagctcgccgacggatccggcgaccctttcttcgtgctcaacagcgacgtgatcagcgagt

SEQ ID NO: 14972 - protein, 115 aa, Zea mays subsp. mays
  peptide (1)..(115): Ceres Seq. ID no. 13622995
MKALILVGGFGTRLRPLTLSVPKPLVDFGNKPMILHQIEALKEVGVTEVVLAINYQPEVMLNFLKDFESKLGIKITCSQETEPLGTAGPLALARDKLADGSGDPFFVLNSDVISE

SEQ ID NO: 14973 - protein, 83 aa, Zea mays subsp. mays
  peptide (1)..(83): Ceres Seq. ID no. 13622996
MILHQIEALKEVGVTEVVLAINYQPEVMLNFLKDFESKLGIKITCSQETEPLGTAGPLALARDKLADGSGDPFFVLNSDVISE

SEQ ID NO: 14974 - DNA, 772 bp, Zea mays subsp. mays; identical to SEQ ID NO: 11644
  misc_feature (1)..(772): Ceres Seq. ID no. 12379466
  misc_feature (1)..(772): Ortholog of  Ceres SEQ ID NO 14302679 as cited in SEQ ID NO 0

SEQ ID NO: 14975 - protein, 185 aa, Zea mays subsp. mays; identical to SEQ ID NO: 11645
  peptide (1)..(185): Ceres Seq. ID no. 12379467

SEQ ID NO: 14976 - protein, 121 aa, Zea mays subsp. mays; identical to SEQ ID NO: 11646
  peptide (1)..(121): Ceres Seq. ID no. 12379468

SEQ ID NO: 14977 - DNA, 845 bp, Zea mays subsp. mays
  misc_feature (1)..(845): Ceres Seq. ID no. 12469751
  misc_feature (1)..(845): Ortholog of  Ceres SEQ ID NO 13648575 as cited in SEQ ID NO 20407
cattatgaatattgtagggagggaaggttcgtgatgcactttttcagattcttgaaaacgaggatgatgtaaccataaaacatggaacacaatcgagggagagtcggcgtgaagctacacaaggaatgcactcatctaaattttgcctgcatcctgccggagatactccctcagcatgcagattatttgatgcacttgtcagtctgtgtgttcctgttatagccagtgattacattgaacttccattcgaagatattatagactacaataaaatatcaatatttgttgggacaagcaaagcagtacagcctggatacttaacttcaactcttcgaagaatcagttcagagaggattctggagtaccagagggaaataaaaaaggtcagacattactttgagtacgaggatccgaatggaccagtgaatgagatttggcgccaagtatcccttaaagcaccactgataaagttgttgactaaccgcgacaaacggttgcttgaaagaggcaccaatggaacagattgttcgtgcatctgctctacaactccaactgacataactgcggccagttaaacaagatggaactcatcggcctacaagctctgtgcctatttcctgtgatcacattgcctgaattttttaggttgtacagttccatgtaaaacgagattaccagccactatttttgaacagtaaatttactaattaccacaatccttgagtttttactagatttgtataggaggagcggatagtcaggaaccttacagtgccctttttgtattgtaagttacattagctattttttgttgtcggcagttcgctgccctagtttttcgacct

SEQ ID NO: 14978 - protein, 149 aa, Zea mays subsp. mays
  peptide (1)..(149): Ceres Seq. ID no. 12469752
MHSSKFCLHPAGDTPSACRLFDALVSLCVPVIASDYIELPFEDIIDYNKISIFVGTSKAVQPGYLTSTLRRISSERILEYQREIKKVRHYFEYEDPNGPVNEIWRQVSLKAPLIKLLTNRDKRLLERGTNGTDCSCICSTTPTDITAAS

SEQ ID NO: 14979 - DNA, 927 bp, Zea mays subsp. mays
  misc_feature (1)..(927): Ceres Seq. ID no. 12469147
  misc_feature (1)..(927): Ortholog of  Ceres SEQ ID NO 14308455 as cited in SEQ ID NO 55108
  misc_feature (1)..(927): Ortholog of  Ceres SEQ ID NO 14316344 as cited in SEQ ID NO 60120
tttcggtgaatgccagtgcacaattctgtggtgttgctgagatgattggaccagtggactttgagaaaagtgtggattactggcagcaagataagtggactggtcaattccctgtgaagtggcacatagtgaaggatgttcccaataatcttttccgacatataattcttgaaaacaacgacaataaacctgtaacaaacagcagagatacacaggaggtgaaactagagcaaggaatggagatgctgaagatctttaagaaccatgatgatgatgcatcaatccttgacgactttgagttttacgaggagcgtgagaaagcgctgcaggaaaataaggcacgcctgcatcagcaacatctacccagttctattgttattgagcccaagaaacccttgactgcacccagtgacctcgtgggccatatcaccaagagttttgctgaggctgtgcggcttggtgaggccaagactgtaagccatttgactgagaaggtttctgggggtgatccgtctattcctgtgaagcatgttgaagttaagcagagtggtttatcttaggaactcttgatcgatgtgaatgaactgtaccaaaaattcacccatacgcttcctgatcaaaatgtcgggaatgcatatgcagatggatgatgatgaaacccaagacatcggcaaaagcatgcatgcacactagggtaggtntttgccaaccttggaagcatagtttcttgaatagtttctctctttttttcttctttcttcctagtattttctccccttctcttcgcatcatatgatgattccttagtgtctagcctcaaggagagttgctgtttttgtgtaagcctctgtaagtttcctgttccatcacatatgagtaaggcctttttgtttctttttatttaagtaaaagatccatcttttatgt

SEQ ID NO: 14980 - protein, 185 aa, Zea mays subsp. mays
  peptide (1)..(185): Ceres Seq. ID no. 12469148
SVNASAQFCGVAEMIGPVDFEKSVDYWQQDKWTGQFPVKWHIVKDVPNNLFRHIILENNDNKPVTNSRDTQEVKLEQGMEMLKIFKNHDDDASILDDFEFYEEREKALQENKARLHQQHLPSSIVIEPKKPLTAPSDLVGHITKSFAEAVRLGEAKTVSHLTEKVSGGDPSIPVKHVEVKQSGLS

SEQ ID NO: 14981 - protein, 172 aa, Zea mays subsp. mays
  peptide (1)..(172): Ceres Seq. ID no. 12469149
MIGPVDFEKSVDYWQQDKWTGQFPVKWHIVKDVPNNLFRHIILENNDNKPVTNSRDTQEVKLEQGMEMLKIFKNHDDDASILDDFEFYEEREKALQENKARLHQQHLPSSIVIEPKKPLTAPSDLVGHITKSFAEAVRLGEAKTVSHLTEKVSGGDPSIPVKHVEVKQSGLS

SEQ ID NO: 14982 - protein, 107 aa, Zea mays subsp. mays
  peptide (1)..(107): Ceres Seq. ID no. 12469150
MEMLKIFKNHDDDASILDDFEFYEEREKALQENKARLHQQHLPSSIVIEPKKPLTAPSDLVGHITKSFAEAVRLGEAKTVSHLTEKVSGGDPSIPVKHVEVKQSGLS

SEQ ID NO: 14983 - DNA, 1493 bp, Zea mays subsp. mays; identical to SEQ ID NO: 3626
  misc_feature (1)..(1493): Ceres Seq. ID no. 12469735
  misc_feature (1)..(1493): Ortholog of  Ceres SEQ ID NO 14313159 as cited in SEQ ID NO 54676
  misc_feature (1)..(1493): Ortholog of  Ceres SEQ ID NO 13598547 as cited in SEQ ID NO 65200
  misc_feature (1)..(1493): Ortholog of  Ceres SEQ ID NO 12617920 as cited in SEQ ID NO 65480

SEQ ID NO: 14984 - protein, 362 aa, Zea mays subsp. mays; identical to SEQ ID NO: 3627
  peptide (1)..(362): Ceres Seq. ID no. 12469736

SEQ ID NO: 14985 - protein, 353 aa, Zea mays subsp. mays; identical to SEQ ID NO: 3628
  peptide (1)..(353): Ceres Seq. ID no. 12469737

SEQ ID NO: 14986 - protein, 259 aa, Zea mays subsp. mays; identical to SEQ ID NO: 3629
  peptide (1)..(259): Ceres Seq. ID no. 12469738

SEQ ID NO: 14987 - DNA, 917 bp, Zea mays subsp. mays; identical to SEQ ID NO: 8100
  misc_feature (1)..(917): Ceres Seq. ID no. 13493285
  misc_feature (1)..(917): Ortholog of  Ceres SEQ ID NO 13582184 as cited in SEQ ID NO 56002
  misc_feature (1)..(917): Ortholog of  Ceres SEQ ID NO 15227042 as cited in SEQ ID NO 0

SEQ ID NO: 14988 - protein, 228 aa, Zea mays subsp. mays; identical to SEQ ID NO: 8101
  peptide (1)..(228): Ceres Seq. ID no. 13493286

SEQ ID NO: 14989 - protein, 187 aa, Zea mays subsp. mays; identical to SEQ ID NO: 8102
  peptide (1)..(187): Ceres Seq. ID no. 13493287

SEQ ID NO: 14990 - protein, 134 aa, Zea mays subsp. mays; identical to SEQ ID NO: 8103
  peptide (1)..(134): Ceres Seq. ID no. 13493288

SEQ ID NO: 14991 - DNA, 819 bp, Zea mays subsp. mays
  misc_feature (1)..(819): Ceres Seq. ID no. 12484054
  misc_feature (1)..(819): Ortholog of  Ceres SEQ ID NO 15174289 as cited in SEQ ID NO 1129
  misc_feature (1)..(819): Ortholog of  Ceres SEQ ID NO 13591179 as cited in SEQ ID NO 64412
atgattcatgaatcgctcgtgtgctcagccacgctcacgtctcccgggcacgtctgcggcagcaccactccacacccacactccacccatcggctgccatggcgaccagggcggcggcggcagccacgctcacggcggctacgtcctctcttcttaggcgctctacctcgctgcggccgcagggactccgggtcccccaccgcgtgcctccccaaaggtttgtgcgccatattgcttcatcatcaaacgaggaagctgctgccagagcagccgccgccactgctgacgccggaggaccaaccattttcgacaagatcattgcgaaggaaatcccttcgagcatcgtatatgaagatgaaaatgtgctggcatttagagatattaatccacaagcccctgtgcacgttctagtcatcccaaaagcgagagatgggctaaccggattagacaaggctgagccaaggcatacagaaatcctgggccggcttctttacgcagcgaaagtagtggcagagaaggaaggtgtagcgagtgggtaccgtgttgtcatcaacaatggagctgaaggatgccaatctgtctatcatctgcacctgcatgtacttggtggaaggcagatgaagtggccccctggttaaaattactaagggtgacatgtttgatttcttgtacccctctctctgtgagttgagtttgctgcttgtatgactgttgttgcaaagggagaaagagtggttggtgtactagtatctgcccctgtgatgatggcccctttgagcactcatctctggaattactgagcttatgcagcattttgct

SEQ ID NO: 14992 - protein, 179 aa, Zea mays subsp. mays
  peptide (1)..(179): Ceres Seq. ID no. 12484055
MATRAAAAATLTAATSSLLRRSTSLRPQGLRVPHRVPPQRFVRHIASSSNEEAAARAAAATADAGGPTIFDKIIAKEIPSSIVYEDENVLAFRDINPQAPVHVLVIPKARDGLTGLDKAEPRHTEILGRLLYAAKVVAEKEGVASGYRVVINNGAEGCQSVYHLHLHVLGGRQMKWPPG

SEQ ID NO: 14993 - protein, 136 aa, Zea mays subsp. mays
  peptide (1)..(136): Ceres Seq. ID no. 12484056
MIHESLVCSATLTSPGHVCGSTTPHPHSTHRLPWRPGRRRQPRSRRLRPLFLGALPRCGRRDSGSPTACLPKGLCAILLHHQTRKLLPEQPPPLLTPEDQPFSTRSLRRKSLRASYMKMKMCWHLEILIHKPLCTF

SEQ ID NO: 14994 - DNA, 489 bp, Zea mays subsp. mays
  misc_feature (1)..(489): Ceres Seq. ID no. 4578406
  misc_feature (1)..(489): Ortholog of  Ceres SEQ ID NO 13495070 as cited in SEQ ID NO 53216
  misc_feature (1)..(489): Ortholog of  Ceres SEQ ID NO 13656228 as cited in SEQ ID NO 65648
ctctttccattagccatcctagccttcgccccctcgacgagaagaaccacctcaaaaccgaacagccgcaaaagaaagctgctagctactctatacatgataactagaacaggaccgtgaagtaatatatatataatgacgaagtcaggggcgctacaacttgctcggagcaccggagggtcgcttagcaaggaccaagtcaaatccgccgttgatcagtatgtgaagtaccacgacctccacggaggcgaacaagaatcaagaaagtcaaattacgctgatttggcaaacaagtactatgatcttgtcactggcttctacgaatatggatggggcgactcattccattttgctggcggtcccatactcccatgcttgtatttcagatatccgggtgaaacttcccgtgaagccattaagcggcaccagcattttatggcactacaattggggctcaagaagggtatgaaggttctggacgtgggatgt

SEQ ID NO: 14995 - protein, 118 aa, Zea mays subsp. mays
  peptide (1)..(118): Ceres Seq. ID no. 4578407
MTKSGALQLARSTGGSLSKDQVKSAVDQYVKYHDLHGGEQESRKSNYADLANKYYDLVTGFYEYGWGDSFHFAGGPILPCLYFRYPGETSREAIKRHQHFMALQLGLKKGMKVLDVGC

SEQ ID NO: 14996 - DNA, 657 bp, Zea mays subsp. mays
  misc_feature (1)..(657): Ceres Seq. ID no. 15170059
  misc_feature (1)..(657): Ortholog of  Ceres SEQ ID NO 15173178 as cited in SEQ ID NO 64574
aaaaaaccctaatcgcatctgcttccagagccccccgccgccgctgcgccctcctctcggtcctgccgtccgtcgaggtaaaaggacagcatggtgagggtcagcgtgctcaatgatgctctcaagtccatgtacaatgctgaaaagatagggaaacgtcaggtcatgatcaggccgtcatccaaggtgatcatcaagttcctgacggtcatgcagcgccatggctacattggcgagttcgagtacgtggatgaccacagagctgggaagatcgtggtggagctgaatggaagactgaataaatgtggtgttattagcccacgttttgatgtaggtgttaaggagatcgagggatggacggcgaggcttcttccatctcgccagtttggctacatcgtcctaacaacttctgctggaattatggaccatgaggaggcccgccgtaagaatgttggtggcaaggttctaggtttcttttattgaaaatgtgtttttttgagccacagatgcgtccaagaactcgtctgatgttttgaggtttgttaagactgggtgtccgagcctttgtggtttgttaagacagcgatgtgtcatgtatttcagaaattgggatttttatgagatgtacctgcgagagcncctgtctgtttcgatttt

SEQ ID NO: 14997 - protein, 130 aa, Zea mays subsp. mays
  peptide (1)..(130): Ceres Seq. ID no. 15170060
MVRVSVLNDALKSMYNAEKIGKRQVMIRPSSKVIIKFLTVMQRHGYIGEFEYVDDHRAGKIVVELNGRLNKCGVISPRFDVGVKEIEGWTARLLPSRQFGYIVLTTSAGIMDHEEARRKNVGGKVLGFFY

SEQ ID NO: 14998 - protein, 117 aa, Zea mays subsp. mays
  peptide (1)..(117): Ceres Seq. ID no. 15170061
MYNAEKIGKRQVMIRPSSKVIIKFLTVMQRHGYIGEFEYVDDHRAGKIVVELNGRLNKCGVISPRFDVGVKEIEGWTARLLPSRQFGYIVLTTSAGIMDHEEARRKNVGGKVLGFFY

SEQ ID NO: 14999 - protein, 105 aa, Zea mays subsp. mays
  peptide (1)..(105): Ceres Seq. ID no. 15170062
MIRPSSKVIIKFLTVMQRHGYIGEFEYVDDHRAGKIVVELNGRLNKCGVISPRFDVGVKEIEGWTARLLPSRQFGYIVLTTSAGIMDHEEARRKNVGGKVLGFFY

SEQ ID NO: 15000 - DNA, 959 bp, Zea mays subsp. mays
  misc_feature (1)..(959): Ceres Seq. ID no. 13502430
  misc_feature (1)..(959): Ortholog of  Ceres SEQ ID NO 14307863 as cited in SEQ ID NO 20504
gagcacactgatgttgctgtcctgctcgacaatgaggccatctatgacatctgccgccgctcccttgacattgagcgcccaacctacaccaacctgaacaggcttgtctcccaggtcatctcatccctgacggcttccctgaggttcgatggtgctctgaacgttgatgtgaacgagttccagaccaacctggtgccctacccgaggatccacttcatgctttcgtcctacgctccagtcatttctgctgagaaggcctaccacgagcagctgtccgtggccgaaatcaccaacagcgccttcgagccatcctccatgatggccaagtgcgacccccgccatggcaagtacatggcatgctgcctcatgtaccgtggtgatgtggttcccaaggacgtgaacgctgctgtggccacaatcaagaccaagcgcaccatccagttcgtggactggtgcccgactggcttcaagtgcggaatcaactaccagcctcccagcgtcgtccccggcggtgacctggccaaggtgcagcgtgccgtgtgcatgatctccaactccaccagtgttgtggaggtcttctcccgcattgaccacaagttcgacctcatgtacgccaagcgcgccttcgtgcactggtacgtcggtgagggtatggaggagggcgagttctccgaggctcgtgaggatctgcgtgcgctcgagaaggactacgaggaggtcggtgctgagtttgacgagggtgaggacggcgacgagggtgacgagtactagacgctctactggcgcggcgtcgtcgggcttgtgtgccactgctatcctgtgatctgccctgagtggctcctatcgtgttatgtttctgtcggttcttatctatctgtcgttgtgtggtttacaacttacgttgtaagactttattcccccgctttgctactgggttattaagtttggcgttattgttt

SEQ ID NO: 15001 - protein, 256 aa, Zea mays subsp. mays
  peptide (1)..(256): Ceres Seq. ID no. 13502431
EHTDVAVLLDNEAIYDICRRSLDIERPTYTNLNRLVSQVISSLTASLRFDGALNVDVNEFQTNLVPYPRIHFMLSSYAPVISAEKAYHEQLSVAEITNSAFEPSSMMAKCDPRHGKYMACCLMYRGDVVPKDVNAAVATIKTKRTIQFVDWCPTGFKCGINYQPPSVVPGGDLAKVQRAVCMISNSTSVVEVFSRIDHKFDLMYAKRAFVHWYVGEGMEEGEFSEAREDLRALEKDYEEVGAEFDEGEDGDEGDEY

SEQ ID NO: 15002 - protein, 184 aa, Zea mays subsp. mays
  peptide (1)..(184): Ceres Seq. ID no. 13502432
MLSSYAPVISAEKAYHEQLSVAEITNSAFEPSSMMAKCDPRHGKYMACCLMYRGDVVPKDVNAAVATIKTKRTIQFVDWCPTGFKCGINYQPPSVVPGGDLAKVQRAVCMISNSTSVVEVFSRIDHKFDLMYAKRAFVHWYVGEGMEEGEFSEAREDLRALEKDYEEVGAEFDEGEDGDEGDEY

SEQ ID NO: 15003 - protein, 151 aa, Zea mays subsp. mays
  peptide (1)..(151): Ceres Seq. ID no. 13502433
MMAKCDPRHGKYMACCLMYRGDVVPKDVNAAVATIKTKRTIQFVDWCPTGFKCGINYQPPSVVPGGDLAKVQRAVCMISNSTSVVEVFSRIDHKFDLMYAKRAFVHWYVGEGMEEGEFSEAREDLRALEKDYEEVGAEFDEGEDGDEGDEY

SEQ ID NO: 15004 - DNA, 1619 bp, Zea mays subsp. mays
  misc_feature (1)..(1619): Ceres Seq. ID no. 13587844
  misc_feature (1)..(1619): Ortholog of  Ceres SEQ ID NO 13647121 as cited in SEQ ID NO 151
  misc_feature (1)..(1619): Ortholog of  Ceres SEQ ID NO 15176411 as cited in SEQ ID NO 54468
  misc_feature (1)..(1619): Ortholog of  Ceres SEQ ID NO 14307131 as cited in SEQ ID NO 59707
attcgcagccctacccgcgccgccgcaccaggacccgccgcgccggcccagcagcgcgcggttttgcgggtggcgtcgtccaggacctcctccgcccgcccccgaagggccgccgccgccgtggccgcggccgcaatgcagccggccaaggcggtcgccgcggaggcctcccccgccgcggtggagatggggaacggcgccgcggcgccggggctgcagaggcccgacgccatgggcaggttcgggaggttcggcggcaagtacgtccccgagacgctcatgcacgcgctcaccgagctcgagagcgccttccacgcgctcgccaccgacgacgagttccagaaagaactggacggtattctcaaggactacgttggacgtgagagccccctatacttcgcggagcgcctaacggagcactacaagcgcgccgatggcacaggcccgctcatctacctcaagagggaggaccttaaccacacgggtgcccacaagatcaacaatgccgtggcgcaggccttgcttgccaagcgacttgggaagcagcgcatcattgccgagacaggggctggtcagcacggcgtcgccaccgccaccgtgtgccgccgtttcgggctgcagtgcatcatctacatgggcgcacaggatatggagaggcaggcgctcaatgttttccggatgaggcttcttggtgcagaggtcagggcggtacattctgggacagcaaccctgaaggatgcaacttcagaggctatccgtgactgggtcacaaatgtggagaccacacactatatcttgggctctgttgccggtccgcacccgtacccgatgatggtgagggagttccataaggttattggcaaggaaacccggaggcaggccatggacaagtggggtggcaagccggacgtattggttgcctgcgtcggcggcggatcaaacgccatgggcttattccatgagtttgttgaggatcaagatgtgaggctggttggactggaggcagctggccatggcgtagacaccgacaagcatgcggcgactttgacaaagggccaagtcggagttctccatggatccatgagctatttgctgcaggatgatgacggacaagttatcgaaccccactccatcagtgctgggctcgattaccctggcgttggacccgagcacagtttcttgaaggacattggacgtgccgaatacgatagtgtgactgaccaggaggcactggatgctttcaagcgcgtgtctcggttggagggcatcatccctgccctggagacctcccacgcgctggcctaccttgagaagctctgcccgacactggcggacggcgtgagggtggtggtgaactgcagcgggcgaggagacaaggacgtgcacaccgccagcaagtacctggacgtctaaaacaccagcgaggaggctggtttccatgtcaagttttggagggttcagcagtaattaatttagcgctgttctttttggataaaagcacaaataacctggaagctggtattgttgttgtagccggtagtgcccccctgtttttttattttacaagtaatctgaatggctttggagtgcataatcaataatcaaataaatacaaagct

SEQ ID NO: 15005 - protein, 470 aa, Zea mays subsp. mays
  peptide (1)..(470): Ceres Seq. ID no. 13587845
IRSPTRAAAPGPAAPAQQRAVLRVASSRTSSARPRRAAAAVAAAAMQPAKAVAAEASPAAVEMGNGAAAPGLQRPDAMGRFGRFGGKYVPETLMHALTELESAFHALATDDEFQKELDGILKDYVGRESPLYFAERLTEHYKRADGTGPLIYLKREDLNHTGAHKINNAVAQALLAKRLGKQRIIAETGAGQHGVATATVCRRFGLQCIIYMGAQDMERQALNVFRMRLLGAEVRAVHSGTATLKDATSEAIRDWVTNVETTHYILGSVAGPHPYPMMVREFHKVIGKETRRQAMDKWGGKPDVLVACVGGGSNAMGLFHEFVEDQDVRLVGLEAAGHGVDTDKHAATLTKGQVGVLHGSMSYLLQDDDGQVIEPHSISAGLDYPGVGPEHSFLKDIGRAEYDSVTDQEALDAFKRVSRLEGIIPALETSHALAYLEKLCPTLADGVRVVVNCSGRGDKDVHTASKYLDV

SEQ ID NO: 15006 - protein, 425 aa, Zea mays subsp. mays
  peptide (1)..(425): Ceres Seq. ID no. 13587846
MQPAKAVAAEASPAAVEMGNGAAAPGLQRPDAMGRFGRFGGKYVPETLMHALTELESAFHALATDDEFQKELDGILKDYVGRESPLYFAERLTEHYKRADGTGPLIYLKREDLNHTGAHKINNAVAQALLAKRLGKQRIIAETGAGQHGVATATVCRRFGLQCIIYMGAQDMERQALNVFRMRLLGAEVRAVHSGTATLKDATSEAIRDWVTNVETTHYILGSVAGPHPYPMMVREFHKVIGKETRRQAMDKWGGKPDVLVACVGGGSNAMGLFHEFVEDQDVRLVGLEAAGHGVDTDKHAATLTKGQVGVLHGSMSYLLQDDDGQVIEPHSISAGLDYPGVGPEHSFLKDIGRAEYDSVTDQEALDAFKRVSRLEGIIPALETSHALAYLEKLCPTLADGVRVVVNCSGRGDKDVHTASKYLDV

SEQ ID NO: 15007 - protein, 408 aa, Zea mays subsp. mays
  peptide (1)..(408): Ceres Seq. ID no. 13587847
MGNGAAAPGLQRPDAMGRFGRFGGKYVPETLMHALTELESAFHALATDDEFQKELDGILKDYVGRESPLYFAERLTEHYKRADGTGPLIYLKREDLNHTGAHKINNAVAQALLAKRLGKQRIIAETGAGQHGVATATVCRRFGLQCIIYMGAQDMERQALNVFRMRLLGAEVRAVHSGTATLKDATSEAIRDWVTNVETTHYILGSVAGPHPYPMMVREFHKVIGKETRRQAMDKWGGKPDVLVACVGGGSNAMGLFHEFVEDQDVRLVGLEAAGHGVDTDKHAATLTKGQVGVLHGSMSYLLQDDDGQVIEPHSISAGLDYPGVGPEHSFLKDIGRAEYDSVTDQEALDAFKRVSRLEGIIPALETSHALAYLEKLCPTLADGVRVVVNCSGRGDKDVHTASKYLDV

SEQ ID NO: 15008 - DNA, 986 bp, Zea mays subsp. mays
  misc_feature (1)..(986): Ceres Seq. ID no. 15178973
  misc_feature (1)..(986): Ortholog of  Ceres SEQ ID NO 14309202 as cited in SEQ ID NO 0
gaaatccgcagattcccgtcgctacttcggccacatggctgcagcggcggcgtggaccggcgccgcatcccccaactcgctgctgctctcgcgctcgcctccccacgccgccgtgctcgcgccttcgccggggagctccatgcggaggcggctcctgctcggcgtcggcaccccggccgtggcggcgctggcggccgcggcgccgccagcggtgctgcaggacggggcggtcactgtgctcatcaccgccggcgcctactctcttgtgcgcgtcttcgacgagctcaccgagcggcggctcatcgaaaagagcttgagcaggaaggttgtgcacgtgctatccggcgtcctgttcatgtcatcttggcccctgttcagggaattgctgagaggtccactctattatgtcctggtgctgctgttcagcgttttagtcttctggcgtgagtcccccatcgggatcgtctccttgtcgatgatgagcggtggcgatggttttgctgacattgttgggaggaggtatggctcagcgaagctgccattcaatcggaagaagagctgggccgggagcatctcgatgttcatttctggtttcctgctgtccgcgatgatgatgctctacttctcaagcctgggttacattgatgttatctgggaagaggcacttggtaagctggcgcttgttgcactagcagcgacagtagtggagtgcgttcctgtgaccgaagttgtagatgacaacatatctgttcctttggccaccatgctggtagcttttctcttgtttagctccaaccgcacaatagttaattaaaatactactagtgcattatttaagacatgtgatgagttcttcagtgatgagttgtgcttacttttgcttcctatgtgatctctagtacttgatggcgacggcctaacatctcccagtttttggtgtctccttgccttggctgttttggtggaaaagtattgctagcttgtct

SEQ ID NO: 15009 - protein, 270 aa, Zea mays subsp. mays
  peptide (1)..(270): Ceres Seq. ID no. 15178974
KSADSRRYFGHMAAAAAWTGAASPNSLLLSRSPPHAAVLAPSPGSSMRRRLLLGVGTPAVAALAAAAPPAVLQDGAVTVLITAGAYSLVRVFDELTERRLIEKSLSRKVVHVLSGVLFMSSWPLFRELLRGPLYYVLVLLFSVLVFWRESPIGIVSLSMMSGGDGFADIVGRRYGSAKLPFNRKKSWAGSISMFISGFLLSAMMMLYFSSLGYIDVIWEEALGKLALVALAATVVECVPVTEVVDDNISVPLATMLVAFLLFSSNRTIVN

SEQ ID NO: 15010 - protein, 259 aa, Zea mays subsp. mays
  peptide (1)..(259): Ceres Seq. ID no. 15178975
MAAAAAWTGAASPNSLLLSRSPPHAAVLAPSPGSSMRRRLLLGVGTPAVAALAAAAPPAVLQDGAVTVLITAGAYSLVRVFDELTERRLIEKSLSRKVVHVLSGVLFMSSWPLFRELLRGPLYYVLVLLFSVLVFWRESPIGIVSLSMMSGGDGFADIVGRRYGSAKLPFNRKKSWAGSISMFISGFLLSAMMMLYFSSLGYIDVIWEEALGKLALVALAATVVECVPVTEVVDDNISVPLATMLVAFLLFSSNRTIVN

SEQ ID NO: 15011 - protein, 224 aa, Zea mays subsp. mays
  peptide (1)..(224): Ceres Seq. ID no. 15178976
MRRRLLLGVGTPAVAALAAAAPPAVLQDGAVTVLITAGAYSLVRVFDELTERRLIEKSLSRKVVHVLSGVLFMSSWPLFRELLRGPLYYVLVLLFSVLVFWRESPIGIVSLSMMSGGDGFADIVGRRYGSAKLPFNRKKSWAGSISMFISGFLLSAMMMLYFSSLGYIDVIWEEALGKLALVALAATVVECVPVTEVVDDNISVPLATMLVAFLLFSSNRTIVN

SEQ ID NO: 15012 - DNA, 1140 bp, Zea mays subsp. mays
  misc_feature (1)..(1140): Ceres Seq. ID no. 13496508
  misc_feature (1)..(1140): Ortholog of  Ceres SEQ ID NO 15174082 as cited in SEQ ID NO 61896
  misc_feature (1)..(1140): Ortholog of  Ceres SEQ ID NO 13655598 as cited in SEQ ID NO 64077
  misc_feature (1)..(1140): Ortholog of  Ceres SEQ ID NO 13624271 as cited in SEQ ID NO 0
  misc_feature (1)..(1140): Ortholog of  Ceres SEQ ID NO 15179351 as cited in SEQ ID NO 0
  misc_feature (1)..(1140): Ortholog of  Ceres SEQ ID NO 15180408 as cited in SEQ ID NO 0
atataccacctccatggcacatctcttcctcaccaccgcatcccacaccccccgagctcagcttagctccagctccaatcacagtcgtgaccagagcgcgagagctagctagagggccgtgaaaatgccgatcaataggatcgccctggggagccaccaggaggtgtaccacccgggcgccctcaaggcggcgttcgctgagttcatctccaccctcatcttcgtcttcgccggccagggctccggcatggccttcagcaagctgaccggcggcggcccgacgaccccggcgggcctgatcgcggcggcggtggcgcacgcgttcgcgctgttcgtggcggtgtctgtgggcgcgaacatctccggcgggcacgtgaaccctgccgtgaccttcggcgccttcgtgggcggcaacatcaccctgttccgggggctcctgtactgggtggcgcagctgctggggtccaccgtggcgtgcttcctgctccgcttctcgacgggcgggcaggccacgggcaccttcgggctgacgggcgtgtcggtgtgggaggcgctggtgctggagatcgtgatgaccttcgggctggtgtacacggtgtacgccacggcggtggacccgaagaagggcagcctgggcaccatcgcccccattgccatcggcttcatcgtgggggccaacatcctggtgggcggcgccttcgacggcgcgtccatgaaccccgccgtgtccttcggccccgccctcgtcagctgggagtggggctaccagtgggtgtactgggtcgggcccctcatcggcggcggcctcgccggcgtcatctacgagctgctcttcatctcccacacccacgagcagctcccctccaccgactactaaaagccgaagccgaccgacctaggggtgcgcagcgcagctagcgcatccagctctctctccccgctcgccgccgtttagtttctctcgtgcacgtgcatgcatcgtcgactgtctcaggccgccgctgcgccggcgccgctcgcatcgtttgcttccttggaccagcagtcgtcgccgtcaggctgaactgcttgtaaccgtgaattccggacccgtttgcttctgtaagatttgtgcatttgcctgagtacacctcgatctgc

SEQ ID NO: 15013 - protein, 250 aa, Zea mays subsp. mays
  peptide (1)..(250): Ceres Seq. ID no. 13496509
MPINRIALGSHQEVYHPGALKAAFAEFISTLIFVFAGQGSGMAFSKLTGGGPTTPAGLIAAAVAHAFALFVAVSVGANISGGHVNPAVTFGAFVGGNITLFRGLLYWVAQLLGSTVACFLLRFSTGGQATGTFGLTGVSVWEALVLEIVMTFGLVYTVYATAVDPKKGSLGTIAPIAIGFIVGANILVGGAFDGASMNPAVSFGPALVSWEWGYQWVYWVGPLIGGGLAGVIYELLFISHTHEQLPSTDY

SEQ ID NO: 15014 - protein, 209 aa, Zea mays subsp. mays
  peptide (1)..(209): Ceres Seq. ID no. 13496510
MAFSKLTGGGPTTPAGLIAAAVAHAFALFVAVSVGANISGGHVNPAVTFGAFVGGNITLFRGLLYWVAQLLGSTVACFLLRFSTGGQATGTFGLTGVSVWEALVLEIVMTFGLVYTVYATAVDPKKGSLGTIAPIAIGFIVGANILVGGAFDGASMNPAVSFGPALVSWEWGYQWVYWVGPLIGGGLAGVIYELLFISHTHEQLPSTDY

SEQ ID NO: 15015 - DNA, 1863 bp, Zea mays subsp. mays; identical to SEQ ID NO: 14914
  misc_feature (1)..(1863): Ceres Seq. ID no. 13635478
  misc_feature (1)..(1863): Ortholog of  Ceres SEQ ID NO 14308221 as cited in SEQ ID NO 60363

SEQ ID NO: 15016 - protein, 522 aa, Zea mays subsp. mays; identical to SEQ ID NO: 14915
  peptide (1)..(522): Ceres Seq. ID no. 13635479

SEQ ID NO: 15017 - protein, 496 aa, Zea mays subsp. mays; identical to SEQ ID NO: 14916
  peptide (1)..(496): Ceres Seq. ID no. 13635480

SEQ ID NO: 15018 - protein, 375 aa, Zea mays subsp. mays; identical to SEQ ID NO: 14917
  peptide (1)..(375): Ceres Seq. ID no. 13635481

SEQ ID NO: 15019 - DNA, 549 bp, Zea mays subsp. mays
  misc_feature (1)..(549): Ceres Seq. ID no. 13573207
  misc_feature (1)..(549): Ortholog of  Ceres SEQ ID NO 13624271 as cited in SEQ ID NO 0
accaccgcatcccacaacccccgagctcagcttagctccactccagctccaatcgcagtcgtgaccagagcgcgagagctagctagagggccgtgaaaatgccgatcaataggatcgccctggggagccaccaggaggtgtaccacccgggcgccctcaaggcggcgttcgctgagttcatctccaccctcatcttcgtcttcgccggccagggctccggcatggccttcagtgagtcctccgctgtccgctcctacccatgcatgcaacacaggctcgatagcctgtacacggcacgccccaccaacagcttcacgacttcttctaagctgttctttaaacatcttgtttaaaacaggctctagtatctctttgagctcagcttggtctgtcatgctctagcctctagcagtagcacaaggtcatggccggctcttttgagttcgacaccgaatgactgaaacgaaggggcagaaaaaaaagaatgtccttttcgtcctactagctagtaccaggctttcggtaggtatttctttaatacaaggccag

SEQ ID NO: 15020 - protein, 84 aa, Zea mays subsp. mays
  peptide (1)..(84): Ceres Seq. ID no. 13573208
MPINRIALGSHQEVYHPGALKAAFAEFISTLIFVFAGQGSGMAFSESSAVRSYPCMQHRLDSLYTARPTNSFTTSSKLFFKHLV

SEQ ID NO: 15021 - protein, 43 aa, Zea mays subsp. mays
  peptide (1)..(43): Ceres Seq. ID no. 13573209
MAFSESSAVRSYPCMQHRLDSLYTARPTNSFTTSSKLFFKHLV

SEQ ID NO: 15022 - DNA, 676 bp, Zea mays subsp. mays
  misc_feature (1)..(676): Ceres Seq. ID no. 12635492
  misc_feature (1)..(676): Ortholog of  Ceres SEQ ID NO 13659044 as cited in SEQ ID NO 66526
tttttcaaatggcctccgccgtcgtctccgctgcgttgcgactcccgctcgctacccgccgattctccaactcctcgccgcggattagcttgcaacattccacgatctggattcgtcatctccgtagcatcacaacagcttcctccatgagccaactaaccagcgaaaccgatgcctcccgtactaacgacgagaactcggctgagaaaccagacgacgtaccagacgacgtcgtggttcaatacgtggtgcttagacgagatctgatcgattcgtggccactcgggagcgtcgtaacccagggatgccacgcgtcggttgcggcgatatggtcgttcaaagacgatcccgttacgcttcagtactgtgatccacagcacattgactctatgcacaaggtcactctggaagttaaaggagaaactcagatgttgaatttgtcagagaagttgaagtcaggaggaatctctcataaggtgtggatggagcagccggagaatattccgacttgtattgctacaaagccttatctcaaatctcaagtctctcctttcttcaagaagctcaaactttgcaagtgattcttctccattttatattaaaaaatctcatttataaagggacactcttttgaatgttaagtttttgcatatagagtaaagaaaagaagcagatg

SEQ ID NO: 15023 - protein, 192 aa, Zea mays subsp. mays
  peptide (1)..(192): Ceres Seq. ID no. 12635493
FQMASAVVSAALRLPLATRRFSNSSPRISLQHSTIWIRHLRSITTASSMSQLTSETDASRTNDENSAEKPDDVPDDVVVQYVVLRRDLIDSWPLGSVVTQGCHASVAAIWSFKDDPVTLQYCDPQHIDSMHKVTLEVKGETQMLNLSEKLKSGGISHKVWMEQPENIPTCIATKPYLKSQVSPFFKKLKLCK

SEQ ID NO: 15024 - protein, 190 aa, Zea mays subsp. mays
  peptide (1)..(190): Ceres Seq. ID no. 12635494
MASAVVSAALRLPLATRRFSNSSPRISLQHSTIWIRHLRSITTASSMSQLTSETDASRTNDENSAEKPDDVPDDVVVQYVVLRRDLIDSWPLGSVVTQGCHASVAAIWSFKDDPVTLQYCDPQHIDSMHKVTLEVKGETQMLNLSEKLKSGGISHKVWMEQPENIPTCIATKPYLKSQVSPFFKKLKLCK

SEQ ID NO: 15025 - protein, 144 aa, Zea mays subsp. mays
  peptide (1)..(144): Ceres Seq. ID no. 12635495
MSQLTSETDASRTNDENSAEKPDDVPDDVVVQYVVLRRDLIDSWPLGSVVTQGCHASVAAIWSFKDDPVTLQYCDPQHIDSMHKVTLEVKGETQMLNLSEKLKSGGISHKVWMEQPENIPTCIATKPYLKSQVSPFFKKLKLCK

SEQ ID NO: 15026 - DNA, 683 bp, Zea mays subsp. mays
  misc_feature (1)..(683): Ceres Seq. ID no. 13599266
  misc_feature (1)..(683): Ortholog of  Ceres SEQ ID NO 13660598 as cited in SEQ ID NO 67591
agtttatctctctctctgttgcaatgtcgaagagcggaagatattgcttaggatcaatggaagacatccgagcagtattccagcgcttcgacaaaaacggagacgggaaaatctccatcgacgagctcaaagacgtgatcggagctctcagtcccacggcgtcgccggaagaaacgacgttgatgatgaaagagttcgatctcgacggtaacggatacatcgacatggacgagttcgttgctctgttccaaaccgaagacggtggcgatattcgagatctgaaggaagcgtttgatctgtacgatttggatggaaacggacggatctctgtgaacgagcttcactcggtgatgaagaatctcggcgagaagtgttcggttgaggattgcaagaggatcattagcaaagttgatgctgacggtgacggttgtgttaactttgaagagtttaagaagatgatgatgaacggcagagctactgcttgacttaacggcgaggaatcgtttccttttttttttttttgtatatattcaatttttagttttaggttttatcgattaaactggattaatctttgtttttcctttggttttttaatcttatggattaattagggatttttatttcttaattgtaaggtttaatcgatttttttattttaataattatttattagtatggtt

SEQ ID NO: 15027 - protein, 160 aa, Zea mays subsp. mays
  peptide (1)..(160): Ceres Seq. ID no. 13599267
FISLSVAMSKSGRYCLGSMEDIRAVFQRFDKNGDGKISIDELKDVIGALSPTASPEETTLMMKEFDLDGNGYIDMDEFVALFQTEDGGDIRDLKEAFDLYDLDGNGRISVNELHSVMKNLGEKCSVEDCKRIISKVDADGDGCVNFEEFKKMMMNGRATA

SEQ ID NO: 15028 - protein, 153 aa, Zea mays subsp. mays
  peptide (1)..(153): Ceres Seq. ID no. 13599268
MSKSGRYCLGSMEDIRAVFQRFDKNGDGKISIDELKDVIGALSPTASPEETTLMMKEFDLDGNGYIDMDEFVALFQTEDGGDIRDLKEAFDLYDLDGNGRISVNELHSVMKNLGEKCSVEDCKRIISKVDADGDGCVNFEEFKKMMMNGRATA

SEQ ID NO: 15029 - protein, 142 aa, Zea mays subsp. mays
  peptide (1)..(142): Ceres Seq. ID no. 13599269
MEDIRAVFQRFDKNGDGKISIDELKDVIGALSPTASPEETTLMMKEFDLDGNGYIDMDEFVALFQTEDGGDIRDLKEAFDLYDLDGNGRISVNELHSVMKNLGEKCSVEDCKRIISKVDADGDGCVNFEEFKKMMMNGRATA

SEQ ID NO: 15030 - DNA, 1059 bp, Zea mays subsp. mays
  misc_feature (1)..(1059): Ceres Seq. ID no. 13623013
  misc_feature (1)..(1059): Ortholog of  Ceres SEQ ID NO 12611884 as cited in SEQ ID NO 51018
  misc_feature (1)..(1059): Ortholog of  Ceres SEQ ID NO 15177083 as cited in SEQ ID NO 51917
  misc_feature (1)..(1059): Ortholog of  Ceres SEQ ID NO 12609093 as cited in SEQ ID NO 52008
  misc_feature (1)..(1059): Ortholog of  Ceres SEQ ID NO 12609839 as cited in SEQ ID NO 52022
  misc_feature (1)..(1059): Ortholog of  Ceres SEQ ID NO 13638885 as cited in SEQ ID NO 55803
  misc_feature (1)..(1059): Ortholog of  Ceres SEQ ID NO 14301452 as cited in SEQ ID NO 60984
  misc_feature (1)..(1059): Ortholog of  Ceres SEQ ID NO 12587429 as cited in SEQ ID NO 63113
  misc_feature (1)..(1059): Ortholog of  Ceres SEQ ID NO 12615635 as cited in SEQ ID NO 63133
  misc_feature (1)..(1059): Ortholog of  Ceres SEQ ID NO 12586351 as cited in SEQ ID NO 64028
  misc_feature (1)..(1059): Ortholog of  Ceres SEQ ID NO 15173174 as cited in SEQ ID NO 64046
  misc_feature (1)..(1059): Ortholog of  Ceres SEQ ID NO 13654441 as cited in SEQ ID NO 67814
gaacagaaccgaaacctcagacactctgcatatatcctctgcgcgtgtatctcgtcgaacagagccgaaagctggagcttccaatggcgggaggcaacgacctgaaggtgctcggcgtgtggacgagcccgttcgtgatccgggtccgcatcgtgctcaacctgaagggcctggcgtacgagtacgtggaggaggacctcggcaacaagagcgcgctcctcctgggatccaacccggtgcacaagagcgtgccggtgctcctccacgccggccgcgccataaacgagtcccaggtcatcctgcagtacatcgacgaggtgtgggcggggacggggccggccgtgcttccggccgacccctacgagcgcgcggtggcgcggttctggggcgcgtacatcgacgacaaggtggagtcggcgtggctggggatgctgttcaggtgcgcgaacgaggaggagagggcggcggcggtggcgcgcgcccgcgaggcgctcgacgcgctggagggcgcgttccgggactgctccagggggaggccgttcttcggcggcgacgacatcgggttcgtggacgccgttctcggcgggtacctcggctggttcggggccgtcggcaggatcatcgggagcaggctcatcgacccggcccggacgccgctgctggccgcgtgggaggaccggttccgcgccgccgacgtggccaagggcgtcgtgcccgacgacctcgacaagatgctcgcgttcctgcagaccctgcgcgctatgaactacgccaagtgagagtgtttcgtcgcatgaacgtgtgccgtgccgtgcacgacctatgatcagttcatgtcgatacgtctatcactcagttttgcttcttccgtcaataatcggtgtgctgaatacatgtacaacagctgcctataattttgcttctttcttctaatacctccgtttttaatttgatagttcaactttataataacaaatgtcaaatttaaaaaaaaaatcggaaggagtatttttttaatacatccaagtccatccaataaaagtgctcgtggggctttct

SEQ ID NO: 15031 - protein, 274 aa, Zea mays subsp. mays
  peptide (1)..(274): Ceres Seq. ID no. 13623014
NRTETSDTLHISSARVSRRTEPKAGASNGGRQRPEGARRVDEPVRDPGPHRAQPEGPGVRVRGGGPRQQERAPPGIQPGAQERAGAPPRRPRHKRVPGHPAVHRRGVGGDGAGRASGRPLRARGGAVLGRVHRRQGGVGVAGDAVQVRERGGEGGGGGARPRGARRAGGRVPGLLQGEAVLRRRRHRVRGRRSRRVPRLVRGRRQDHREQAHRPGPDAAAGRVGGPVPRRRRGQGRRARRPRQDARVPADPARYELRQVRVFRRMNVCRAVHDL

SEQ ID NO: 15032 - protein, 258 aa, Zea mays subsp. mays
  peptide (1)..(258): Ceres Seq. ID no. 13623015
TEPKPQTLCIYPLRVYLVEQSRKLELPMAGGNDLKVLGVWTSPFVIRVRIVLNLKGLAYEYVEEDLGNKSALLLGSNPVHKSVPVLLHAGRAINESQVILQYIDEVWAGTGPAVLPADPYERAVARFWGAYIDDKVESAWLGMLFRCANEEERAAAVARAREALDALEGAFRDCSRGRPFFGGDDIGFVDAVLGGYLGWFGAVGRIIGSRLIDPARTPLLAAWEDRFRAADVAKGVVPDDLDKMLAFLQTLRAMNYAK

SEQ ID NO: 15033 - protein, 231 aa, Zea mays subsp. mays
  peptide (1)..(231): Ceres Seq. ID no. 13623016
MAGGNDLKVLGVWTSPFVIRVRIVLNLKGLAYEYVEEDLGNKSALLLGSNPVHKSVPVLLHAGRAINESQVILQYIDEVWAGTGPAVLPADPYERAVARFWGAYIDDKVESAWLGMLFRCANEEERAAAVARAREALDALEGAFRDCSRGRPFFGGDDIGFVDAVLGGYLGWFGAVGRIIGSRLIDPARTPLLAAWEDRFRAADVAKGVVPDDLDKMLAFLQTLRAMNYAK

SEQ ID NO: 15034 - DNA, 502 bp, Zea mays subsp. mays
  misc_feature (1)..(502): Ceres Seq. ID no. 5008167
  misc_feature (1)..(502): Ortholog of  Ceres SEQ ID NO 15169960 as cited in SEQ ID NO 57591
atcagaagctagaagcctagagcagccaagaaaagcacatacccgagtcgccgaaacaacaacaatcccaatcccccctcgtcactcaaaactcgagctcgagcaacaatgtcgctgattcgccgtggaagcgcattcgaccccttctccctcgacctctgggaccccttccagggcttatttcccttcggctctggaagcagcagcagcagcagcctgttcccctcgttcggaggcaccaccaccagctcggagacggccgccttcgccggcgctcgcgtcgactggaaggagacgccggaggcgcacgtgttcaagaccgacgtgccggggctgaagaaggaggaggtgaaggtggagctggaggacggcaacgtgctccagatcagcggcgagcgctgcaaggagcaggaggagaagacggacacctggcaccgcgtggagcgcagcagcggcaagttcctgcgcaggttccgcctgacggagaacgccaggacggagc

SEQ ID NO: 15035 - protein, 131 aa, Zea mays subsp. mays
  peptide (1)..(131): Ceres Seq. ID no. 5008168
MSLIRRGSAFDPFSLDLWDPFQGLFPFGSGSSSSSSLFPSFGGTTTSSETAAFAGARVDWKETPEAHVFKTDVPGLKKEEVKVELEDGNVLQISGERCKEQEEKTDTWHRVERSSGKFLRRFRLTENARTE

SEQ ID NO: 15036 - DNA, 1050 bp, Zea mays subsp. mays
  misc_feature (1)..(1050): Ceres Seq. ID no. 13505058
  misc_feature (1)..(1050): Ortholog of  Ceres SEQ ID NO 13655598 as cited in SEQ ID NO 64077
acctcctgactactgcacactcgtctccgcagtttgaaacgaagcccgcggctactgcaagctactccgtctccgtagctaaaggagaggtaggtttttatttggcgacgacatgagcacgggcgtgcgaccggggcggcggttcacggtggggcggagcgaggacgccacgcacccggacaccatccgcgccgccatctccgagttcatcgccaccgccatcttcgtcttcgccgccgagggatccgtcctctcgctcgggaagatgtaccacgacatgagcacggcgggcggcctggtggctgtggcgctggcgcacgcgctggccctggccgtggccgtggcagtggccgtcaacatctcgggcgggcacgtgaacccggcggtcaccttcggcgcgctcgtcggcggccgcgtctccctcgtccgcgcggtcttgtactgggtcgcgcagctgctgggcgccgtcgccgccacgctgctcctgcggctcgccacggggggcatgcggccgccggggttcgcgctcgcgtccggggtcggggactggcacgccgtgctgctggaggccgtcatgacgttcggcctcatgtacgcctactacgccacggtgatcgacccgaagcgggggcacgtgggcaccatcgcgccgctggccgtgggcttcctgctcggcgccaacgtgctggcgggagggcccttcgacggcgcagggatgaacccggcgcgggtcttcggcccggcgctcgtcgggtggcggtggaggcaccactgggtgtactggctgggccctttcctcggcgccgggcttgcagggctggtgtacgagtacctggttatcccgtccgccgacgccgccgtgccccacgcgcaccagccgctcgcgccagaggactactagcttgaaaattgtattgtggggtcgtgtaagtggttaataaggggggcataggtacgtacttgtctgtcgccccagcgtgtgttggagacggtgaatcaggtgatgtgtacatgctgcttcactgtagtgtatgtgtatgtgtatgtagt

SEQ ID NO: 15037 - protein, 262 aa, Zea mays subsp. mays
  peptide (1)..(262): Ceres Seq. ID no. 13505059
MSTGVRPGRRFTVGRSEDATHPDTIRAAISEFIATAIFVFAAEGSVLSLGKMYHDMSTAGGLVAVALAHALALAVAVAVAVNISGGHVNPAVTFGALVGGRVSLVRAVLYWVAQLLGAVAATLLLRLATGGMRPPGFALASGVGDWHAVLLEAVMTFGLMYAYYATVIDPKRGHVGTIAPLAVGFLLGANVLAGGPFDGAGMNPARVFGPALVGWRWRHHWVYWLGPFLGAGLAGLVYEYLVIPSADAAVPHAHQPLAPEDY

SEQ ID NO: 15038 - protein, 211 aa, Zea mays subsp. mays
  peptide (1)..(211): Ceres Seq. ID no. 13505060
MYHDMSTAGGLVAVALAHALALAVAVAVAVNISGGHVNPAVTFGALVGGRVSLVRAVLYWVAQLLGAVAATLLLRLATGGMRPPGFALASGVGDWHAVLLEAVMTFGLMYAYYATVIDPKRGHVGTIAPLAVGFLLGANVLAGGPFDGAGMNPARVFGPALVGWRWRHHWVYWLGPFLGAGLAGLVYEYLVIPSADAAVPHAHQPLAPEDY

SEQ ID NO: 15039 - protein, 207 aa, Zea mays subsp. mays
  peptide (1)..(207): Ceres Seq. ID no. 13505061
MSTAGGLVAVALAHALALAVAVAVAVNISGGHVNPAVTFGALVGGRVSLVRAVLYWVAQLLGAVAATLLLRLATGGMRPPGFALASGVGDWHAVLLEAVMTFGLMYAYYATVIDPKRGHVGTIAPLAVGFLLGANVLAGGPFDGAGMNPARVFGPALVGWRWRHHWVYWLGPFLGAGLAGLVYEYLVIPSADAAVPHAHQPLAPEDY

SEQ ID NO: 15040 - DNA, 475 bp, Zea mays subsp. mays
  misc_feature (1)..(475): Ceres Seq. ID no. 4648388
  misc_feature (1)..(475): Ortholog of  Ceres SEQ ID NO 13597006 as cited in SEQ ID NO 68953
gaggagctcctccacgccattcctgcacgccttcctctccaccacctcctcctcccctacgcccccctcctccctccagctccggcgagccttctccgacggccacctcccttcgctcaacccctcctcctccggcgacgacgacagcaagaccaccggcctctacaccgagctctccttctccatctacaacacctycagcaaggccaagctggagccccaccaggagcaggagatggaggaggagcaggagcagcaggcggcgcagccggagctgccgctgttcctggcgaggggcatggggatcgaccgcctcgcctccggcctcttcaccgccggcatgggctccgaggctgccctggctaggatggccagcggggtggaccagaaggccgtgctggcgctggacgcccagtacaaggagatggtggacgagcagcccggcaacgccctgttcctgcgcaactacgcgcag

SEQ ID NO: 15041 - protein, 158 aa, Zea mays subsp. mays
  peptide (1)..(158): Ceres Seq. ID no. 4648389
  misc_feature (66)..(66): Xaa is any aa, unknown or other
RSSSTPFLHAFLSTTSSSPTPPSSLQLRRAFSDGHLPSLNPSSSGDDDSKTTGLYTELSFSIYNTXSKAKLEPHQEQEMEEEQEQQAAQPELPLFLARGMGIDRLASGLFTAGMGSEAALARMASGVDQKAVLALDAQYKEMVDEQPGNALFLRNYAQ

SEQ ID NO: 15042 - protein, 157 aa, Zea mays subsp. mays
  peptide (1)..(157): Ceres Seq. ID no. 4648390
  misc_feature (66)..(66): Xaa is any aa, unknown or other
GAPPRHSCTPSSPPPPPPLRPPPPSSSGEPSPTATSLRSTPPPPATTTARPPASTPSSPSPSTTPXARPSWSPTRSRRWRRSRSSRRRSRSCRCSWRGAWGSTASPPASSPPAWAPRLPWLGWPAGWTRRPCWRWTPSTRRWWTSSPATPCSCATTR

SEQ ID NO: 15043 - protein, 121 aa, Zea mays subsp. mays
  peptide (1)..(121): Ceres Seq. ID no. 4648391
  misc_feature (66)..(66): Xaa is any aa, unknown or other
EELLHAIPARLPLHHLLLPYAPLLPPAPASLLRRPPPFAQPLLLRRRRQQDHRPLHRALLLHLQHXQQGQAGAPPGAGDGGGAGAAGGAAGAAAVPGEGHGDRPPRLRPLHRRHGLRGCPG

SEQ ID NO: 15044 - DNA, 438 bp, Zea mays subsp. mays
  misc_feature (1)..(438): Ceres Seq. ID no. 4648385
  misc_feature (1)..(438): Ortholog of  Ceres SEQ ID NO 13582184 as cited in SEQ ID NO 56002
  misc_feature (1)..(438): Ortholog of  Ceres SEQ ID NO 15227042 as cited in SEQ ID NO 0
cctagcacccgtcccgccgccgccgctgctgctgccgccctgaccctcgccgcctgcagcagccaccaccgcgcaaccatgggtatcgacctcgtcgccggcggccgcaacaagaggaccaagcgcacggcgcccaaatccgacgatgtgtacctcaagctgctcgtcaagctctaccgcttcctggtgcggaggaccaagagccagttcaacgccgtgatcctcaagcgtctcttcatgagcaagaccaaccgcccgccgctctcgatgcgccgcctcgtcaggttcatggaggggaaggcggacaagatcgccgtgatcgtgggcaccatcaccgatgaccagagggtctacgagataccggcaatgaaggtggccgcgctcaggttcaccgagacggcgagggccaggatcgtcaatgctggtggcgagtgcctt

SEQ ID NO: 15045 - protein, 146 aa, Zea mays subsp. mays
  peptide (1)..(146): Ceres Seq. ID no. 4648386
PSTRPAAAAAAAALTLAACSSHHRATMGIDLVAGGRNKRTKRTAPKSDDVYLKLLVKLYRFLVRRTKSQFNAVILKRLFMSKTNRPPLSMRRLVRFMEGKADKIAVIVGTITDDQRVYEIPAMKVAALRFTETARARIVNAGGECL

SEQ ID NO: 15046 - protein, 120 aa, Zea mays subsp. mays
  peptide (1)..(120): Ceres Seq. ID no. 4648387
MGIDLVAGGRNKRTKRTAPKSDDVYLKLLVKLYRFLVRRTKSQFNAVILKRLFMSKTNRPPLSMRRLVRFMEGKADKIAVIVGTITDDQRVYEIPAMKVAALRFTETARARIVNAGGECL

SEQ ID NO: 15047 - DNA, 1623 bp, Zea mays subsp. mays
  misc_feature (1)..(1623): Ceres Seq. ID no. 13587067
  misc_feature (1)..(1623): Ortholog of  Ceres SEQ ID NO 15225244 as cited in SEQ ID NO 66088
cccgttcccccaagtctatcagccaaagcatcgcccgccgatggcgtctccgccccactcagtcgaggtccggacccccggcgactcgccgcggcccaccgccgctctcctctccccctccgtggccgcaccccagccctccaacgcctcccgcctcctgctcctcctcaccgcggccgtcgccgccgctacggccttcgtcctgctccgcccgcccatcaccgtcgtgaccgcggcgtccgccaccgcgcggccgctctccaagctctccaagcccgtggtgctgctcatttcctcggacggcttccgcttcgggtaccagtacaaggcccccctcccgcacatccgccgcctcttcgccaatggcacatccgccgccgagggcctgatccccgtcttccccacgctcaccttccccaaccactactccatcgtcaccggcctctacccctcctcccacggcatcatcaacaactacttccccgatcccatctcgggggactacttcaccatgaaaaaccacgatcccaagtggtggctcggggagccgctctgggccaccgctgccgcccagggggtcctgtctgccacattcttctggccgggttcggaggttacgaagggttcctggaactgccccgacaagtactgccgccactacaatggctcggtgccgtttgaggagagggtcgacaccatccttggctattttgatctcccgcctaaccaaatgccacagttcatgacgctgtactttgaggatcctgatcaccaggggcaccaggtgggtcctgacgatccctcaatcaccgatgcggtcgtacatatagatgagatgctcgggaggctcattgctggtttggaggctaggggaatgtttgaggatgtgaacattatattggtaggtgaccatggtatggttgggacctgcgataggaagcttgtgtttctcgaagagttggctccatggatcgagttgaagtcagattgggttctgtcagtgacgccattgctggcaatcaggccgccagatggtgtgtcgccagctgaggttgtggccaagatgaatgaggggcttggatctgggaaggtgaagaatggggaatatttgaaaatgtacttaaaagaggagttgcctactcgcctgcattattcagagagttacaggatcccaccaatcatcgggctggttggggaagggtataagatcgagatgaagcgctccaagagaaatgagtgtggaggagcccatgggtacgacaatgccttcttctcaatgaggaccatatttgccgcacatggacctcgttttcagggtggtagaactgtgccctcatttgagaatgcggagatatacaatgtcatggcttccattctcaatttgaagcctgctccaaacaatggttcagcttctttccctggcacgattctgttgccgaacaaatgatcatggattggttttgtaggagtaagggcacatggatgtatgatggtgttctcatttggttattgtattgtacctcttaaattagacttctgccacatcactgtatctgagcaaaaatgctgctagtagagagttgcttctctctagtgacaacatttggaaacatgtttcacatc

SEQ ID NO: 15048 - protein, 481 aa, Zea mays subsp. mays
  peptide (1)..(481): Ceres Seq. ID no. 13587068
PFPQVYQPKHRPPMASPPHSVEVRTPGDSPRPTAALLSPSVAAPQPSNASRLLLLLTAAVAAATAFVLLRPPITVVTAASATARPLSKLSKPVVLLISSDGFRFGYQYKAPLPHIRRLFANGTSAAEGLIPVFPTLTFPNHYSIVTGLYPSSHGIINNYFPDPISGDYFTMKNHDPKWWLGEPLWATAAAQGVLSATFFWPGSEVTKGSWNCPDKYCRHYNGSVPFEERVDTILGYFDLPPNQMPQFMTLYFEDPDHQGHQVGPDDPSITDAVVHIDEMLGRLIAGLEARGMFEDVNIILVGDHGMVGTCDRKLVFLEELAPWIELKSDWVLSVTPLLAIRPPDGVSPAEVVAKMNEGLGSGKVKNGEYLKMYLKEELPTRLHYSESYRIPPIIGLVGEGYKIEMKRSKRNECGGAHGYDNAFFSMRTIFAAHGPRFQGGRTVPSFENAEIYNVMASILNLKPAPNNGSASFPGTILLPNK

SEQ ID NO: 15049 - protein, 468 aa, Zea mays subsp. mays
  peptide (1)..(468): Ceres Seq. ID no. 13587069
MASPPHSVEVRTPGDSPRPTAALLSPSVAAPQPSNASRLLLLLTAAVAAATAFVLLRPPITVVTAASATARPLSKLSKPVVLLISSDGFRFGYQYKAPLPHIRRLFANGTSAAEGLIPVFPTLTFPNHYSIVTGLYPSSHGIINNYFPDPISGDYFTMKNHDPKWWLGEPLWATAAAQGVLSATFFWPGSEVTKGSWNCPDKYCRHYNGSVPFEERVDTILGYFDLPPNQMPQFMTLYFEDPDHQGHQVGPDDPSITDAVVHIDEMLGRLIAGLEARGMFEDVNIILVGDHGMVGTCDRKLVFLEELAPWIELKSDWVLSVTPLLAIRPPDGVSPAEVVAKMNEGLGSGKVKNGEYLKMYLKEELPTRLHYSESYRIPPIIGLVGEGYKIEMKRSKRNECGGAHGYDNAFFSMRTIFAAHGPRFQGGRTVPSFENAEIYNVMASILNLKPAPNNGSASFPGTILLPNK

SEQ ID NO: 15050 - protein, 311 aa, Zea mays subsp. mays
  peptide (1)..(311): Ceres Seq. ID no. 13587070
MKNHDPKWWLGEPLWATAAAQGVLSATFFWPGSEVTKGSWNCPDKYCRHYNGSVPFEERVDTILGYFDLPPNQMPQFMTLYFEDPDHQGHQVGPDDPSITDAVVHIDEMLGRLIAGLEARGMFEDVNIILVGDHGMVGTCDRKLVFLEELAPWIELKSDWVLSVTPLLAIRPPDGVSPAEVVAKMNEGLGSGKVKNGEYLKMYLKEELPTRLHYSESYRIPPIIGLVGEGYKIEMKRSKRNECGGAHGYDNAFFSMRTIFAAHGPRFQGGRTVPSFENAEIYNVMASILNLKPAPNNGSASFPGTILLPNK

SEQ ID NO: 15051 - DNA, 857 bp, Zea mays subsp. mays
  misc_feature (1)..(857): Ceres Seq. ID no. 13599298
  misc_feature (1)..(857): Ortholog of  Ceres SEQ ID NO 15171556 as cited in SEQ ID NO 59687
  misc_feature (1)..(857): Ortholog of  Ceres SEQ ID NO 15177935 as cited in SEQ ID NO 60258
  misc_feature (1)..(857): Ortholog of  Ceres SEQ ID NO 12625899 as cited in SEQ ID NO 69079
  misc_feature (1)..(857): Ortholog of  Ceres SEQ ID NO 15180051 as cited in SEQ ID NO 0
atacatagtggatatagccagagagaaagtaggacgtgttcttaaccttggagctattgaaggaggtgctaatgcttggaaaaacatggacgttcttgtcttcaattcttggcattggtggactcacaaaggcaattctcaagggtgggattacattagagatgggtcgtctttggtgagagacatgaaccgtcttgatgctttctacaaaggacttagcacttggggtcgatgggttgaccaaaacgtcgataccaccaaaaccaaagttttcttccaaggcatttctcccactcactacgagggaagggaatggaacgagccgagaaaaagttgtactgggcaaatgcagccgttgggtggatcaaattacccaagtggccagcctgcatctgcaggagttgtgtccaaagtgttgggagcgatgaaaacgcgtgtgtccttgcttgatatcaccacgctatctcagctgagaaaagatgctcatccttctacttatggtggcgatggaggaaatgattgcagccactggtgccttcccgggttgccagatacttggaaccaacttctctacgcagctttgttcatgtgaatttgaacaatacatctttacaaagaaagtgcaaacacacctttgttctgtaattacattcttggaggtgcaaagaagctgacagttttactttgggggtggtctttaagtgaagactaggagcataaggaagatggattgtaaagcgccttttatttatattgttttcgtatgggatgaaaacaataatctaaaaatttgtctaattaaatattgtgtgatgttatagaaagaaattaataaacaaaggagacattctaagtct

SEQ ID NO: 15052 - protein, 196 aa, Zea mays subsp. mays
  peptide (1)..(196): Ceres Seq. ID no. 13599299
YIVDIAREKVGRVLNLGAIEGGANAWKNMDVLVFNSWHWWTHKGNSQGWDYIRDGSSLVRDMNRLDAFYKGLSTWGRWVDQNVDTTKTKVFFQGISPTHYEGREWNEPRKSCTGQMQPLGGSNYPSGQPASAGVVSKVLGAMKTRVSLLDITTLSQLRKDAHPSTYGGDGGNDCSHWCLPGLPDTWNQLLYAALFM

SEQ ID NO: 15053 - protein, 168 aa, Zea mays subsp. mays
  peptide (1)..(168): Ceres Seq. ID no. 13599300
MDVLVFNSWHWWTHKGNSQGWDYIRDGSSLVRDMNRLDAFYKGLSTWGRWVDQNVDTTKTKVFFQGISPTHYEGREWNEPRKSCTGQMQPLGGSNYPSGQPASAGVVSKVLGAMKTRVSLLDITTLSQLRKDAHPSTYGGDGGNDCSHWCLPGLPDTWNQLLYAALFM

SEQ ID NO: 15054 - protein, 135 aa, Zea mays subsp. mays
  peptide (1)..(135): Ceres Seq. ID no. 13599301
MNRLDAFYKGLSTWGRWVDQNVDTTKTKVFFQGISPTHYEGREWNEPRKSCTGQMQPLGGSNYPSGQPASAGVVSKVLGAMKTRVSLLDITTLSQLRKDAHPSTYGGDGGNDCSHWCLPGLPDTWNQLLYAALFM

SEQ ID NO: 15055 - DNA, 484 bp, Zea mays subsp. mays
  misc_feature (1)..(484): Ceres Seq. ID no. 4648301
  misc_feature (1)..(484): Ortholog of  Ceres SEQ ID NO 15179752 as cited in SEQ ID NO 63074
ctagcctccagctctctctcttcctctgtctcgcctcctccctccccctgcaggaagctcgtcgagatgtcgtccgaggcggcgaagatggtggtgccggagtcggtgctcctcaagaggaagcgggaggagctctgggccgccgagaagaagaccaaggccgtcgaggagaagaagaaatccagcgagaacatcaaggtcatctacgcccgcgccaagcagtacgccgaggagtacgatgcccaggacaaggagttggttcagcttaagcgtgaggcccggatgaagggtgggttttatgtcagtcctgaggccaagctgctgtttgttgtcagaatcagaggtatcaatgccatgcacccaaagaccaagaagatcttgcagctgttgcgtttgaggcagatattcaatggagtgttcctgaaggttaacaaggccaccatcaacatgctccgcaggatcgagccatatgttgcatatgggt

SEQ ID NO: 15056 - protein, 161 aa, Zea mays subsp. mays
  peptide (1)..(161): Ceres Seq. ID no. 4648302
LASSSLSSSVSPPPSPCRKLVEMSSEAAKMVVPESVLLKRKREELWAAEKKTKAVEEKKKSSENIKVIYARAKQYAEEYDAQDKELVQLKREARMKGGFYVSPEAKLLFVVRIRGINAMHPKTKKILQLLRLRQIFNGVFLKVNKATINMLRRIEPYVAYG

SEQ ID NO: 15057 - protein, 139 aa, Zea mays subsp. mays
  peptide (1)..(139): Ceres Seq. ID no. 4648303
MSSEAAKMVVPESVLLKRKREELWAAEKKTKAVEEKKKSSENIKVIYARAKQYAEEYDAQDKELVQLKREARMKGGFYVSPEAKLLFVVRIRGINAMHPKTKKILQLLRLRQIFNGVFLKVNKATINMLRRIEPYVAYG

SEQ ID NO: 15058 - protein, 132 aa, Zea mays subsp. mays
  peptide (1)..(132): Ceres Seq. ID no. 4648304
MVVPESVLLKRKREELWAAEKKTKAVEEKKKSSENIKVIYARAKQYAEEYDAQDKELVQLKREARMKGGFYVSPEAKLLFVVRIRGINAMHPKTKKILQLLRLRQIFNGVFLKVNKATINMLRRIEPYVAYG

SEQ ID NO: 15059 - DNA, 394 bp, Zea mays subsp. mays
  misc_feature (1)..(394): Ceres Seq. ID no. 4648285
  misc_feature (1)..(394): Ortholog of  Ceres SEQ ID NO 12616383 as cited in SEQ ID NO 63582
acaccaaagaaaagtctccctcgcaacaactcgcccatttccctccacaccagcccgacacctcaagctccatcccgatcgatggcgcccaaggccgagaagaagcccgcggagaagaagccggccgccgaggtcgccgagaaggccgagaagacccccgccggcaagaagcccaaggcggagaagcggctgccggcgtccaagtccgccaaggagggcggcgacaagaagggccgcaagaagaacaagaagagcgtcgagacctacaagatctacatcttcaaggtgctcaagcaggtgcacccggacatcggcatctcctccaaggccatgtccatcatgaactccttcatcaacgacatcttcgagaagctcgccggcgaggcggccaagc

SEQ ID NO: 15060 - protein, 131 aa, Zea mays subsp. mays
  peptide (1)..(131): Ceres Seq. ID no. 4648286
TPKKSLPRNNSPISLHTSPTPQAPSRSMAPKAEKKPAEKKPAAEVAEKAEKTPAGKKPKAEKRLPASKSAKEGGDKKGRKKNKKSVETYKIYIFKVLKQVHPDIGISSKAMSIMNSFINDIFEKLAGEAAK

SEQ ID NO: 15061 - protein, 130 aa, Zea mays subsp. mays
  peptide (1)..(130): Ceres Seq. ID no. 4648287
TKEKSPSQQLAHFPPHQPDTSSSIPIDGAQGREEARGEEAGRRGRREGREDPRRQEAQGGEAAAGVQVRQGGRRQEGPQEEQEERRDLQDLHLQGAQAGAPGHRHLLQGHVHHELLHQRHLREARRRGGQ

SEQ ID NO: 15062 - protein, 113 aa, Zea mays subsp. mays
  peptide (1)..(113): Ceres Seq. ID no. 4648288
HQRKVSLATTRPFPSTPARHLKLHPDRWRPRPRRSPRRRSRPPRSPRRPRRPPPARSPRRRSGCRRPSPPRRAATRRAARRTRRASRPTRSTSSRCSSRCTRTSASPPRPCPS

SEQ ID NO: 15063 - protein, 104 aa, Zea mays subsp. mays
  peptide (1)..(104): Ceres Seq. ID no. 4648289
MAPKAEKKPAEKKPAAEVAEKAEKTPAGKKPKAEKRLPASKSAKEGGDKKGRKKNKKSVETYKIYIFKVLKQVHPDIGISSKAMSIMNSFINDIFEKLAGEAAK

SEQ ID NO: 15064 - DNA, 776 bp, Zea mays subsp. mays
  misc_feature (1)..(776): Ceres Seq. ID no. 12465542
  misc_feature (1)..(776): Ortholog of  Ceres SEQ ID NO 13596993 as cited in SEQ ID NO 68937
gtggccgaagatttacacaagaatcaaaactgagagctcatatcagggcacaacatgagaaagctgttggcttgcagaatccaggtgcgtcatcaatgaaccacagtgcaattggaggtccgcaccagccccctaggccagcgaaggtctcagcagcacctccagctccctcagctgagcgcccttacgtctgcccctacgatggttgtgacaaggcatacatccatgagtacaagttgaacctccatgaaaaaagagcatcccaaccactaccaggatggtggtccaaatggtgctgccgccccttcaaagcgcagcatctcgaagagttcccacaggagcaagctggacatcacctctaggatgccaccggccaacatccccaagcacagagggtatgcaacaccattgccanctgtggtgagcctccctgaggagcagcagttgntaaggaaagtggtgtncgaggatgacagcgagnagactnaagaagagggggataacaatggcgaggncanatggaantacaananagntgctancagngncnncnaggaaaccgnagncgaagaatgagntgctagcagggattcatttttttttcttctgtagctgtgcatataccataatctatagactggtggttatagatttcaatacatgtacatttttaaaatacggctggcctatagtagacaagaggttgttgctgccatgccccttntcaactacacaggccatgagttcagaaacgataatggatcattgctcccgtc

SEQ ID NO: 15065 - protein, 119 aa, Zea mays subsp. mays
  peptide (1)..(119): Ceres Seq. ID no. 12465543
GRRFTQESKLRAHIRAQHEKAVGLQNPGASSMNHSAIGGPHQPPRPAKVSAAPPAPSAERPYVCPYDGCDKAYIHEYKLNLHEKRASQPLPGWWSKWCCRPFKAQHLEEFPQEQAGHHL

SEQ ID NO: 15066 - protein, 109 aa, Zea mays subsp. mays
  peptide (1)..(109): Ceres Seq. ID no. 12465544
  misc_feature (57)..(57): Xaa is any aa, unknown or other
  misc_feature (68)..(68): Xaa is any aa, unknown or other
  misc_feature (73)..(73): Xaa is any aa, unknown or other
  misc_feature (79)..(79): Xaa is any aa, unknown or other
  misc_feature (81)..(81): Xaa is any aa, unknown or other
  misc_feature (90)..(90): Xaa is any aa, unknown or other
  misc_feature (91)..(91): Xaa is any aa, unknown or other
  misc_feature (93)..(93): Xaa is any aa, unknown or other
  misc_feature (95)..(95): Xaa is any aa, unknown or other
  misc_feature (96)..(96): Xaa is any aa, unknown or other
  misc_feature (97)..(97): Xaa is any aa, unknown or other
  misc_feature (99)..(99): Xaa is any aa, unknown or other
  misc_feature (100)..(100): Xaa is any aa, unknown or other
  misc_feature (101)..(101): Xaa is any aa, unknown or other
  misc_feature (102)..(102): Xaa is any aa, unknown or other
  misc_feature (103)..(103): Xaa is any aa, unknown or other
  misc_feature (106)..(106): Xaa is any aa, unknown or other
  misc_feature (107)..(107): Xaa is any aa, unknown or other
MKKEHPNHYQDGGPNGAAAPSKRSISKSSHRSKLDITSRMPPANIPKHRGYATPLPXVVSLPEEQQLXRKVVXEDDSEXTXEEGDNNGEXXWXYXXXAXXXXXETXXEE

SEQ ID NO: 15067 - protein, 102 aa, Zea mays subsp. mays
  peptide (1)..(102): Ceres Seq. ID no. 12465545
  misc_feature (4)..(4): Xaa is any aa, unknown or other
  misc_feature (6)..(6): Xaa is any aa, unknown or other
  misc_feature (16)..(16): Xaa is any aa, unknown or other
  misc_feature (17)..(17): Xaa is any aa, unknown or other
  misc_feature (19)..(19): Xaa is any aa, unknown or other
  misc_feature (21)..(21): Xaa is any aa, unknown or other
  misc_feature (22)..(22): Xaa is any aa, unknown or other
  misc_feature (23)..(23): Xaa is any aa, unknown or other
  misc_feature (25)..(25): Xaa is any aa, unknown or other
  misc_feature (26)..(26): Xaa is any aa, unknown or other
  misc_feature (27)..(27): Xaa is any aa, unknown or other
  misc_feature (28)..(28): Xaa is any aa, unknown or other
  misc_feature (32)..(32): Xaa is any aa, unknown or other
  misc_feature (33)..(33): Xaa is any aa, unknown or other
  misc_feature (37)..(37): Xaa is any aa, unknown or other
  misc_feature (85)..(85): Xaa is any aa, unknown or other
MTAXRXKKRGITMARXXGXTXXXLXXXXRKPXXKNEXLAGIHFFFFCSCAYTIIYRLVVIDFNTCTFLKYGWPIVDKRLLLPCPXSTTQAMSSETIMDHCSR

SEQ ID NO: 15068 - DNA, 442 bp, Zea mays subsp. mays
  misc_feature (1)..(442): Ceres Seq. ID no. 12465538
  misc_feature (1)..(442): Ortholog of  Ceres SEQ ID NO 13600216 as cited in SEQ ID NO 569
aagatgaatataactgtatgaatgaccctagtcctactgttcatggactgccaaccagtagctytgcccgaacaagccccgctcactcaatgsgatccagacgaacaggtggcacatgggcaagaccycgtggctctgatgatggatattcaagtgattctgtgttgaagcmtgcctccagtgacttcaggaaacttggtcagcgtatatttgtttttgtaataggcggtgctactcgatcagagttacgtgctkcacacaagctttcatccaagctgaagcgagacatcatccttggttcatytagccttgatgatcctccccagttcatcacaaaattnaagttkatgtcagtagaagaattganacttgatgaccttcmgctgtraatggtgtccgcccacacggagtgtaaccttttatnttctcygytctgtcagct

SEQ ID NO: 15069 - protein, 128 aa, Zea mays subsp. mays
  peptide (1)..(128): Ceres Seq. ID no. 12465539
  misc_feature (21)..(21): Xaa is any aa, unknown or other
  misc_feature (31)..(31): Xaa is any aa, unknown or other
  misc_feature (42)..(42): Xaa is any aa, unknown or other
  misc_feature (57)..(57): Xaa is any aa, unknown or other
  misc_feature (85)..(85): Xaa is any aa, unknown or other
  misc_feature (101)..(101): Xaa is any aa, unknown or other
  misc_feature (113)..(113): Xaa is any aa, unknown or other
  misc_feature (115)..(115): Xaa is any aa, unknown or other
  misc_feature (122)..(122): Xaa is any aa, unknown or other
  misc_feature (127)..(127): Xaa is any aa, unknown or other
DEYNCMNDPSPTVHGLPTSSXARTSPAHSMXSRRTGGTWARXRGSDDGYSSDSVLKXASSDFRKLGQRIFVFVIGGATRSELRAXHKLSSKLKRDIILGSXSLDDPPQFITKXKXMSVEELXLDDLXL

SEQ ID NO: 15070 - protein, 123 aa, Zea mays subsp. mays
  peptide (1)..(123): Ceres Seq. ID no. 12465540
  misc_feature (16)..(16): Xaa is any aa, unknown or other
  misc_feature (26)..(26): Xaa is any aa, unknown or other
  misc_feature (37)..(37): Xaa is any aa, unknown or other
  misc_feature (52)..(52): Xaa is any aa, unknown or other
  misc_feature (80)..(80): Xaa is any aa, unknown or other
  misc_feature (96)..(96): Xaa is any aa, unknown or other
  misc_feature (108)..(108): Xaa is any aa, unknown or other
  misc_feature (110)..(110): Xaa is any aa, unknown or other
  misc_feature (117)..(117): Xaa is any aa, unknown or other
  misc_feature (122)..(122): Xaa is any aa, unknown or other
MNDPSPTVHGLPTSSXARTSPAHSMXSRRTGGTWARXRGSDDGYSSDSVLKXASSDFRKLGQRIFVFVIGGATRSELRAXHKLSSKLKRDIILGSXSLDDPPQFITKXKXMSVEELXLDDLXL

SEQ ID NO: 15071 - protein, 99 aa, Zea mays subsp. mays
  peptide (1)..(99): Ceres Seq. ID no. 12465541
  misc_feature (2)..(2): Xaa is any aa, unknown or other
  misc_feature (13)..(13): Xaa is any aa, unknown or other
  misc_feature (28)..(28): Xaa is any aa, unknown or other
  misc_feature (56)..(56): Xaa is any aa, unknown or other
  misc_feature (72)..(72): Xaa is any aa, unknown or other
  misc_feature (84)..(84): Xaa is any aa, unknown or other
  misc_feature (86)..(86): Xaa is any aa, unknown or other
  misc_feature (93)..(93): Xaa is any aa, unknown or other
  misc_feature (98)..(98): Xaa is any aa, unknown or other
MXSRRTGGTWARXRGSDDGYSSDSVLKXASSDFRKLGQRIFVFVIGGATRSELRAXHKLSSKLKRDIILGSXSLDDPPQFITKXKXMSVEELXLDDLXL

SEQ ID NO: 15072 - DNA, 461 bp, Zea mays subsp. mays
  misc_feature (1)..(461): Ceres Seq. ID no. 4648918
  misc_feature (1)..(461): Ortholog of  Ceres SEQ ID NO 13582184 as cited in SEQ ID NO 56002
  misc_feature (1)..(461): Ortholog of  Ceres SEQ ID NO 15227042 as cited in SEQ ID NO 0
aaaaccctagcaccagtcccgccgccgccgctgccgccctgaccctcgccgctgctgcagcctccaccgcgcaaccatgggtatcgacctcgtcgccggcggccgcaacaagaggaccaagcgcacggcgcccaaatcggacgatgtgtacctcaagctgctcgtcaagctctaccgcttcctggtccggaggaccaagagccagttcaacgccgtgatcctgaagcgcctcttcatgagcaagaccaaccgccccccgctctcgatgcgccgcctcgtcaggttcatggaggggaaggaggacaagatcgctgtgatagtgggcaccatcaccgatgaccagagggtctacgagataccggcaatgaaggtggccgcgctcaggttcaccgagacggcgagggccaggattgtcaatgccggtggcgagtgccttacctttgaccagctcgcgctccgtg

SEQ ID NO: 15073 - protein, 128 aa, Zea mays subsp. mays
  peptide (1)..(128): Ceres Seq. ID no. 4648919
MGIDLVAGGRNKRTKRTAPKSDDVYLKLLVKLYRFLVRRTKSQFNAVILKRLFMSKTNRPPLSMRRLVRFMEGKEDKIAVIVGTITDDQRVYEIPAMKVAALRFTETARARIVNAGGECLTFDQLALR

SEQ ID NO: 15074 - protein, 75 aa, Zea mays subsp. mays
  peptide (1)..(75): Ceres Seq. ID no. 4648920
MSKTNRPPLSMRRLVRFMEGKEDKIAVIVGTITDDQRVYEIPAMKVAALRFTETARARIVNAGGECLTFDQLALR

SEQ ID NO: 15075 - protein, 71 aa, Zea mays subsp. mays
  peptide (1)..(71): Ceres Seq. ID no. 4648921
NPSTSPAAAAAALTLAAAAASTAQPWVSTSSPAAATRGPSARRPNRTMCTSSCSSSSTASWSGGPRASSTP

SEQ ID NO: 15076 - DNA, 480 bp, Zea mays subsp. mays
  misc_feature (1)..(480): Ceres Seq. ID no. 4647995
  misc_feature (1)..(480): Ortholog of  Ceres SEQ ID NO 13624427 as cited in SEQ ID NO 0
acgtttgatttgagatttgaccagaccatcgcctccgcctcgtccctcccgccgagcccgatcgacctcccttccgccgcacgccggcctccatcctcctccgcgccccgaggccgcagacgcgttggcaagggcgagggtgtgagtggtgtggcactcgcaccatcgtccaacggctactacaatggcggtgccgccgatgctaccggtggcggttccggcgccggcggtggacatggtggtggcgcagccggagctccaagctatggaaccggaggcggcctcggcggaggcaagggtgaggccggcagcgatggatcgtgggggtcaggttatgctcagggaatcggtgctggcacaggcggcggtggcggcggcggatcccaaggcggctctggtggcggtggaggctctgggtccggatccggcagcggtggaatccactgagcttgcacttcagtagctagagcctakagcccc

SEQ ID NO: 15077 - protein, 148 aa, Zea mays subsp. mays
  peptide (1)..(148): Ceres Seq. ID no. 4647996
TFDLRFDQTIASASSLPPSPIDLPSAARRPPSSSAPRGRRRVGKGEGVSGVALAPSSNGYYNGGAADATGGGSGAGGGHGGGAAGAPSYGTGGGLGGGKGEAGSDGSWGSGYAQGIGAGTGGGGGGGSQGGSGGGGGSGSGSGSGGIH

SEQ ID NO: 15078 - protein, 92 aa, Zea mays subsp. mays
  peptide (1)..(92): Ceres Seq. ID no. 4647997
MAVPPMLPVAVPAPAVDMVVAQPELQAMEPEAASAEARVRPAAMDRGGQVMLRESVLAQAAVAAADPKAALVAVEALGPDPAAVESTELALQ

SEQ ID NO: 15079 - protein, 87 aa, Zea mays subsp. mays
  peptide (1)..(87): Ceres Seq. ID no. 4647998
MLPVAVPAPAVDMVVAQPELQAMEPEAASAEARVRPAAMDRGGQVMLRESVLAQAAVAAADPKAALVAVEALGPDPAAVESTELALQ

SEQ ID NO: 15080 - DNA, 390 bp, Zea mays subsp. mays
  misc_feature (1)..(390): Ceres Seq. ID no. 5008164
  misc_feature (1)..(390): Ortholog of  Ceres SEQ ID NO 13590739 as cited in SEQ ID NO 66960
agtacaggtcgcaacaaccccccaccgtgagggacgcgaccaaacacacgcccctcttcgcacctcccaccaaccccgacgagcggcgatgaccggcacggtgtccaagctggcggcgccccgtccggcggcaccgccgctccggccggcgtccctccgcaccgccgccctcgccttcgccccttccccgcgccgagtccgcgtttccgtcgccgggcgagccaggagccccatcattgcgmtggcttcggccaaggaaggaagcggtgcaccgaccaagaggactgcgcttcatgatctctacgagctccagggcctgtccccgtgcgtacgacaacctaygccgccctgtcacagacttgctgcccattatcgccagcggcgtcctgt

SEQ ID NO: 15081 - protein, 129 aa, Zea mays subsp. mays
  peptide (1)..(129): Ceres Seq. ID no. 5008165
  misc_feature (81)..(81): Xaa is any aa, unknown or other
  misc_feature (114)..(114): Xaa is any aa, unknown or other
VQVATTPHREGRDQTHAPLRTSHQPRRAAMTGTVSKLAAPRPAAPPLRPASLRTAALAFAPSPRRVRVSVAGRARSPIIAXASAKEGSGAPTKRTALHDLYELQGLSPCVRQPXPPCHRLAAHYRQRRP

SEQ ID NO: 15082 - protein, 100 aa, Zea mays subsp. mays
  peptide (1)..(100): Ceres Seq. ID no. 5008166
  misc_feature (52)..(52): Xaa is any aa, unknown or other
  misc_feature (85)..(85): Xaa is any aa, unknown or other
MTGTVSKLAAPRPAAPPLRPASLRTAALAFAPSPRRVRVSVAGRARSPIIAXASAKEGSGAPTKRTALHDLYELQGLSPCVRQPXPPCHRLAAHYRQRRP

SEQ ID NO: 15083 - DNA, 434 bp, Zea mays subsp. mays
  misc_feature (1)..(434): Ceres Seq. ID no. 4647884
  misc_feature (1)..(434): Ortholog of  Ceres SEQ ID NO 15172660 as cited in SEQ ID NO 68708
ttccgcagccaccaccaccccaacccaccggagcagacgaaggcggcgccgcggcgacctcatctccggccaagggaaatgactaccgttccggggtctctggtgtgggagctcgtgaagaaaaacaactgcttcttgatcaagcagttcggcaacagcaacgccaaggtgcagttcagcaaggagccaaacaacctctacaatgtccactcctacaagttctctggcttggcgaacagcaagaccgtggcggtccagccatcagcgggagaggacaaggctgtcgtcctgtccacgaccaagaccaagaagcagaacacccctgccaagctccagcacaagactctgatgcgcaaggagttccgcaagatggccaagtccgtcaagaaccaggtctgcgacaactactacaggcctgatctgaccaagccggc

SEQ ID NO: 15084 - protein, 144 aa, Zea mays subsp. mays
  peptide (1)..(144): Ceres Seq. ID no. 4647885
FRSHHHPNPPEQTKAAPRRPHLRPREMTTVPGSLVWELVKKNNCFLIKQFGNSNAKVQFSKEPNNLYNVHSYKFSGLANSKTVAVQPSAGEDKAVVLSTTKTKKQNTPAKLQHKTLMRKEFRKMAKSVKNQVCDNYYRPDLTKP

SEQ ID NO: 15085 - protein, 138 aa, Zea mays subsp. mays
  peptide (1)..(138): Ceres Seq. ID no. 4647886
PQPPPPQPTGADEGGAAATSSPAKGNDYRSGVSGVGAREEKQLLLDQAVRQQQRQGAVQQGAKQPLQCPLLQVLWLGEQQDRGGPAISGRGQGCRPVHDQDQEAEHPCQAPAQDSDAQGVPQDGQVRQEPGLRQLLQA

SEQ ID NO: 15086 - protein, 118 aa, Zea mays subsp. mays
  peptide (1)..(118): Ceres Seq. ID no. 4647887
MTTVPGSLVWELVKKNNCFLIKQFGNSNAKVQFSKEPNNLYNVHSYKFSGLANSKTVAVQPSAGEDKAVVLSTTKTKKQNTPAKLQHKTLMRKEFRKMAKSVKNQVCDNYYRPDLTKP

SEQ ID NO: 15087 - DNA, 473 bp, Zea mays subsp. mays
  misc_feature (1)..(473): Ceres Seq. ID no. 4647721
  misc_feature (1)..(473): Ortholog of  Ceres SEQ ID NO 15173386 as cited in SEQ ID NO 63697
  misc_feature (1)..(473): Ortholog of  Ceres SEQ ID NO 12586420 as cited in SEQ ID NO 63773
  misc_feature (1)..(473): Ortholog of  Ceres SEQ ID NO 13599519 as cited in SEQ ID NO 0
attccaatttccagtcacaagatctaaacaatcatagaaacacgacagcaagccaagaatcaagaggctcggggaagatgcaggcggcgaaggagaaggtgaaggacggggtgagcgcggtgaaggccaagaccaagatcgcgcaggccaaggcgtcggagaaggcggaggcggccacggcgaggtcgcacgccgagcgggagctggcgcacgagcgcggcaaggccaaggtcgccgccgccaagatggagctgcaccaggacaaggtcctacaccgggaggaggccatcgagcaccgcatccacaagcacggcggccacggccaccaccaccacaagcacggcgtcggcatcgtggccgcgcccgcgccggcgcccggggcaggggcgtactactctactgctgcacgtcaccactactagcgctagctagacgggcacattcgccgactgtgcaatatgatcccgctagct

SEQ ID NO: 15088 - protein, 139 aa, Zea mays subsp. mays
  peptide (1)..(139): Ceres Seq. ID no. 4647722
SNFQSQDLNNHRNTTASQESRGSGKMQAAKEKVKDGVSAVKAKTKIAQAKASEKAEAATARSHAERELAHERGKAKVAAAKMELHQDKVLHREEAIEHRIHKHGGHGHHHHKHGVGIVAAPAPAPGAGAYYSTAARHHY

SEQ ID NO: 15089 - protein, 114 aa, Zea mays subsp. mays
  peptide (1)..(114): Ceres Seq. ID no. 4647723
MQAAKEKVKDGVSAVKAKTKIAQAKASEKAEAATARSHAERELAHERGKAKVAAAKMELHQDKVLHREEAIEHRIHKHGGHGHHHHKHGVGIVAAPAPAPGAGAYYSTAARHHY

SEQ ID NO: 15090 - DNA, 808 bp, Zea mays subsp. mays
  misc_feature (1)..(808): Ceres Seq. ID no. 13599228
  misc_feature (1)..(808): Ortholog of  Ceres SEQ ID NO 15173567 as cited in SEQ ID NO 57612
  misc_feature (1)..(808): Ortholog of  Ceres SEQ ID NO 12611396 as cited in SEQ ID NO 59809
  misc_feature (1)..(808): Ortholog of  Ceres SEQ ID NO 15178140 as cited in SEQ ID NO 0
ctctctcgccgtccgccgctactcccctgcctcccccagagctcgttagggttttctcttttttcgggggagaaatctcaagaggcggcaccatgctcgtgtaccaggacaagctttccggcgacgagcttctgtcggattcgttcccttacagggagctggagaacggcgtgctctgggaagtcgatggccattgggtcgttcaaggagcagttgatgtggacattggagccaatccctctgctgagggtggtggtgatgatgagggtgttgatgaccaggccgtgaaggtggttgacattgttgacaccttccgtcttcaggagcaacctgcttttgacaagaagcagtttatctctcacatgaagcgctacatcaagaacctctctgccaagcttgaaggggatgacctagatgctttcaagaagaatgttgagtccgccacaaagtatcttcttagcaagctcaaggaccttcagttctttgttggcgagagcatgcatgatgatggcggcgtggtgttcgcctactacaaggagggagctgctgatccaactttcctgtactttgcacatgggctgaaagaggtcaagtgctaatcgcactgtatgctaaaatctatgctgtcttcagtatttttgctcttatctatggttgtcagtcgactctccaatgttggtgtcagtaactgtcagatgttgagtgtcttgaaaactttctgataattgtgggatttgctttgtaatggtaatcgtgaaattggtgtggttgtgttttggttgaatcaagagattctgccctgttattc

SEQ ID NO: 15091 - protein, 198 aa, Zea mays subsp. mays
  peptide (1)..(198): Ceres Seq. ID no. 13599229
LSPSAATPLPPPELVRVFSFFGGEISRGGTMLVYQDKLSGDELLSDSFPYRELENGVLWEVDGHWVVQGAVDVDIGANPSAEGGGDDEGVDDQAVKVVDIVDTFRLQEQPAFDKKQFISHMKRYIKNLSAKLEGDDLDAFKKNVESATKYLLSKLKDLQFFVGESMHDDGGVVFAYYKEGAADPTFLYFAHGLKEVKC

SEQ ID NO: 15092 - protein, 168 aa, Zea mays subsp. mays
  peptide (1)..(168): Ceres Seq. ID no. 13599230
MLVYQDKLSGDELLSDSFPYRELENGVLWEVDGHWVVQGAVDVDIGANPSAEGGGDDEGVDDQAVKVVDIVDTFRLQEQPAFDKKQFISHMKRYIKNLSAKLEGDDLDAFKKNVESATKYLLSKLKDLQFFVGESMHDDGGVVFAYYKEGAADPTFLYFAHGLKEVKC

SEQ ID NO: 15093 - DNA, 481 bp, Zea mays subsp. mays
  misc_feature (1)..(481): Ceres Seq. ID no. 4647364
  misc_feature (1)..(481): Ortholog of  Ceres SEQ ID NO 14303280 as cited in SEQ ID NO 1250
aaacaaaccttctgagatttcgccggcgagagaagagtgagagagagagatccaacggctgagatgttccttcgtgcaatcggacggccgttattggccaaagtgaagcagacgacggggatcgtggggctcgacgtcgtaccgaacgcgagggcggtgctgatcgatctctacagcaaaaccctaaaggagatccaagccgtgccggaggacgaaggataccgtaaagcggtggaatcgttcacgcgccaccgtctcaatgtgtgcaaggaagaggaagactgggaggcgatcgagaagcgtcttggctgcggtcaagtcgaggagctcatcgaggaggcgcaagatgagctcacactcattgcgaagatgatcgaatgggacccttggggtgttccagatgactacgagtgtgaagtaattgagaacgatgcanccattcccaagcacgttcctcagcatcgacctggtcctcttcctg

SEQ ID NO: 15094 - protein, 139 aa, Zea mays subsp. mays
  peptide (1)..(139): Ceres Seq. ID no. 4647365
  misc_feature (125)..(125): Xaa is any aa, unknown or other
MFLRAIGRPLLAKVKQTTGIVGLDVVPNARAVLIDLYSKTLKEIQAVPEDEGYRKAVESFTRHRLNVCKEEEDWEAIEKRLGCGQVEELIEEAQDELTLIAKMIEWDPWGVPDDYECEVIENDAXIPKHVPQHRPGPLP

SEQ ID NO: 15095 - DNA, 504 bp, Zea mays subsp. mays
  misc_feature (1)..(504): Ceres Seq. ID no. 5008183
  misc_feature (1)..(504): Ortholog of  Ceres SEQ ID NO 13638927 as cited in SEQ ID NO 55786
ggttccgtggcggggagtgttttccaggcggcggcgcggtagcgtgaaaccgggcgaccgagcaagcgacggccatggcgttctggcagacgcgcgattttctcttctgtggcatatgcggcaccctcctcaccttcgactccgtccgctccgcctcctgccctctatgcggcttcaagcgcgatgccaaagaaattgaagggaaagaaatacagtacacgatgaccgccgaggatattcgaagagggttaaagacacaaacggaggacgttgttgggcaaagaccagtgacaaataaagcctgtccaaaatgcgaccatccaaaagctgaattttacaacatacagatgcgttcagcagatgagggagagacgacgttctacatgtgtaaaggatgcggctgtaatttcaaagacgaatgaggagttatcctaccacttctacggatatatggcattggtgccgaagawattccagcgttgacagactagtactccctccgcc

SEQ ID NO: 15096 - protein, 115 aa, Zea mays subsp. mays
  peptide (1)..(115): Ceres Seq. ID no. 5008184
MAFWQTRDFLFCGICGTLLTFDSVRSASCPLCGFKRDAKEIEGKEIQYTMTAEDIRRGLKTQTEDVVGQRPVTNKACPKCDHPKAEFYNIQMRSADEGETTFYMCKGCGCNFKDE

SEQ ID NO: 15097 - protein, 66 aa, Zea mays subsp. mays
  peptide (1)..(66): Ceres Seq. ID no. 5008185
MTAEDIRRGLKTQTEDVVGQRPVTNKACPKCDHPKAEFYNIQMRSADEGETTFYMCKGCGCNFKDE

SEQ ID NO: 15098 - protein, 65 aa, Zea mays subsp. mays
  peptide (1)..(65): Ceres Seq. ID no. 5008186
VPWRGVFSRRRRGSVKPGDRASDGHGVLADARFSLLWHMRHPPHLRLRPLRLLPSMRLQARCQRN

SEQ ID NO: 15099 - DNA, 715 bp, Zea mays subsp. mays
  misc_feature (1)..(715): Ceres Seq. ID no. 12484099
  misc_feature (1)..(715): Ortholog of  Ceres SEQ ID NO 14310375 as cited in SEQ ID NO 59612
tccttcccaatgcagctgagccgataaactacctggtgtcgcgctggggctcggacgagaacacgcttggttcgtacacgttcgatggggtgaacaaaccccgtgacctgtacgagaagctgcgcatccccgtggacaacctgttcttcgcgggagaggccacgagcgtcaagtacacgggcacggtgcacggcgccttctccacgggtgtcatggcggccgaggagtgcaagatgcgggttctggagcggttcagggagctcgacatgctggagatgtgccaccctgccatgggcgaggacagccctgtgtctgtcccgctgctcatctctcggctctaaaagcagacgagtagtagttgtgtatgggatggatcggcacctgagagtaggctgggacatcccactgattgccggagggaagcagggaggaagaagctcccctcccctcgcttcgcttntcctcggcatgaggcatgtgcctggcgttacttgtggcgtgccaagtgccatatttccctaaacttattntgngtgggaaccctctattatgtatgtatactgtgaatttgtgactctgtgttcaggtaacacgagttatcgtgacatcttcgtagagaaagataccgtatgtatgatgtatgtatgatatacatatgatattatgatcaacaattgtagtagtagtaataataaataatacatatatgtgactc

SEQ ID NO: 15100 - protein, 112 aa, Zea mays subsp. mays
  peptide (1)..(112): Ceres Seq. ID no. 12484100
LPNAAEPINYLVSRWGSDENTLGSYTFDGVNKPRDLYEKLRIPVDNLFFAGEATSVKYTGTVHGAFSTGVMAAEECKMRVLERFRELDMLEMCHPAMGEDSPVSVPLLISRL

SEQ ID NO: 15101 - DNA, 510 bp, Zea mays subsp. mays
  misc_feature (1)..(510): Ceres Seq. ID no. 5008125
  misc_feature (1)..(510): Ortholog of  Ceres SEQ ID NO 15169960 as cited in SEQ ID NO 57591
atcagaagctagaagcctagagcagccaagaaaagcacatacccgagtcgccgaaacaacaacaatcccaatcccccctcgtcactcaaaactcgaccaacaatgtcgctgattcgccgtggaagcgcattcgaccccttctcccttgacctctgggaccccttccagggctttcccttcggctctggaagcagcagcagcagcagcctgttcccctcgttcggaggcaccaccagctctgagacggccgccttcgccggcgctcgcgtcgactggaaggagacgccggaggcgcacgtgttcaagaccgacgtgccggggctgaagaaggaggaggtgaaggtggagctggaggacggcaacgtgctccagatcagcggcgagcgcagcaaggagcaggaggagaagacggacacctggcaccgcgtggagcgcmscagcggcaagttcctgcgcaggttccgcctgccggagaacgccaggacggagcagatcagtgcgtccatggag

SEQ ID NO: 15102 - protein, 136 aa, Zea mays subsp. mays
  peptide (1)..(136): Ceres Seq. ID no. 5008126
  misc_feature (112)..(112): Xaa is any aa, unknown or other
MSLIRRGSAFDPFSLDLWDPFQGFPFGSGSSSSSSLFPSFGGTTSSETAAFAGARVDWKETPEAHVFKTDVPGLKKEEVKVELEDGNVLQISGERSKEQEEKTDTWHRVERXSGKFLRRFRLPENARTEQISASME

SEQ ID NO: 15103 - DNA, 467 bp, Zea mays subsp. mays
  misc_feature (1)..(467): Ceres Seq. ID no. 4777895
  misc_feature (1)..(467): Ortholog of  Ceres SEQ ID NO 15226216 as cited in SEQ ID NO 62291
gattagcgaacggaacggaaggaagaccgtggaagcaaaggcgcgcaggcgcaagggagcagagcacacggcacaccacaagagaacaaatacacctcaggtggccttcctaagatcgccgactgaatctacctcgcttcgcgcctccagttccgcaccgggactgccgaatctgtgctcgggatcgtctcttccagcggcaatgggggccgattctgaggacgccgtcaagcagctcagcctcctcatggagcaagtggaggccccgctgaagagatcatttcagaatatgcaccagggctatcccaaagaaacactggtgcgtttccttaaggctagagagtggaacgtaccaaaggctcataaaatgattgttgattctttggattggaggattgaaaatgaaattgatagtgtgctagagagacctatagtcccagtagatttatacagatcaatacgtgatt

SEQ ID NO: 15104 - protein, 155 aa, Zea mays subsp. mays
  peptide (1)..(155): Ceres Seq. ID no. 4777896
ISERNGRKTVEAKARRRKGAEHTAHHKRTNTPQVAFLRSPTESTSLRASSSAPGLPNLCSGSSLPAAMGADSEDAVKQLSLLMEQVEAPLKRSFQNMHQGYPKETLVRFLKAREWNVPKAHKMIVDSLDWRIENEIDSVLERPIVPVDLYRSIRD

SEQ ID NO: 15105 - protein, 88 aa, Zea mays subsp. mays
  peptide (1)..(88): Ceres Seq. ID no. 4777897
MGADSEDAVKQLSLLMEQVEAPLKRSFQNMHQGYPKETLVRFLKAREWNVPKAHKMIVDSLDWRIENEIDSVLERPIVPVDLYRSIRD

SEQ ID NO: 15106 - DNA, 535 bp, Zea mays subsp. mays
  misc_feature (1)..(535): Ceres Seq. ID no. 4777621
  misc_feature (1)..(535): Ortholog of  Ceres SEQ ID NO 13502973 as cited in SEQ ID NO 68052
gtccgccgacgacaaattcatccggcaggtgacgacgcaaggtacccgcgccggcgcgggcccgggtctgctcccggaggcgcagttcgcagcgttcgtgaggcggcacgggcggcggtactccgggcccaaggagtatgcgcgtcggctgcgcgtgttcgcggccaacctggcccgcgcggcggcgcaccaggcgctggacccgacggcgcgccacggggtcacgcccttctccgacctcacgcgggaggagttcgaggcgcgcctcacgggcctgcgcgccggcggggacgtccagcggctcatgagtggcgtgccggccgccccgccggcctcgcaggaggaggtggcccggctgccggccagcttcgactggcgcgacaagggcgccgtcacgggcgtcaagacgcagggtgcgtgcgggtcgtgctgggcgttcagcacgacgggcgcggtggagggcgccaacttcctcgccacgggggagctcgtcgacctcagcgagcagcagctggtcgactgcgaccacacgtgc

SEQ ID NO: 15107 - protein, 178 aa, Zea mays subsp. mays
  peptide (1)..(178): Ceres Seq. ID no. 4777622
VRRRQIHPAGDDARYPRRRGPGSAPGGAVRSVREAARAAVLRAQGVCASAARVRGQPGPRGGAPGAGPDGAPRGHALLRPHAGGVRGAPHGPARRRGRPAAHEWRAGRPAGLAGGGGPAAGQLRLARQGRRHGRQDAGCVRVVLGVQHDGRGGGRQLPRHGGARRPQRAAAGRLRPHV

SEQ ID NO: 15108 - protein, 178 aa, Zea mays subsp. mays
  peptide (1)..(178): Ceres Seq. ID no. 4777623
SADDKFIRQVTTQGTRAGAGPGLLPEAQFAAFVRRHGRRYSGPKEYARRLRVFAANLARAAAHQALDPTARHGVTPFSDLTREEFEARLTGLRAGGDVQRLMSGVPAAPPASQEEVARLPASFDWRDKGAVTGVKTQGACGSCWAFSTTGAVEGANFLATGELVDLSEQQLVDCDHTC

SEQ ID NO: 15109 - DNA, 576 bp, Zea mays subsp. mays
  misc_feature (1)..(576): Ceres Seq. ID no. 13599379
  misc_feature (1)..(576): Ortholog of  Ceres SEQ ID NO 13584363 as cited in SEQ ID NO 64285
ttttttagtttctctccgacgagatttgagatggcactaagaggagtatggcagctccagaagctggtagtgagctactgtaattggggtggcagcagcagaggcataagagcctttatggaatcagagttacctgctctgatcgagaagaatccgcagctcgaagtggtaacggagctctcaaggggacaacatccttacctcaagggcatttacaggaatagaaatgaaagagtggtgtgtgttaagaacatggatcctgatcaagtgcttttgaatgcaacgaggcttaggaactctcttggaaggaaagtggtgaagctgcggactaggcatgtgaccaaacatcccagtgttcaaggcacttggacaaccgctgtcaagttctgacaacctttgcgggtcttttgttcttcttcttattcgttgctgtaatgttgcaatatcaggattcttcctttgttaccaatatttgcaataccaagttgtttccactacttgttctctctggttcgttcctttttttcttacaacaatgttctgtcttgttttggatccggttaatgtctgggaaac

SEQ ID NO: 15110 - protein, 129 aa, Zea mays subsp. mays
  peptide (1)..(129): Ceres Seq. ID no. 13599380
FFSFSPTRFEMALRGVWQLQKLVVSYCNWGGSSRGIRAFMESELPALIEKNPQLEVVTELSRGQHPYLKGIYRNRNERVVCVKNMDPDQVLLNATRLRNSLGRKVVKLRTRHVTKHPSVQGTWTTAVKF

SEQ ID NO: 15111 - protein, 119 aa, Zea mays subsp. mays
  peptide (1)..(119): Ceres Seq. ID no. 13599381
MALRGVWQLQKLVVSYCNWGGSSRGIRAFMESELPALIEKNPQLEVVTELSRGQHPYLKGIYRNRNERVVCVKNMDPDQVLLNATRLRNSLGRKVVKLRTRHVTKHPSVQGTWTTAVKF

SEQ ID NO: 15112 - protein, 90 aa, Zea mays subsp. mays
  peptide (1)..(90): Ceres Seq. ID no. 13599382
MESELPALIEKNPQLEVVTELSRGQHPYLKGIYRNRNERVVCVKNMDPDQVLLNATRLRNSLGRKVVKLRTRHVTKHPSVQGTWTTAVKF

SEQ ID NO: 15113 - DNA, 955 bp, Zea mays subsp. mays
  misc_feature (1)..(955): Ceres Seq. ID no. 12635356
  misc_feature (1)..(955): Ortholog of  Ceres SEQ ID NO 12611884 as cited in SEQ ID NO 51018
  misc_feature (1)..(955): Ortholog of  Ceres SEQ ID NO 15177083 as cited in SEQ ID NO 51917
  misc_feature (1)..(955): Ortholog of  Ceres SEQ ID NO 12609093 as cited in SEQ ID NO 52008
  misc_feature (1)..(955): Ortholog of  Ceres SEQ ID NO 12609839 as cited in SEQ ID NO 52022
  misc_feature (1)..(955): Ortholog of  Ceres SEQ ID NO 13638931 as cited in SEQ ID NO 52200
  misc_feature (1)..(955): Ortholog of  Ceres SEQ ID NO 13638885 as cited in SEQ ID NO 55803
  misc_feature (1)..(955): Ortholog of  Ceres SEQ ID NO 14301452 as cited in SEQ ID NO 60984
  misc_feature (1)..(955): Ortholog of  Ceres SEQ ID NO 12587429 as cited in SEQ ID NO 63113
  misc_feature (1)..(955): Ortholog of  Ceres SEQ ID NO 12615635 as cited in SEQ ID NO 63133
  misc_feature (1)..(955): Ortholog of  Ceres SEQ ID NO 12586351 as cited in SEQ ID NO 64028
  misc_feature (1)..(955): Ortholog of  Ceres SEQ ID NO 14301603 as cited in SEQ ID NO 67721
  misc_feature (1)..(955): Ortholog of  Ceres SEQ ID NO 13654441 as cited in SEQ ID NO 67814
  misc_feature (1)..(955): Ortholog of  Ceres SEQ ID NO 12635608 as cited in SEQ ID NO 0
  misc_feature (1)..(955): Ortholog of  Ceres SEQ ID NO 14309027 as cited in SEQ ID NO 0
ataggtaatcataccacaacccgagcattctacaaccactttcatcaacgccatacacgtctcctaccctcacagttcgttgctccgcacatcagcaggacttgcaatggcgggagacggcgagctgaagctgctgggcgtgtggacgagcccgttcgtcatcagggtgcgcgtggtgctcaacctcaagtctctgccgtacgagtacgtggaggagaacctgggcagcaagagcgcgctcctcctgggctccaacccggtgcaccagagcgtgcccgtcctcctccacggcggccgccccgtgaacgagtcccaggtcatcgtgcagtacatcgacgaggtctgggcgggggccggcccgtccgtgctcccggccgacccctacgagcgcgccacggcgcgcttctgggcggcgtacgtcgacgacaaggtcgggtcggcgtggacggggatgctcttctcgtgcaagacggaggaggagagggcggaggccgtgtcccgggccgtggcggcgctggagacgctggagggcgcgttcgcggagtgctccaaggggaaggcgttcttcggcggcgacgccatcgggttcgtcgacgtcgtgctcggcggctacctcgggtggttcggggcgatcgacaagatcatcgggcgccggctgatcgacccggcgaggacgccgctgctggccaggtgggaggagcagttccgcgcggcggacgcggccaagggcgtcgtgccggacgacgccgacaagatgctcgagttcttgcccaccgtgctcgcttgggtcgccgccaaagcgaagtgaactgtgagcccgtgacatcgccagctcgtgacatgtgtgtttgtgtgtgtgcgtgtctgagtccgtccagtgtgtgctgaataaatgcaccgcatgtcgtgtgttgtaccaagggcaaacgatgctgaataattttgatgtttgtgg

SEQ ID NO: 15114 - protein, 295 aa, Zea mays subsp. mays
  peptide (1)..(295): Ceres Seq. ID no. 12635357
IGNHTTTRAFYNHFHQRHTRLLPSQFVAPHISRTCNGGRRRAEAAGRVDEPVRHQGARGAQPQVSAVRVRGGEPGQQERAPPGLQPGAPERARPPPRRPPRERVPGHRAVHRRGLGGGRPVRAPGRPLRARHGALLGGVRRRQGRVGVDGDALLVQDGGGEGGGRVPGRGGAGDAGGRVRGVLQGEGVLRRRRHRVRRRRARRLPRVVRGDRQDHRAPADRPGEDAAAGQVGGAVPRGGRGQGRRAGRRRQDARVLAHRARLGRRQSEVNCEPVTSPARDMCVCVCACLSPSSVC

SEQ ID NO: 15115 - protein, 233 aa, Zea mays subsp. mays
  peptide (1)..(233): Ceres Seq. ID no. 12635358
MAGDGELKLLGVWTSPFVIRVRVVLNLKSLPYEYVEENLGSKSALLLGSNPVHQSVPVLLHGGRPVNESQVIVQYIDEVWAGAGPSVLPADPYERATARFWAAYVDDKVGSAWTGMLFSCKTEEERAEAVSRAVAALETLEGAFAECSKGKAFFGGDAIGFVDVVLGGYLGWFGAIDKIIGRRLIDPARTPLLARWEEQFRAADAAKGVVPDDADKMLEFLPTVLAWVAAKAK

SEQ ID NO: 15116 - DNA, 413 bp, Zea mays subsp. mays
  misc_feature (1)..(413): Ceres Seq. ID no. 12638286
  misc_feature (1)..(413): Ortholog of  Ceres SEQ ID NO 15174289 as cited in SEQ ID NO 1129
  misc_feature (1)..(413): Ortholog of  Ceres SEQ ID NO 12484054 as cited in SEQ ID NO 14991
  misc_feature (1)..(413): Ortholog of  Ceres SEQ ID NO 13591179 as cited in SEQ ID NO 64412
aaccaggtgctcgaggaggtcgatcgatggcgtcggagaaagacgcggcgctcgcccccgtgcccaacgacaaccccaccatatttgacaagatcatcaaaaaggagataccttctacggtggtgtatgaggatgagaaggtcctcgctttcagagacataaatcctcaagctccgacccacattgtaatcattcccaaagtcaaggatggattaaccggcctttcaaaggcagaagagaggcatgtagagatacttggctgcctcctctacgctgcaaaagttatcgctaagcaggaaggacttgaagatggctaccgtattgtcatcaatgatggccctagtggatgtcaatctgtttaccacatccatgtccatctccttggagggaggcagatgaactggcccccaggc

SEQ ID NO: 15117 - protein, 137 aa, Zea mays subsp. mays
  peptide (1)..(137): Ceres Seq. ID no. 13624616
PGARGGRSMASEKDAALAPVPNDNPTIFDKIIKKEIPSTVVYEDEKVLAFRDINPQAPTHIVIIPKVKDGLTGLSKAEERHVEILGCLLYAAKVIAKQEGLEDGYRIVINDGPSGCQSVYHIHVHLLGGRQMNWPPG

SEQ ID NO: 15118 - protein, 129 aa, Zea mays subsp. mays
  peptide (1)..(129): Ceres Seq. ID no. 13624617
MASEKDAALAPVPNDNPTIFDKIIKKEIPSTVVYEDEKVLAFRDINPQAPTHIVIIPKVKDGLTGLSKAEERHVEILGCLLYAAKVIAKQEGLEDGYRIVINDGPSGCQSVYHIHVHLLGGRQMNWPPG

SEQ ID NO: 15119 - DNA, 445 bp, Zea mays subsp. mays
  misc_feature (1)..(445): Ceres Seq. ID no. 4777260
  misc_feature (1)..(445): Ortholog of  Ceres SEQ ID NO 14308660 as cited in SEQ ID NO 55711
ttgtacacatgcctgatgtatggataaatctggctcatacatattttgctcaaggtcattttcaacaagcagttaaattgtatcaaaattgtttgcggaagttcttccacaatacagatgcaaccatcctattataccttgctcggacacactatgaggctgagcgatggcaagactgcaggaaaactttgcttagagctatacatttggctccatcaaattacttgttacggtttaatgtaggagtgtcaatgcagaaattctcagcttcaaccctgcaaaagacaaaacaaacagttgatgaggttcgcgccacagtcactgaacttcagaatgccattagagttttcagtctgttatctgttgcatcaacgtaccactcccatggttttgatgagaggaaaatagaaactcatgttgagtactgtaaacatttacttgatgc

SEQ ID NO: 15120 - protein, 147 aa, Zea mays subsp. mays
  peptide (1)..(147): Ceres Seq. ID no. 4777261
VHMPDVWINLAHTYFAQGHFQQAVKLYQNCLRKFFHNTDATILLYLARTHYEAERWQDCRKTLLRAIHLAPSNYLLRFNVGVSMQKFSASTLQKTKQTVDEVRATVTELQNAIRVFSLLSVASTYHSHGFDERKIETHVEYCKHLLD

SEQ ID NO: 15121 - protein, 145 aa, Zea mays subsp. mays
  peptide (1)..(145): Ceres Seq. ID no. 4777262
MPDVWINLAHTYFAQGHFQQAVKLYQNCLRKFFHNTDATILLYLARTHYEAERWQDCRKTLLRAIHLAPSNYLLRFNVGVSMQKFSASTLQKTKQTVDEVRATVTELQNAIRVFSLLSVASTYHSHGFDERKIETHVEYCKHLLD

SEQ ID NO: 15122 - DNA, 703 bp, Zea mays subsp. mays
  misc_feature (1)..(703): Ceres Seq. ID no. 13580129
  misc_feature (1)..(703): Ortholog of  Ceres SEQ ID NO 14306032 as cited in SEQ ID NO 0
atcagaaccgatccttacagagagacacacccagcgcgcgagatatctacatcgatcatcatcaccagcgagcgagccggccgagcagcaccgatggnggcgtacatgcgcgtgacgcaccgcgacgaggaaggcaagaaggtgacggagaagatgccggtcccggagacgcggcgcccggacacggccaagcacttcgagcgcaagctggaggagcagggcctccaccgcttcgagcggcacccggcgaacgcgccccggggcgtgggcatcggcgccccnccgcccaagtccgggcgcggcggcaagtacacctgggagggccccggcagcgtcgtcgaggaccagctngacccggcgccgcccgccatcgaccccaacgaccccaactacgaggaggcggaggacgacgaggcggccagggaggtggtcgtcggggaggtggaggtcgctaaggtcgccgagggcagggacggcgtcgccagggtngacgtcgcgccgggcctgctccaggaccagaagcagtaaaaagacttgtcttttctggatacgtntagagtntagatcgactcggtgtgtgtcagtgtgttcgagtttattccgtgcagagagtgcacgtcaactccgctttaattaatctgcttttgttaatatttctactgatcagtaatatgaaccagtggttgatatttggatggncctt

SEQ ID NO: 15123 - protein, 175 aa, Zea mays subsp. mays
  peptide (1)..(175): Ceres Seq. ID no. 13580130
  misc_feature (33)..(33): Xaa is any aa, unknown or other
  misc_feature (94)..(94): Xaa is any aa, unknown or other
  misc_feature (117)..(117): Xaa is any aa, unknown or other
  misc_feature (163)..(163): Xaa is any aa, unknown or other
IRTDPYRETHPAREISTSIIITSERAGRAAPMXAYMRVTHRDEEGKKVTEKMPVPETRRPDTAKHFERKLEEQGLHRFERHPANAPRGVGIGAXPPKSGRGGKYTWEGPGSVVEDQXDPAPPAIDPNDPNYEEAEDDEAAREVVVGEVEVAKVAEGRDGVARXDVAPGLLQDQKQ

SEQ ID NO: 15124 - protein, 150 aa, Zea mays subsp. mays
  peptide (1)..(150): Ceres Seq. ID no. 13580131
  misc_feature (32)..(32): Xaa is any aa, unknown or other
  misc_feature (94)..(94): Xaa is any aa, unknown or other
  misc_feature (117)..(117): Xaa is any aa, unknown or other
QNRSLQRDTPSARDIYIDHHHQRASRPSSTDXGVHARDAPRRGRQEGDGEDAGPGDAAPGHGQALRAQAGGAGPPPLRAAPGERAPGRGHRRPXAQVRARRQVHLGGPRQRRRGPAXPGAARHRPQRPQLRGGGGRRGGQGGGRRGGGGR

SEQ ID NO: 15125 - protein, 144 aa, Zea mays subsp. mays
  peptide (1)..(144): Ceres Seq. ID no. 13580132
  misc_feature (2)..(2): Xaa is any aa, unknown or other
  misc_feature (63)..(63): Xaa is any aa, unknown or other
  misc_feature (86)..(86): Xaa is any aa, unknown or other
  misc_feature (132)..(132): Xaa is any aa, unknown or other
MXAYMRVTHRDEEGKKVTEKMPVPETRRPDTAKHFERKLEEQGLHRFERHPANAPRGVGIGAXPPKSGRGGKYTWEGPGSVVEDQXDPAPPAIDPNDPNYEEAEDDEAAREVVVGEVEVAKVAEGRDGVARXDVAPGLLQDQKQ

SEQ ID NO: 15126 - DNA, 2375 bp, Zea mays subsp. mays
  misc_feature (1)..(2375): Ceres Seq. ID no. 13587079
  misc_feature (1)..(2375): Ortholog of  Ceres SEQ ID NO 14314144 as cited in SEQ ID NO 54403
ctacttcccggtatcctaaaccctagccgacatgcgccgcccgcagcgccgcgtcgcggcgaagcagactcgcctgcgggaggtcgacgagatacgcctcctcaacgaatggatcgacgccggcaagcccctcccgcgcaccaaacttctgcccccgtcgaaatcagctggaccggttccgaccgccggggagcacccggagtacggcgcgtgcacactgttcgacgagctgccgctgtcgcagaagaccaaggacgggctgcggaaggcggggttcactgagatgagtgagatccagcgcgccgctctgccccacgcgctgtgtggccgcgacatcctcggcgcggccaagaccggctccggcaagacccttgcctttgtcatcccgcttattgagaagctgtatagagagagatggggtccagaggatggtgtgggctgcattattctctccccgacaaatgatttggctgggcagatttttgaggtgatcaagaaagtggggcagttccataactttagtggtggcgtcattgttgctgttggtgcttgacgaggcagatcaaattcttgatcacggattcagaaaccaggttgatgctatcatttctcagattcccaaagttagacaaactttactgttttctgctacacaaacgaagtcagttaaggaccttgcaagggttagcttaagggatcctgaatatataagtgtgcacgaggaggccagaacagccacaccggatacccttgagcagtatgccatgattgtacctcttgagcagaagttaaatatgctctggagcttcattaaaaggcatctaaattcaaagacgatagtcttcttatctagtgtcaagcaggtcaaatttgtttatgaaatttttaagaaacttcgtcctggtattcctttgaaatgtatgcatggacggatgaaacatgtggtacagcaggccatagttgcagatttcaatgaagctacctcagttcttttctcaactgatataacatctcgaggactagatataaagaatgtggattgggtggtgcaggttgattgcccagaaaacattgataattacatccacagagttggccgtacagctcgttacaataagaaaggaaaatcacttatattcctttgtcctgaagaagaagcaatgcttgaaaaattgaaggcaaccgaaagtaaaatacctatacatattcgaaagccaaaggcagaacaactggagcagatatcgcagagtatagcctcagtgctggttaaatttcccaatcttcaggaattgggtaaaagggcttttgttacctatcttaaggcagtatacctccagaaagacaaaaaagtgttcaacctgagcaggttctctgcagagcagtttgctgcatatgctgcttcgcttggtctgcctgttacccccaagatccgcttcataagccacaagaagaatgtgtcgaagaaggatatggaggacattgatatgaaacagatgaaatccagtttggaacatgaagttaccatcactccaaagatcaacattgatttaactttgtgtgatggagatgatgatatcctttatcccaagaagcccactgcagatgctaatatggatgacagacttgatgatgtccttcatcccaaggagtctgccacagatacaaatgtgactggacttgaaagacccttcaaaaagaagaaactgaagataaacgtgaacaggccatcaggaacaagggtcaagtatgatgatgagggcaacgccatcccacctcttgcatctgtcgctgaagaagtatctttagaacctgtggttcacaaggataaaatttcccagcggtatgcagagatgttgagagaaatgcagaaacacgacaaggaggacaagcttgaacacaagaagaccttgcgggagaagaagctgcagaagaagatgaagcttaagcgcaagaggcaggaagacactggagcagggtcagaggaggatagtggatctgaatcagacagaggccaagacacagccaacaaaggtaaaaagaggtacttcaatagcgacgatgaagacaatgacgcagcaaaggacggtgatgttctcgcccagcaggaggcgttggcactgaagctcctgagtaatatgcacagttagctttgggatctgatggtataggttacccttgaatgggggtttgcctattagcgctccagccaggaaggggctgaaattttgaacgtgtcgcggttttttttttctgataaccgggagttaattcccactttcaggcatacgttcatggatgtatgagaaatcagtgtggccgtattaccccaagaaatcggacttagatgaggttttaagtaaaatgcctttgatttt

SEQ ID NO: 15127 - protein, 460 aa, Zea mays subsp. mays
  peptide (1)..(460): Ceres Seq. ID no. 13587080
MIVPLEQKLNMLWSFIKRHLNSKTIVFLSSVKQVKFVYEIFKKLRPGIPLKCMHGRMKHVVQQAIVADFNEATSVLFSTDITSRGLDIKNVDWVVQVDCPENIDNYIHRVGRTARYNKKGKSLIFLCPEEEAMLEKLKATESKIPIHIRKPKAEQLEQISQSIASVLVKFPNLQELGKRAFVTYLKAVYLQKDKKVFNLSRFSAEQFAAYAASLGLPVTPKIRFISHKKNVSKKDMEDIDMKQMKSSLEHEVTITPKINIDLTLCDGDDDILYPKKPTADANMDDRLDDVLHPKESATDTNVTGLERPFKKKKLKINVNRPSGTRVKYDDEGNAIPPLASVAEEVSLEPVVHKDKISQRYAEMLREMQKHDKEDKLEHKKTLREKKLQKKMKLKRKRQEDTGAGSEEDSGSESDRGQDTANKGKKRYFNSDDEDNDAAKDGDVLAQQEALALKLLSNMHS

SEQ ID NO: 15128 - protein, 450 aa, Zea mays subsp. mays
  peptide (1)..(450): Ceres Seq. ID no. 13587081
MLWSFIKRHLNSKTIVFLSSVKQVKFVYEIFKKLRPGIPLKCMHGRMKHVVQQAIVADFNEATSVLFSTDITSRGLDIKNVDWVVQVDCPENIDNYIHRVGRTARYNKKGKSLIFLCPEEEAMLEKLKATESKIPIHIRKPKAEQLEQISQSIASVLVKFPNLQELGKRAFVTYLKAVYLQKDKKVFNLSRFSAEQFAAYAASLGLPVTPKIRFISHKKNVSKKDMEDIDMKQMKSSLEHEVTITPKINIDLTLCDGDDDILYPKKPTADANMDDRLDDVLHPKESATDTNVTGLERPFKKKKLKINVNRPSGTRVKYDDEGNAIPPLASVAEEVSLEPVVHKDKISQRYAEMLREMQKHDKEDKLEHKKTLREKKLQKKMKLKRKRQEDTGAGSEEDSGSESDRGQDTANKGKKRYFNSDDEDNDAAKDGDVLAQQEALALKLLSNMHS

SEQ ID NO: 15129 - protein, 408 aa, Zea mays subsp. mays
  peptide (1)..(408): Ceres Seq. ID no. 13587082
MHGRMKHVVQQAIVADFNEATSVLFSTDITSRGLDIKNVDWVVQVDCPENIDNYIHRVGRTARYNKKGKSLIFLCPEEEAMLEKLKATESKIPIHIRKPKAEQLEQISQSIASVLVKFPNLQELGKRAFVTYLKAVYLQKDKKVFNLSRFSAEQFAAYAASLGLPVTPKIRFISHKKNVSKKDMEDIDMKQMKSSLEHEVTITPKINIDLTLCDGDDDILYPKKPTADANMDDRLDDVLHPKESATDTNVTGLERPFKKKKLKINVNRPSGTRVKYDDEGNAIPPLASVAEEVSLEPVVHKDKISQRYAEMLREMQKHDKEDKLEHKKTLREKKLQKKMKLKRKRQEDTGAGSEEDSGSESDRGQDTANKGKKRYFNSDDEDNDAAKDGDVLAQQEALALKLLSNMHS

SEQ ID NO: 15130 - DNA, 438 bp, Zea mays subsp. mays
  misc_feature (1)..(438): Ceres Seq. ID no. 4776856
  misc_feature (1)..(438): Ortholog of  Ceres SEQ ID NO 12613953 as cited in SEQ ID NO 68388
tcatctctagcctgcgccgccgcctccaccgcaccccccaaaaccctagcgctcgcttcgccccgccccaccaccatggccggcgcgcaggagtccctcgtctacgccggtgtgatgcgcggccacaacgacgtggtcacggccatcgcgacgcccatcgacaactcgcccttcatcgtctcctcttcccgcgacaagtcgctgctcgtctgggacctcaccaaccccatccaggccacccaggactccagctccgagtacggcgtccccttccgccgcctcaccggccacggccactttgtccaggacgtcgtcctcagctccgacggccagttcgcgctctccggatcctgggacggcgagctccgcctctgggacctctccaccggggtcaccacccgccgcttcgtcggccacgagaaggacgtcctctccgtc

SEQ ID NO: 15131 - protein, 146 aa, Zea mays subsp. mays
  peptide (1)..(146): Ceres Seq. ID no. 4776857
SSLACAAASTAPPKTLALASPRPTTMAGAQESLVYAGVMRGHNDVVTAIATPIDNSPFIVSSSRDKSLLVWDLTNPIQATQDSSSEYGVPFRRLTGHGHFVQDVVLSSDGQFALSGSWDGELRLWDLSTGVTTRRFVGHEKDVLSV

SEQ ID NO: 15132 - protein, 145 aa, Zea mays subsp. mays
  peptide (1)..(145): Ceres Seq. ID no. 4776858
ISSLRRRLHRTPQNPSARFAPPHHHGRRAGVPRLRRCDARPQRRGHGHRDAHRQLALHRLLFPRQVAARLGPHQPHPGHPGLQLRVRRPLPPPHRPRPLCPGRRPQLRRPVRALRILGRRAPPLGPLHRGHHPPLRRPREGRPLR

SEQ ID NO: 15133 - protein, 121 aa, Zea mays subsp. mays
  peptide (1)..(121): Ceres Seq. ID no. 4776859
MAGAQESLVYAGVMRGHNDVVTAIATPIDNSPFIVSSSRDKSLLVWDLTNPIQATQDSSSEYGVPFRRLTGHGHFVQDVVLSSDGQFALSGSWDGELRLWDLSTGVTTRRFVGHEKDVLSV

SEQ ID NO: 15134 - DNA, 432 bp, Zea mays subsp. mays
  misc_feature (1)..(432): Ceres Seq. ID no. 4776740
  misc_feature (1)..(432): Ortholog of  Ceres SEQ ID NO 13622871 as cited in SEQ ID NO 0
attttctttcgatcgtctcgcatcgacttttattagggttttcgtttcctgagagatcaatcaatcaatcgatatggcttccctagattccgacgtaaacatgatccctgctggtgaatcctccagctccgttgccgcttcttcgtcgagcaagaaggccaagagattcgaagttaagaagtggagcgccgtggctctctgggcttgggatatcgttgttgacaattgcgccatctgcagaaaccacatcatggatctctgtattgaatgtcaggctaatcaggccagcgctacgagtgaggaatgcactgttgcttggggggtttgcaatcacgccttccactttcactgcatcagcagatggttaaagactcgtcaagtttgcccattggataacagtgagtgggagttccagaaatatggtcactaaat

SEQ ID NO: 15135 - protein, 118 aa, Zea mays subsp. mays
  peptide (1)..(118): Ceres Seq. ID no. 4776741
MASLDSDVNMIPAGESSSSVAASSSSKKAKRFEVKKWSAVALWAWDIVVDNCAICRNHIMDLCIECQANQASATSEECTVAWGVCNHAFHFHCISRWLKTRQVCPLDNSEWEFQKYGH

SEQ ID NO: 15136 - protein, 109 aa, Zea mays subsp. mays
  peptide (1)..(109): Ceres Seq. ID no. 4776742
MIPAGESSSSVAASSSSKKAKRFEVKKWSAVALWAWDIVVDNCAICRNHIMDLCIECQANQASATSEECTVAWGVCNHAFHFHCISRWLKTRQVCPLDNSEWEFQKYGH

SEQ ID NO: 15137 - protein, 59 aa, Zea mays subsp. mays
  peptide (1)..(59): Ceres Seq. ID no. 4776743
MDLCIECQANQASATSEECTVAWGVCNHAFHFHCISRWLKTRQVCPLDNSEWEFQKYGH

SEQ ID NO: 15138 - DNA, 469 bp, Zea mays subsp. mays
  misc_feature (1)..(469): Ceres Seq. ID no. 4776593
  misc_feature (1)..(469): Ortholog of  Ceres SEQ ID NO 14302474 as cited in SEQ ID NO 60589
atcaatctcatcacccaccaccaaacacaatccaagccaatcccaccggagagaagagaagatgtcgggccgcggcaagggaggcaaggggctgggcaagggcggcgccaagcgccaccggaaggtgctgcgcgacaacatccagggcatcaccaagccggcgatccgccgtcttgcgcggcgtggcggcgtgaagcgcatctcggggctcatctacgaggagacccgcggcgtgctcaagatcttcctcgagaacgtcatccgcgacgccgtcacctacaccgagcacgcccgccgcaagaccgtcaccgccatggacgtcgtctacgcgctcaagcgccagggccgcaccctctacggattcggcggctaggccgagggcccagccagctcgcgacgcngccgtccggcagagtagtggtatctatctagttgctgtctagggttcgtggttctccttgtatgtcgc

SEQ ID NO: 15139 - protein, 143 aa, Zea mays subsp. mays
  peptide (1)..(143): Ceres Seq. ID no. 4776594
  misc_feature (134)..(134): Xaa is any aa, unknown or other
INLITHHQTQSKPIPPERREDVGPRQGRQGAGQGRRQAPPEGAARQHPGHHQAGDPPSCAAWRREAHLGAHLRGDPRRAQDLPRERHPRRRHLHRARPPQDRHRHGRRLRAQAPGPHPLRIRRLGRGPSQLATXPSGRVVVSI

SEQ ID NO: 15140 - protein, 123 aa, Zea mays subsp. mays
  peptide (1)..(123): Ceres Seq. ID no. 4776595
SISSPTTKHNPSQSHRREEKMSGRGKGGKGLGKGGAKRHRKVLRDNIQGITKPAIRRLARRGGVKRISGLIYEETRGVLKIFLENVIRDAVTYTEHARRKTVTAMDVVYALKRQGRTLYGFGG

SEQ ID NO: 15141 - protein, 103 aa, Zea mays subsp. mays; identical to SEQ ID NO: 7737
  peptide (1)..(103): Ceres Seq. ID no. 4776596

SEQ ID NO: 15142 - DNA, 1592 bp, Zea mays subsp. mays
  misc_feature (1)..(1592): Ceres Seq. ID no. 13587253
  misc_feature (1)..(1592): Ortholog of  Ceres SEQ ID NO 15169372 as cited in SEQ ID NO 58778
aatgataattattggagcaagaaaaaagatacttatctactaaggtgaacataaaaacatttttcttccatgtcatctatatttaggtgaaaatacaagtcaattaaccatgcttagtagaacctatcagcaagcagccgcgcagagattatgattatccataatctattgaggtcaatgatgctggatccttccagttagatagctatcatcttcagtctttttcatctcactatagtattttgagggtccagttgctcgcttaactcaattccaaggtgtcaaaaatctattattttccaaattttactgaaacttgtaattttttgcatatgccaggaggagctagtggcattggtctggagacatcaagagtcttccgctgagaggagcccatgtggtcatcgctgctagaaacacagaagctgcatcagaagcaagaaagaccatcatggagaagaacccaacggcacgtattgatgttctgaagctagacctcagctccctcaagtctgtcagggcttttgtggaccagttcaactcgatcaaactccctctgaacatcctgatgtaaccctattcacctcttgttcatgcttgttttttattttcatatatatgaaagtttcctttgatttcgttgaatctatctccagcatatacgtattattacttttagcgcttgttttttttcattcatatatatgaaagtttcctttgcttgttttttctttcatatatatgaaagtttccgcctattttagcgctttcctctttgcactggatcaaggcttgagggaatccttttctgttccacagaaataatgcaggcgtcatgttttgcccttttcagctgtctaaagacggggtcgagatgcagtttgcgacaaatcatctaggtattctctcactgacagcatgacttgcttgaaattgtttttttatcaggacactttctgcttaccaatctcctccttgataccatgaaggccactgccaagtctacgggtattgagggccgcattgtgaatttgtcatcagtcgcccaccaccatacgtatccgaagggaattgacttcgataacctcaatgatgagaaaatgtatgtgcgtttatggttctgctttgtaggaattgtctgttgattgaactgcaagtaatgatcttttattaacttgcagatacaacgacaaaatggcttatggacagtctaagctggcgaacttgctgcatgcgaaggagctctctagaaggctgaaggtatttttttcagggtatcctaatagtattatccatgtctgttactctttcgggaagggtagaaacctgaagagaaacaatttgtccatcatggccctaatgctctgtcctgcttcactgtcatgacgcactaactatataaggggcacccagtaagcaatggccattgcgaactttgggatttagataacttcggaacctttgggatcttgatacatatcagtgtgacttgcagagatgatatgatctcgttcccttttacctatgtatgaaaatccatggttctgatgcatgcctacactggttaaaactctgaaacctactcctggttc

SEQ ID NO: 15143 - protein, 63 aa, Zea mays subsp. mays
  peptide (1)..(63): Ceres Seq. ID no. 13587254
MAYGQSKLANLLHAKELSRRLKVFFSGYPNSIIHVCYSFGKGRNLKRNNLSIMALMLCPASLS

SEQ ID NO: 15144 - protein, 53 aa, Zea mays subsp. mays
  peptide (1)..(53): Ceres Seq. ID no. 13587255
MKATAKSTGIEGRIVNLSSVAHHHTYPKGIDFDNLNDEKMYVRLWFCFVGIVC

SEQ ID NO: 15145 - protein, 40 aa, Zea mays subsp. mays
  peptide (1)..(40): Ceres Seq. ID no. 13587256
MEKNPTARIDVLKLDLSSLKSVRAFVDQFNSIKLPLNILM

SEQ ID NO: 15146 - DNA, 474 bp, Zea mays subsp. mays
  misc_feature (1)..(474): Ceres Seq. ID no. 4776511
  misc_feature (1)..(474): Ortholog of  Ceres SEQ ID NO 15179752 as cited in SEQ ID NO 63074
agcctccatctctctctccctctctctcgcgcctcctcctcccccctgcaggaagctcgtcgggatgtcgtccgaggcggcgaaggtggtggtgccggagtcggtgctcctcaagaggaagcgggaggagctctgggccgccgagaagaagaccaaggccgtcgaggagaagaagaagtccagcgagaacgtcaaggtcatctacgcccgcgccaagcagtacgccgaggagtacgatgcccaggacaaggagttggttcagcttaagcgtgaggcccggatgaagggtgggttctatgtcagtcctgaggctaagctgctgtttgttgtcagaatcagaggtatcaatgccatgcacccaaagaccaagaagatcttgcagctgttgcgtttgagacagatattcaatggagtgttcctgaaggttaacaaggccaccatcaacatgctccgcagggtcgagccatatgttgc

SEQ ID NO: 15147 - protein, 157 aa, Zea mays subsp. mays
  peptide (1)..(157): Ceres Seq. ID no. 4776512
ASISLSLSLAPPPPPCRKLVGMSSEAAKVVVPESVLLKRKREELWAAEKKTKAVEEKKKSSENVKVIYARAKQYAEEYDAQDKELVQLKREARMKGGFYVSPEAKLLFVVRIRGINAMHPKTKKILQLLRLRQIFNGVFLKVNKATINMLRRVEPYV

SEQ ID NO: 15148 - protein, 136 aa, Zea mays subsp. mays
  peptide (1)..(136): Ceres Seq. ID no. 4776513
MSSEAAKVVVPESVLLKRKREELWAAEKKTKAVEEKKKSSENVKVIYARAKQYAEEYDAQDKELVQLKREARMKGGFYVSPEAKLLFVVRIRGINAMHPKTKKILQLLRLRQIFNGVFLKVNKATINMLRRVEPYV

SEQ ID NO: 15149 - protein, 93 aa, Zea mays subsp. mays
  peptide (1)..(93): Ceres Seq. ID no. 4776514
PPSLSPSLSRLLLPPAGSSSGCRPRRRRWWCRSRCSSRGSGRSSGPPRRRPRPSRRRRSPARTSRSSTPAPSSTPRSTMPRTRSWFSLSVRPG

SEQ ID NO: 15150 - DNA, 481 bp, Zea mays subsp. mays
  misc_feature (1)..(481): Ceres Seq. ID no. 13587099
  misc_feature (1)..(481): Ortholog of  Ceres SEQ ID NO 13599602 as cited in SEQ ID NO 0
accgcggcagtcgcctcccctcctacaaataacccccgaccctccacgaggacgggagtaccttctgcagcaagtagtgaccaggagcgagcagccaaggaaaggagtcaagcaatggagaaggccgtcgacaggcagcgggtcctgctgcggcacctgaaccccgccgcggcggccagccccgccccgcacgccatctccgcaagcgcgtgcgcggcgggggacagcgcggcgtaccaccggaggccggccttcgccgacgacgtcgtcatcgtcgctgcttacaggacggcaatttgcaaggccaagagagggggttnnnnggatacctttgctgaggacctcttggttcctgtcttcaaggctttggtagacaagacgaagctggacccaagtgaagttggcgacattgttgttggtactggcttagctcctggttcccagagggcaatcaaatgcagaatggctgcactgtatgctg

SEQ ID NO: 15151 - protein, 160 aa, Zea mays subsp. mays
  peptide (1)..(160): Ceres Seq. ID no. 13587100
  misc_feature (107)..(107): Xaa is any aa, unknown or other
  misc_feature (108)..(108): Xaa is any aa, unknown or other
TAAVASPPTNNPRPSTRTGVPSAASSDQERAAKERSQAMEKAVDRQRVLLRHLNPAAAASPAPHAISASACAAGDSAAYHRRPAFADDVVIVAAYRTAICKAKRGGXXDTFAEDLLVPVFKALVDKTKLDPSEVGDIVVGTGLAPGSQRAIKCRMAALYA

SEQ ID NO: 15152 - protein, 122 aa, Zea mays subsp. mays
  peptide (1)..(122): Ceres Seq. ID no. 13587101
  misc_feature (69)..(69): Xaa is any aa, unknown or other
  misc_feature (70)..(70): Xaa is any aa, unknown or other
MEKAVDRQRVLLRHLNPAAAASPAPHAISASACAAGDSAAYHRRPAFADDVVIVAAYRTAICKAKRGGXXDTFAEDLLVPVFKALVDKTKLDPSEVGDIVVGTGLAPGSQRAIKCRMAALYA

SEQ ID NO: 15153 - DNA, 2512 bp, Zea mays subsp. mays; identical to SEQ ID NO: 1286
  misc_feature (1)..(2512): Ceres Seq. ID no. 13623192
  misc_feature (1)..(2512): Ortholog of  Ceres SEQ ID NO 13594171 as cited in SEQ ID NO 60359
  misc_feature (1)..(2512): Ortholog of  Ceres SEQ ID NO 14301866 as cited in SEQ ID NO 60955
  misc_feature (1)..(2512): Ortholog of  Ceres SEQ ID NO 13590645 as cited in SEQ ID NO 62109

SEQ ID NO: 15154 - protein, 471 aa, Zea mays subsp. mays; identical to SEQ ID NO: 1287
  peptide (1)..(471): Ceres Seq. ID no. 13623193

SEQ ID NO: 15155 - protein, 457 aa, Zea mays subsp. mays; identical to SEQ ID NO: 1288
  peptide (1)..(457): Ceres Seq. ID no. 13623194

SEQ ID NO: 15156 - protein, 413 aa, Zea mays subsp. mays; identical to SEQ ID NO: 1289
  peptide (1)..(413): Ceres Seq. ID no. 13623195

SEQ ID NO: 15157 - DNA, 1802 bp, Zea mays subsp. mays
  misc_feature (1)..(1802): Ceres Seq. ID no. 13574390
  misc_feature (1)..(1802): Ortholog of  Ceres SEQ ID NO 14313147 as cited in SEQ ID NO 54166
  misc_feature (1)..(1802): Ortholog of  Ceres SEQ ID NO 13598882 as cited in SEQ ID NO 0
gaaaaaaaggcaaaaaacatttaccttttttctatctgtatattatctgaataaatcaagaggaggaagaggggagggagcgagggagggggaggagtagcaaatccagactccatagcaaccagctcgcgagaaggggaaaagggggaggaagagcttcgcttgtgtattgattgctcgctgctccagtccctgcattcgtgccgtttttggcaagtaggtggcgtggcaagcatggtgccgggctatgactgcgccgcctccgtgctgctgtgcgcggaggacaacgctgctattctcggcctggacgacgatggggaggagtcctcctgggcggccgccgctacgccgccacgtgacaccgtcgccgccgccgccgccaccggggtcgccgtcgatgggattttgacggagttccccttgctctcggatgactgcgttgcgacgctcgtggagaaggaggtggagcacatgcccgcggaggggtacctccagaagctgcagcgacggcatggggacctggatttggccgccgtcaggaaggacgccatcgattggatttggaaggtcattgagcattacaatttcgcaccgttgactgccgttttgtctgtgaactacctcgatagattcctctccacgtatgagttccctgaaggcagagcttggatgactcagctcttggcagtggcttgcttgtctttggcttcgaaaatcgaagagacttttgtgccactccccttggatttgcaggtagcggaggcaaagtttgtttttgagggaaggaccataaaaaggatggagcttctggtgctaagcaccttaaagtggaggatgcatgctgttactgcttgctcatttgttgaatactttcttcataaattgagtgatcatggtgcaccctccttgcttgcacgctctcgctcttcggaccttgtcttgagcaccgctaaaggtgctgaattcgtggtattcagaccctccgagattgctgccagtgttgcacttgctgctatcggcgaatgcaggagttctgtaattgagagagctgctagtagctgcaaatatttggacaaggagagggttttaagatgccatgaaatgattcaagagaagattactgcgggaagcattgtcctaaagtctgctggatcatcaatctcctctgtgccacaaagcccaataggtgtcctggacgctgcagcctgtctgagtcaacaaagcgatgacgctactgtcgggtctcctgcagtatgttaccatagttcttccacaagcaagaggagaaggatcactagacgtctactctaattgtggtacgcttcaggtgtgctcctcaccgctctaggagtttttgattggttcaaacatcttaaatttagtttggccgctggaggattatggtttagtcaagtagttgctgaatggaacaacaaaacacgcacactacttggtccataaagacaagaaaataactggcagcgtcccgcgagccagcgctgcaatccagttcatgcaagaccctagagtccagggggggtgctggtgtaggtagagagggaacaaggcattcacatacgccgtagagatgagagagcctctcgtatgttttgtacttttgctccttcagtttgcaatgaactatataaacaaggattgccttggggcagtgaacatttgtcggatgaaaagaatcaaaaaggatgggggtcggcagaggaatagaacaatttgatatatttccataaactacagatatgtttcctttttcataatgatgagctatcatttttgttgatggt

SEQ ID NO: 15158 - protein, 358 aa, Zea mays subsp. mays
  peptide (1)..(358): Ceres Seq. ID no. 13574391
MVPGYDCAASVLLCAEDNAAILGLDDDGEESSWAAAATPPRDTVAAAAATGVAVDGILTEFPLLSDDCVATLVEKEVEHMPAEGYLQKLQRRHGDLDLAAVRKDAIDWIWKVIEHYNFAPLTAVLSVNYLDRFLSTYEFPEGRAWMTQLLAVACLSLASKIEETFVPLPLDLQVAEAKFVFEGRTIKRMELLVLSTLKWRMHAVTACSFVEYFLHKLSDHGAPSLLARSRSSDLVLSTAKGAEFVVFRPSEIAASVALAAIGECRSSVIERAASSCKYLDKERVLRCHEMIQEKITAGSIVLKSAGSSISSVPQSPIGVLDAAACLSQQSDDATVGSPAVCYHSSSTSKRRRITRRLL

SEQ ID NO: 15159 - protein, 279 aa, Zea mays subsp. mays
  peptide (1)..(279): Ceres Seq. ID no. 13574392
MPAEGYLQKLQRRHGDLDLAAVRKDAIDWIWKVIEHYNFAPLTAVLSVNYLDRFLSTYEFPEGRAWMTQLLAVACLSLASKIEETFVPLPLDLQVAEAKFVFEGRTIKRMELLVLSTLKWRMHAVTACSFVEYFLHKLSDHGAPSLLARSRSSDLVLSTAKGAEFVVFRPSEIAASVALAAIGECRSSVIERAASSCKYLDKERVLRCHEMIQEKITAGSIVLKSAGSSISSVPQSPIGVLDAAACLSQQSDDATVGSPAVCYHSSSTSKRRRITRRLL

SEQ ID NO: 15160 - protein, 213 aa, Zea mays subsp. mays
  peptide (1)..(213): Ceres Seq. ID no. 13574393
MTQLLAVACLSLASKIEETFVPLPLDLQVAEAKFVFEGRTIKRMELLVLSTLKWRMHAVTACSFVEYFLHKLSDHGAPSLLARSRSSDLVLSTAKGAEFVVFRPSEIAASVALAAIGECRSSVIERAASSCKYLDKERVLRCHEMIQEKITAGSIVLKSAGSSISSVPQSPIGVLDAAACLSQQSDDATVGSPAVCYHSSSTSKRRRITRRLL

SEQ ID NO: 15161 - DNA, 1842 bp, Zea mays subsp. mays; identical to SEQ ID NO: 14646
  misc_feature (1)..(1842): Ceres Seq. ID no. 13574386
  misc_feature (1)..(1842): Ortholog of  Ceres SEQ ID NO 14302588 as cited in SEQ ID NO 0

SEQ ID NO: 15162 - protein, 531 aa, Zea mays subsp. mays; identical to SEQ ID NO: 14647
  peptide (1)..(531): Ceres Seq. ID no. 13574387

SEQ ID NO: 15163 - protein, 513 aa, Zea mays subsp. mays; identical to SEQ ID NO: 14648
  peptide (1)..(513): Ceres Seq. ID no. 13574388

SEQ ID NO: 15164 - protein, 460 aa, Zea mays subsp. mays; identical to SEQ ID NO: 14649
  peptide (1)..(460): Ceres Seq. ID no. 13574389

SEQ ID NO: 15165 - DNA, 2498 bp, Zea mays subsp. mays
  misc_feature (1)..(2498): Ceres Seq. ID no. 13574538
  misc_feature (1)..(2498): Ortholog of  Ceres SEQ ID NO 13589000 as cited in SEQ ID NO 60876
  misc_feature (1)..(2498): Ortholog of  Ceres SEQ ID NO 14302787 as cited in SEQ ID NO 65398
agactggtgagagcaagaggatggatcaggagcttgagccccaggaggggagcagtttgagcggatgcccaccaggaacaatgtttcctagatcacgatgtttgggccacttttggaagaggtcagggatgacatgttttcaagcttggaggacatcaccaacgcaacatatgcagatctgctctctattaattcaatgaggaaaggaaaggggtcatagaaattagtcttggcagatggaggggaacgtctcaatgactgaggcacatttttactaaattatccctaaaacatttgtattttttaaaataacatgtaatcttgttgatctggtttacttaagctgcatcgagtttgtacttggagaagaatcctggagttattttacttgtttccttgatttgtagagacatgccagtgaggagcagtttagtcggyycyyscyttatgaagtggnngcaattagaaagacgtacgagcgggccaacatctcgcggtggctcgccttgggcaatcggacctgcccgaccacgatgcaggagctctaggacgacgccctcacccccaacgccactctccgacaactcatcgccgcctggttctcccgcctggttctgcattttgttttcttatctgtcaatcatgtttttccatattactgcaggtgggtctgattaattatttaaatgtagtttatcttagatattgtttgaacgtatgggatgttggaggacagaagacaatcatgtcttactggagaaattactttgagcagactaatgggttagtttggtttgctgatagttcagacataaggaggcttgatgattgccgtgctgaactccacaacctcttgaaagaagaggataaaggtttacctatctaggcagtgttctattgttgatttttgcaaataagcaagacatgcaaggagctctaaaaccaactgaaatcgtgaaggtaagcgaacttcagtcatttattatatgcattagagacatgttttcctgtctatgacatcatttttaacttgtactgtgtttttccggtcctcatggttgccaagattttacttagttcgatgtgggagcaaaaggatatgccaaattgaatgtagtttcatcagttatgctctattatggatgttcagaggcatccaatttcagtgtgtactgcaatacttgggtccacctgcacgtggtagatgttctgcattttgttttcttataaattagatttggcttccattatgttgttctcttttggaacagagtcactctccgacagctcatcgccgcttggttctcccgtcggtacacaaggtttaagaagcgctacgcggacttccacggccgcgctgccgatctcgtccatggcctccggggcacggcgatgcccaggagacaggccctcgaggaagagcaatgtacagaagagaaaggtatctcgactattccaaagcacaagtatgcatccaaagcctgttccccaaaaggaacctttatctgcagctctctctacgcttactcttgttgtgcaatttaatgggtggctatcatttttcctcttgctttattataaacttcctctgcggccagaaactcacaagacatactatgaatacactggcttgtggcacatctatgggctccttgccatgaattcatggttctggagtgccatatatcacagttgtgacacaatttggacagaaaaagctatatttttcatcagatgctgcctttctagggtattccctcattttgatgatagttggtgagcatgtagtagcaagtttcatgggctctggtagattaactgacctttgtgtgttccattagcctgtgaagttcgaaactggtcatattgctaagaattctaggaggttactattagggcccagagtaaatgactacatgctgatgaaaatctgttcagattaatcattctggaacttgtactaacaattgaagcaagtggaggcatagcaccaattgtgtcagtgctgcagctctggatgtcagtagacaagaggtgtatcagagagaagcacttcaaggttaatttgagcaaattggagatgctggattttgtattttggttgctcatgggtggtgaatgatctgacgacttcagaagaggatagatctgagattacctttcatgcatgtcaaggaagttaagtagctgatgccatcaaagcaatggagaaacgtcaggtgaaccgcgagcagaattctgtggcgcatttgttagcgcagttagttaggactctgttcatacaactgttcgattaagccaaatacctaatttagttttatattggttgttgtcaaagaatttgtgaaatattgaggttgataatatatgtggcgttcgtttttatgtaatcattgttcactaatattttgtcgaatattttatattatatagacattactwaggaaaaaaaaaaaaaaaaaaaaaaaaaaaaaaaaaacctcgggggggggcccggt

SEQ ID NO: 15166 - protein, 191 aa, Zea mays subsp. mays
  peptide (1)..(191): Ceres Seq. ID no. 15222595
MFCILFSYKLDLASIMLFSFGTESLSDSSSPLGSPVGTQGLRSATRTSTAALPISSMASGARRCPGDRPSRKSNVQKRKVSRLFQSTSMHPKPVPQKEPLSAALSTLTLVVQFNGWLSFFLLLYYKLPLRPETHKTYYEYTGLWHIYGLLAMNSWFWSAIYHSCDTIWTEKAIFFIRCCLSRVFPHFDDSW

SEQ ID NO: 15167 - protein, 176 aa, Zea mays subsp. mays
  peptide (1)..(176): Ceres Seq. ID no. 15222596
MLFSFGTESLSDSSSPLGSPVGTQGLRSATRTSTAALPISSMASGARRCPGDRPSRKSNVQKRKVSRLFQSTSMHPKPVPQKEPLSAALSTLTLVVQFNGWLSFFLLLYYKLPLRPETHKTYYEYTGLWHIYGLLAMNSWFWSAIYHSCDTIWTEKAIFFIRCCLSRVFPHFDDSW

SEQ ID NO: 15168 - protein, 135 aa, Zea mays subsp. mays
  peptide (1)..(135): Ceres Seq. ID no. 15222597
MASGARRCPGDRPSRKSNVQKRKVSRLFQSTSMHPKPVPQKEPLSAALSTLTLVVQFNGWLSFFLLLYYKLPLRPETHKTYYEYTGLWHIYGLLAMNSWFWSAIYHSCDTIWTEKAIFFIRCCLSRVFPHFDDSW

SEQ ID NO: 15169 - DNA, 2512 bp, Zea mays subsp. mays; identical to SEQ ID NO: 1286
  misc_feature (1)..(2512): Ceres Seq. ID no. 13623192
  misc_feature (1)..(2512): Ortholog of  Ceres SEQ ID NO 13594171 as cited in SEQ ID NO 60359
  misc_feature (1)..(2512): Ortholog of  Ceres SEQ ID NO 14301866 as cited in SEQ ID NO 60955
  misc_feature (1)..(2512): Ortholog of  Ceres SEQ ID NO 13590645 as cited in SEQ ID NO 62109

SEQ ID NO: 15170 - protein, 471 aa, Zea mays subsp. mays; identical to SEQ ID NO: 1287
  peptide (1)..(471): Ceres Seq. ID no. 13623193

SEQ ID NO: 15171 - protein, 457 aa, Zea mays subsp. mays; identical to SEQ ID NO: 1288
  peptide (1)..(457): Ceres Seq. ID no. 13623194

SEQ ID NO: 15172 - protein, 413 aa, Zea mays subsp. mays; identical to SEQ ID NO: 1289
  peptide (1)..(413): Ceres Seq. ID no. 13623195

SEQ ID NO: 15173 - DNA, 1604 bp, Zea mays subsp. mays
  misc_feature (1)..(1604): Ceres Seq. ID no. 13623434
  misc_feature (1)..(1604): Ortholog of  Ceres SEQ ID NO 13600220 as cited in SEQ ID NO 0
atttgttttgtagggacttgtttacagactatgctgacttctgttttaagacctacggcgatcgcgtaaagcactggtttacattcaatgagccaaggatagtagcgctacttggctatgacacagggtcaaatcctcctcaaaggtgcaccagatgcgctgctggtgggaattcagcaaccgaaccttacatagttgctcataattttctcttggcacatgctactgcagttgcaagataccgtacgaaatatcaggtatttccatcttgagaacctcagaagttcctctgaaaaataacatcactctagcactcctaggagtggtaaactgatgttattttattcaatgaagtgtgtggtccaggattttatttttaaatgaaatgtgggcagggtctatatatgcttggaagttggaacaatggtcagcatactttcacattaataactctactgttcatgaaatgcattagcttgttctcctaaacgattggacatgtgcctgtcgaatttcattagtttcttggactgaaaactgctgatggaagagtgacatgatgttttaaaaacataggctgctcagaagggtaaggtcggaatagtcctggacttcaactggtacgaggctcttacaaactcacctgatgaccaagcagcagcccaaagagccagggacttccacattggctggtttgttgatccattgataaacggacactatccacagataatgcaagatctcgtgaaggagaggctgcccaggttcactcctgagcaggctaaactggtgaagggctcggcagactacatcggtatcaacgagtacacatccagctacatgaaggggcagaagctggtccagctggcgcccagtagctactctgccgattggcaggttcaatatgtttgtgagtttaatttcttgtgctttaaactcgatatttcgaataaatatgtatttgccttggatatatatttttttcaccaaacctaaacatccgtcccataaattctgtagttgcacgcaatggcaaaccgattggaccacaggcgaattctaagtggctctacatcgccccgacggggatgtacgggtgcgtgaactacctcaaggagaagtatgggaatccaacgatctacataacggagaacggaatggaccagcctggaaacttgacccgagaccagtacctgcgcgacgccacgagggtgcggttctacaggagctacatcggccagctgaagaaggccatagaccagggagcgaacgtggctggctacttcgcctggtctctcctcgacaacttcgagtggctggcagggtactcgtccaagttcggcatcgtctacgtggacttcaacacgctcgaacgccacccgaaggcgtcggcctactggttcagggacatgcttcagaagcattgagatctccagagccgagcctgagcacggaaggtaccattttgttcagcttcgcctagtgtttgggatggcccaatggttcaaatccggctcagtgcctggctaccaaaatgggaacaaaggacagctaccccgatcaattgtgatgttgtgtgtttgtgggtatgttctctctggagt

SEQ ID NO: 15174 - protein, 112 aa, Zea mays subsp. mays
  peptide (1)..(112): Ceres Seq. ID no. 13623435
MYGCVNYLKEKYGNPTIYITENGMDQPGNLTRDQYLRDATRVRFYRSYIGQLKKAIDQGANVAGYFAWSLLDNFEWLAGYSSKFGIVYVDFNTLERHPKASAYWFRDMLQKH

SEQ ID NO: 15175 - protein, 89 aa, Zea mays subsp. mays
  peptide (1)..(89): Ceres Seq. ID no. 13623436
MDQPGNLTRDQYLRDATRVRFYRSYIGQLKKAIDQGANVAGYFAWSLLDNFEWLAGYSSKFGIVYVDFNTLERHPKASAYWFRDMLQKH

SEQ ID NO: 15176 - protein, 89 aa, Zea mays subsp. mays
  peptide (1)..(89): Ceres Seq. ID no. 13623437
LFCRDLFTDYADFCFKTYGDRVKHWFTFNEPRIVALLGYDTGSNPPQRCTRCAAGGNSATEPYIVAHNFLLAHATAVARYRTKYQVFPS

SEQ ID NO: 15177 - DNA, 2207 bp, Zea mays subsp. mays
  misc_feature (1)..(2207): Ceres Seq. ID no. 13600680
  misc_feature (1)..(2207): Ortholog of  Ceres SEQ ID NO 13599900 as cited in SEQ ID NO 531
  misc_feature (1)..(2207): Ortholog of  Ceres SEQ ID NO 13596509 as cited in SEQ ID NO 62004
  misc_feature (1)..(2207): Ortholog of  Ceres SEQ ID NO 13659971 as cited in SEQ ID NO 67565
  misc_feature (1)..(2207): Ortholog of  Ceres SEQ ID NO 13500385 as cited in SEQ ID NO 67583
ccccgccctctccgccccgctctcccactcgtaggtgttctccccgtctccgcccgcactcgctcgtccgcgcgcaggaaggttgacctgtcgagggccggcgaacccggtaagtaagagtgaaaatggatggaagtagtaaagggagtgggcattctgaagcattaaggaactacaacctgggaagaactttaggtatcggtacatttggaagtgaagattgcagagcataagcttactggacatagggttgctataaagatcatcaactgccgccaaatgagaaatatggaaatggaagagaaagcaaagagagaattcaagatattgaagttgttcattcacccccatatcattcggctttatgaggtcatatacacacctacagatatatatgttgtgatggaatattgtaagtatggcgagttatttgattacattgttgagaaaggcagattacaggaagatgaagctcgtcgaatcttccagcaggtatttatcacttttcttggctggttacttctagtaacatgctttttttgagtcacaataggtagttatcaaagaacggttttatcttgttgctttgaattttgatatttatggatagtgcattcatattcttcatttgtttctgttgtgtttaatgtgctctcattaagtatctggattagttttgccttgccttatttttatcttctgatctgccaccattttgacttgcaagcatgatgtggtaattgctttgtcttagggtatcactattgcatgtagttcagaatttcaaatcatgatttaaacattacatctttccatggaggatacgacaattaaaatattcctttttcttttatatctaaattccaggtttgttttattagttgttttttcacattggaaaaattcatgaacagatcatatctggcgtcgaatactgccatagaaacatggttgtccaccgtgacctaaagccggaaaacttgttacttgattcaaagtataatgtaaaacttgcggattttggtctgagcaatgtcatgcatgatggccattttctgaagactagctgtgggagtccgaactatgctgctccagaggtaatatctggtaaactatatgctggacctgaggtcgatgtatggagttgtggggtgattctttatgctcttctttgtggaactcttccatttgatgatgagaatattcccaatctgttcaaaaaaaattaagggaggtatctacacagttccaagtcatttgtctgctttggccagggatttgatcccacgaatgcttgttgttgagcctatgaagagaatcacaattagggaaattcgggagcatcaatggttccagattcgccttccacgttacttggcagtgcctccaccagatacgacacaacaagccaaaatgattgatgaagatacacttcgagatgttgttaatatgggatttaacaagaaccatgtgtgtgaatcactgtgcagcagacttcaaaatgaggcaactgttgcatattatttactattggacaatcggtttagagcaactagtggctatcttggggcagattatcaagaatcaatggacaggaatttaaatcagctggcgtcatctgaatcatctagttctggtacgaggaattatgttccaggaagcagtgatcctcatagcagtggtttgcggccatattatcctgttgaaagaaaatgggcgcttggacttcagtctcgggcccaccctcgtgaaataatggttgaggtcttaaaagcacttcaagaattaaacgtcagatggaagaagaatgggcactacaacgtgaaatgcagatggtgcccagggtttcctgaagttaatgacacgttagatgccagcaacagctttcttggtgactctaccatcatggataatgatgatgctaatgggaggctacctactgtgatcaagtttgaattccagctttacaagacgaaggacgacaagtacctcttagatatgcagagagttactggacctcagctgctcttccttgacttctgtgcggccttccttaccaagcttagggttctatagtggtctaccatgtgcaaattttcactgtggtgatgaataaccgaaagcatgtaaataggaaccttgttctcgtcttttggacaacgaaaaaaaaaaaaaaaaaaaaactcgagggggggcccggtacccaa

SEQ ID NO: 15178 - protein, 304 aa, Zea mays subsp. mays
  peptide (1)..(304): Ceres Seq. ID no. 15219000
MLFFVELFHLMMRIFPICSKKIKGGIYTVPSHLSALARDLIPRMLVVEPMKRITIREIREHQWFQIRLPRYLAVPPPDTTQQAKMIDEDTLRDVVNMGFNKNHVCESLCSRLQNEATVAYYLLLDNRFRATSGYLGADYQESMDRNLNQLASSESSSSGTRNYVPGSSDPHSSGLRPYYPVERKWALGLQSRAHPREIMVEVLKALQELNVRWKKNGHYNVKCRWCPGFPEVNDTLDASNSFLGDSTIMDNDDANGRLPTVIKFEFQLYKTKDDKYLLDMQRVTGPQLLFLDFCAAFLTKLRVL

SEQ ID NO: 15179 - protein, 294 aa, Zea mays subsp. mays
  peptide (1)..(294): Ceres Seq. ID no. 15219001
MMRIFPICSKKIKGGIYTVPSHLSALARDLIPRMLVVEPMKRITIREIREHQWFQIRLPRYLAVPPPDTTQQAKMIDEDTLRDVVNMGFNKNHVCESLCSRLQNEATVAYYLLLDNRFRATSGYLGADYQESMDRNLNQLASSESSSSGTRNYVPGSSDPHSSGLRPYYPVERKWALGLQSRAHPREIMVEVLKALQELNVRWKKNGHYNVKCRWCPGFPEVNDTLDASNSFLGDSTIMDNDDANGRLPTVIKFEFQLYKTKDDKYLLDMQRVTGPQLLFLDFCAAFLTKLRVL

SEQ ID NO: 15180 - protein, 293 aa, Zea mays subsp. mays
  peptide (1)..(293): Ceres Seq. ID no. 15219002
MRIFPICSKKIKGGIYTVPSHLSALARDLIPRMLVVEPMKRITIREIREHQWFQIRLPRYLAVPPPDTTQQAKMIDEDTLRDVVNMGFNKNHVCESLCSRLQNEATVAYYLLLDNRFRATSGYLGADYQESMDRNLNQLASSESSSSGTRNYVPGSSDPHSSGLRPYYPVERKWALGLQSRAHPREIMVEVLKALQELNVRWKKNGHYNVKCRWCPGFPEVNDTLDASNSFLGDSTIMDNDDANGRLPTVIKFEFQLYKTKDDKYLLDMQRVTGPQLLFLDFCAAFLTKLRVL

SEQ ID NO: 15181 - DNA, 1445 bp, Zea mays subsp. mays
  misc_feature (1)..(1445): Ceres Seq. ID no. 12556598
  misc_feature (1)..(1445): Ortholog of  Ceres SEQ ID NO 13581804 as cited in SEQ ID NO 51424
  misc_feature (1)..(1445): Ortholog of  Ceres SEQ ID NO 15169703 as cited in SEQ ID NO 59628
  misc_feature (1)..(1445): Ortholog of  Ceres SEQ ID NO 13663874 as cited in SEQ ID NO 67003
tgagatgcatggggtagccaatcgggtgtcgccgtgcgcgcgcgcgcgcgtctggcctcctccttccctttccttgctaaataaagcaagtagcagataggggaaagtctgctcgcaagttgcatccgccctgcgccaagaaaagccatcgttcttcccacaaacgcacacatagaagcatcattcccctctcggctagcttcctcctctctccctcctcttcgtcttcctctttccttctcccttgggaaacctgctgcctttgagctttcttcttcgagtgctcccaccagatctcctcctccttaccttctttggcacgttcggcggcgcgcgcggagatagatagatcccgccatcgtcgtcgccgtccttgcttccgatcggagggccacaaccacaacctctcgctccttagcgtgcgcgcgcgagccagggtcaagaagagagctagctataggccggagatcgatggggaggggaaagatcgtgatccgcaggatcgataactccacgagccggcaggtgaccttctccaagcgccggaacgggatcttcaagaaggccaaggagctcgccatcctctgcgatgcggaggtcggcctcgtcatcttctccagcaccggccgcctctacgagtactctagcaccagcatgaaatcagttatagatcggtacggcaaggccaaggaagagcagcaagtcgtcgcaaatcccaactcggagcttaagttttggcaaagggaggcagcaagcttgagacaacaactgcacaacttgcaagaaaattatcggcagttgacgggagatgatctttctgggctgaatgtcaaagaactgcagtccctggagaatcaattggaaacaagcctgcgtggtgtccgcgcaaagaaggaccatctcttgatagatgagattcacgatttgaatcgaaaggcaagtttatttcaccaagaaaatacagacttgtacaataagatcaacctgattcgccaagaaaatgatgagttacataaaaagatctatgagactgaaggaccaagtggagttaatcgggagtcaccgactccattcaactttgcagtagtagaaaccagagatgttccagtgcaacttgaactcagcacactgccacaacaaaataacattgagccatctactgctcctaagctaggattgcaattaattccatgaagaagagtaaaactgccgtcttatgatgctgaaggaaactatttattgtgaagagatgatactcagagaaagacatatttgtggcagggagatttgagatatgaacttataaatgtaatgcaaataattttcagactggaatggggtcgtggaattcagaggatgattgctttctagttgcatttgatgtttgatgagacttttctcatgtgaaacgtttattaaaacttcaaaatggtgcagatgttgct

SEQ ID NO: 15182 - protein, 240 aa, Zea mays subsp. mays
  peptide (1)..(240): Ceres Seq. ID no. 12556599
MGRGKIVIRRIDNSTSRQVTFSKRRNGIFKKAKELAILCDAEVGLVIFSSTGRLYEYSSTSMKSVIDRYGKAKEEQQVVANPNSELKFWQREAASLRQQLHNLQENYRQLTGDDLSGLNVKELQSLENQLETSLRGVRAKKDHLLIDEIHDLNRKASLFHQENTDLYNKINLIRQENDELHKKIYETEGPSGVNRESPTPFNFAVVETRDVPVQLELSTLPQQNNIEPSTAPKLGLQLIP

SEQ ID NO: 15183 - protein, 179 aa, Zea mays subsp. mays
  peptide (1)..(179): Ceres Seq. ID no. 12556600
MKSVIDRYGKAKEEQQVVANPNSELKFWQREAASLRQQLHNLQENYRQLTGDDLSGLNVKELQSLENQLETSLRGVRAKKDHLLIDEIHDLNRKASLFHQENTDLYNKINLIRQENDELHKKIYETEGPSGVNRESPTPFNFAVVETRDVPVQLELSTLPQQNNIEPSTAPKLGLQLIP

SEQ ID NO: 15184 - DNA, 842 bp, Zea mays subsp. mays
  misc_feature (1)..(842): Ceres Seq. ID no. 13589145
  misc_feature (1)..(842): Ortholog of  Ceres SEQ ID NO 12616772 as cited in SEQ ID NO 64057
atcggggaccgtatttgcctgggatctgcggcagccacaggagctgataccaatctctgttctaggtcttaatgaaacagctgagcctgtgtgtgaaagtgaggtttgggaggttcttttcgacacttacactaagtcttccgatatcatctcatctgcatctgcaagaatattgccagtgatgatgtgttcagaggatgggatccttgcagtcgtcgaacaagataagagaccccttgaattgcttgctgaatcttgtgccatcaactccttcgacatagatcctcagaacccctctgatgttgtttgcgcattagaatgggaatcggtcggtgtcctaactcgtggtagagatgcaatgtcagaagaatgaaaattttcatcacccagggatctcaatcagatttttttccaaggtggatgaaactgctatcagaaagaatcttctgaattctgagggcttccatattcagtcaccattctaatgcccgtgaccatgggcaacggtagaaggaataaagcgtgcatgacgaatgccttttcctgtctttgcatactaaccaacactgtcttgtaccgttggaagttttactctgttgtcatgggtagttgcagattgcagaaaccttttctgggctagcttcaagatgtgtaattgctcttggatgccaactgctgacagtttgaaggagtggtcacaaacaattcaatccttttagctgggggctgatgaactgaagctataattagtttcataatgtttgcttgtggtattaaattggctcctgaacaatatggactccgatacatattttatttatctggcttaccatttagattcc

SEQ ID NO: 15185 - protein, 123 aa, Zea mays subsp. mays
  peptide (1)..(123): Ceres Seq. ID no. 13589146
SGTVFAWDLRQPQELIPISVLGLNETAEPVCESEVWEVLFDTYTKSSDIISSASARILPVMMCSEDGILAVVEQDKRPLELLAESCAINSFDIDPQNPSDVVCALEWESVGVLTRGRDAMSEE

SEQ ID NO: 15186 - protein, 63 aa, Zea mays subsp. mays
  peptide (1)..(63): Ceres Seq. ID no. 13589147
MMCSEDGILAVVEQDKRPLELLAESCAINSFDIDPQNPSDVVCALEWESVGVLTRGRDAMSEE

SEQ ID NO: 15187 - protein, 62 aa, Zea mays subsp. mays
  peptide (1)..(62): Ceres Seq. ID no. 13589148
MCSEDGILAVVEQDKRPLELLAESCAINSFDIDPQNPSDVVCALEWESVGVLTRGRDAMSEE

SEQ ID NO: 15188 - DNA, 2190 bp, Zea mays subsp. mays
  misc_feature (1)..(2190): Ceres Seq. ID no. 13599724
  misc_feature (1)..(2190): Ortholog of  Ceres SEQ ID NO 12626078 as cited in SEQ ID NO 69113
tgctactcaatttgatcaaccgccatccattctcctcctccgttgcagctgcggcatccatccagtagtccgaccaatccatggcttcagcgttcgggaccgcctccacttgcggcattaaacatgcacctgccggcgttgcgcttgctgcgcccatgaagcacctttccctcgtctcgccctcgctggtttcgcttccgcgcaagatgaggccgcgaaggaagtacaacttcagggtaaacgctgcaaaggagctgcatttcaacaaggatggctcggctatcaggaaaatgcaaaatggggtcaacaagcttgcagatctcgtcggggttactcttggaccaaaggggcgaaatgtagtcctcgaaagcaagtatggctcacctaaaattgtcaatgatggtgtcactgtggcaaaggaggttgaacttgaggaccctgttgaaaatattggtgctaaattggtccgccaagctgctgctaaaacaaatgacttggctggtgatgggacaaccacttcggttgtccttgctcaagggatgattactgagggtgtaaaggttgtagctgctggtgctaatccagtgcagatcacccgtggtattgagaaaacagccaaagcactagtcagtgaactccaaaagatgtccaaggaggttgaggacagtgagcttgctgatgttgctgcagttagtgcgggaaataactatgaaattgggaatatgatagctgaggctatgaaaaaggttgggcggcagggagtggtcacacttgaagaaggaaagagtgctgaaaataacctctattctgttgagggaatgcagtttgaccgtggctatatttctccctactttgtgactgacagtgaaaaaatgacagtcgagtatgagaactgcaagcttctccttgtggacaagaaaattaacaatgccagagatcttatcactatcctggaggatgctattagaagtggatatccaattctaatagtggcagaggacattgagcaggaagctcttgcaacccttgtggttaataggcttagaggtgcattgaagattgctgctattaaggcccctggttttggagagcgcaaaagtcaatatcttgatgacattgctactctcactggaggcactgtcatcagagaagaagttggattatccttagacaaggcagacaatgcggtcctaggaactgctgctaaggttgtagttaccaaggattcaacaacaatagtgggagatggcactacacaggaggaagtgaacaaaagggtgacacaaatcaagaaccagattgaggctactgaacaagaatatgagagagaaaaactaaacgagaggatagctaaactctctggtggtgttgctgtcattcaggtaggagcacagacagaaactgagctcaaggaaaagaaattgagggttgaggatgccctgaatgctacaaaggcagcagtcgaggaaggtatcgtaggtggtggctgtacccttttgaggcttgcatcaaaagttgatgcaattatagagacccttgagaacgatgaacagaaggttggggctgaaattgtaaggaagtccttgagctatccacttaaattgattgcaaaaaatgcaggcgttaatggcagtgtggttactgagaaggttcttgccaatgagaacttcaggtatgggtacaatgcggctacaggggagtatgaggacttgatggctgctggtatcattgatcccaccaaggttgtgaggtgctgcttggagcatgctgcatcggtggcgaaaaccttcatcacctctgatgccgttgttgttgacgccaaggtggctgagcaagcaccatcatctcctgcaaacccaatggcaatgggtggtggctcaggttttgggttctaaattgttcagctgcccttcgttccatcgcagcgacagaatcttagtttcgagatataataataaattggatgatgttagtttcgagatattagttggatgttgttattgttgtctcaaattataaaaaatcaagtgcaagtaaccaagacagctgaaaaaaatagttttgatgagatgctgcttcgtttttcttttctactaaaaaaaaaaaaaaaaaaaaaaaaaaaaaaaaaaaaaaaaaaaaaactcgagggggggcccggaacccaattcgcccaaaagggagtcgaataac

SEQ ID NO: 15189 - protein, 604 aa, Zea mays subsp. mays
  peptide (1)..(604): Ceres Seq. ID no. 13599725
MASAFGTASTCGIKHAPAGVALAAPMKHLSLVSPSLVSLPRKMRPRRKYNFRVNAAKELHFNKDGSAIRKMQNGVNKLADLVGVTLGPKGRNVVLESKYGSPKIVNDGVTVAKEVELEDPVENIGAKLVRQAAAKTNDLAGDGTTTSVVLAQGMITEGVKVVAAGANPVQITRGIEKTAKALVSELQKMSKEVEDSELADVAAVSAGNNYEIGNMIAEAMKKVGRQGVVTLEEGKSAENNLYSVEGMQFDRGYISPYFVTDSEKMTVEYENCKLLLVDKKINNARDLITILEDAIRSGYPILIVAEDIEQEALATLVVNRLRGALKIAAIKAPGFGERKSQYLDDIATLTGGTVIREEVGLSLDKADNAVLGTAAKVVVTKDSTTIVGDGTTQEEVNKRVTQIKNQIEATEQEYEREKLNERIAKLSGGVAVIQVGAQTETELKEKKLRVEDALNATKAAVEEGIVGGGCTLLRLASKVDAIIETLENDEQKVGAEIVRKSLSYPLKLIAKNAGVNGSVVTEKVLANENFRYGYNAATGEYEDLMAAGIIDPTKVVRCCLEHAASVAKTFITSDAVVVDAKVAEQAPSSPANPMAMGGGSGFGF

SEQ ID NO: 15190 - protein, 579 aa, Zea mays subsp. mays
  peptide (1)..(579): Ceres Seq. ID no. 13599726
MKHLSLVSPSLVSLPRKMRPRRKYNFRVNAAKELHFNKDGSAIRKMQNGVNKLADLVGVTLGPKGRNVVLESKYGSPKIVNDGVTVAKEVELEDPVENIGAKLVRQAAAKTNDLAGDGTTTSVVLAQGMITEGVKVVAAGANPVQITRGIEKTAKALVSELQKMSKEVEDSELADVAAVSAGNNYEIGNMIAEAMKKVGRQGVVTLEEGKSAENNLYSVEGMQFDRGYISPYFVTDSEKMTVEYENCKLLLVDKKINNARDLITILEDAIRSGYPILIVAEDIEQEALATLVVNRLRGALKIAAIKAPGFGERKSQYLDDIATLTGGTVIREEVGLSLDKADNAVLGTAAKVVVTKDSTTIVGDGTTQEEVNKRVTQIKNQIEATEQEYEREKLNERIAKLSGGVAVIQVGAQTETELKEKKLRVEDALNATKAAVEEGIVGGGCTLLRLASKVDAIIETLENDEQKVGAEIVRKSLSYPLKLIAKNAGVNGSVVTEKVLANENFRYGYNAATGEYEDLMAAGIIDPTKVVRCCLEHAASVAKTFITSDAVVVDAKVAEQAPSSPANPMAMGGGSGFGF

SEQ ID NO: 15191 - protein, 562 aa, Zea mays subsp. mays
  peptide (1)..(562): Ceres Seq. ID no. 13599727
MRPRRKYNFRVNAAKELHFNKDGSAIRKMQNGVNKLADLVGVTLGPKGRNVVLESKYGSPKIVNDGVTVAKEVELEDPVENIGAKLVRQAAAKTNDLAGDGTTTSVVLAQGMITEGVKVVAAGANPVQITRGIEKTAKALVSELQKMSKEVEDSELADVAAVSAGNNYEIGNMIAEAMKKVGRQGVVTLEEGKSAENNLYSVEGMQFDRGYISPYFVTDSEKMTVEYENCKLLLVDKKINNARDLITILEDAIRSGYPILIVAEDIEQEALATLVVNRLRGALKIAAIKAPGFGERKSQYLDDIATLTGGTVIREEVGLSLDKADNAVLGTAAKVVVTKDSTTIVGDGTTQEEVNKRVTQIKNQIEATEQEYEREKLNERIAKLSGGVAVIQVGAQTETELKEKKLRVEDALNATKAAVEEGIVGGGCTLLRLASKVDAIIETLENDEQKVGAEIVRKSLSYPLKLIAKNAGVNGSVVTEKVLANENFRYGYNAATGEYEDLMAAGIIDPTKVVRCCLEHAASVAKTFITSDAVVVDAKVAEQAPSSPANPMAMGGGSGFGF

SEQ ID NO: 15192 - DNA, 2345 bp, Zea mays subsp. mays
  misc_feature (1)..(2345): Ceres Seq. ID no. 13599868
  misc_feature (1)..(2345): Ortholog of  Ceres SEQ ID NO 13594719 as cited in SEQ ID NO 51740
  misc_feature (1)..(2345): Ortholog of  Ceres SEQ ID NO 14303471 as cited in SEQ ID NO 59423
taactccatgcacaaaactactccctgcgcaaaacacagagtagaatagaggctcaattaaccaatctttattaactccctgcgcaaaacacacggaatagaatacatgctcaattaatcaattaaccatttttttattaactccctgcacaaaactagcctaagcagtgatttttacagtaattttgataccttggcaccacgcttatattttgataaatcgtaccatatctatgatttatcttttgttaaatcatagatccctaacacttatattttgttgttatggacagtttgcatgaacacttgattgtacacctatatatcaattctacatgattgttgtttgcttgagattatttccccaaatattgatatgattccagattcatcatgacatgccatatgtttttttggatttgatgcttacatgtagatggataagaagaccaaggttatagtttgtgttgctgctgcacatatattactgtcatgtcaatgatggctatgattattcattctagaaaaagaaaacgaaatgcaaggaggactgggattacctatgcaccaatgcatgaaagggatagaactagaattgaatatctcaacacaaagatttggagggatgacacaacatgtataaacatgattagaatgaaaagggcttgtttctttcacctaactaaacattttagagagcgtggtttacttcaggacactatccatatgtgtgttgaacaacaagtggccatgtttctaaatacagttgggcataaccttagaaataggttgattggcatgaattttggtagatctggggaaacagttagtcgatgtttcaataaagttcttcgtgcaattggtgagctacgtggggaactaattaggccaccttcattggacactccaaccaaaatagcagggaactacagatgggatccgtattttaaggattgtattggagctattgatggtacacatgtaagagccactattcctagagatatggagcatgcctttcgtggtaggaagtcctatgcgactcaaaatgtaatggcggctgtagattttgatctacgcttcacttatgtgttggctggttgggagggaacatctcatgatgctaatgtattacgggatgctttagaacgtgtgaatggccttcgcgttccacaagctttggtaattggtcgtatagtccctcatcatcggaatggtggggtcacttatctttcactcacctaatgtggatccgaaggcagagaatcctaatgagatggttacagctggtgtgctttcaagccttcagaatttcctacgcaagtgcctcatagctatcctctcatatggcccaatgccgaagcacattgcatttattatggatggcaatcgtcgatatgctaaattcagaagcatgcaagaaggagctggtcacaggatgggtttctctacccttattgcaagtctgatgtactgctatgaaatgggtgtgaagtacatcactgtctacgcattcagcatcgacaattttaaaagggacccaagtgaggtggaatccttgatgcagttaatggaggaaaaaatcaacgaactcttagagaaccaaagtgtaatcaacaagattaactgtaagatcaacttttggggtaacttggacttgttatatgagccggtgcggttggcggctgagaagctgatggcgagcacagctgggaacacagggctggtcttttctatctgcatgccatacaactcgacttctgagattgtcaatgctgtcagtcaagtctgtgcggaaaggatggaaatgtttcagagcgaacatattggcgaatgcaatggtcatgctgcaaataacggtgtgcgatcagagatttcagtggcggatttggatcgccacatgtatagtgccgaatgcccagatcctgatattgtcatccggacttcgggcgagactcgattgagcaatttcctcctttggcagacaacgtttagtcacttgcagaatccagatcctctgtggcccgagttctcttttaggcaccttgtttgggctatcttgcagtatcagagagtttaccctgctctggagcataacagaaagttggctaagaagcagttgtgattccatgttatttgcaaggaggtatcatgaagggctattaacatcaaacttttccttctcaatttcccggtaatgggaaatgcaaagaacatactagcatataacattatgaatagatcaccatgtaacttaagtgtgattgctaccataaccatgtaacttatttgagctcgtacaaatgctgtgattcctaaatatatatatatagagtgcccggggt

SEQ ID NO: 15193 - protein, 303 aa, Zea mays subsp. mays; identical to SEQ ID NO: 1768
  peptide (1)..(303): Ceres Seq. ID no. 13599869

SEQ ID NO: 15194 - protein, 282 aa, Zea mays subsp. mays; identical to SEQ ID NO: 1769
  peptide (1)..(282): Ceres Seq. ID no. 13599870

SEQ ID NO: 15195 - protein, 256 aa, Zea mays subsp. mays; identical to SEQ ID NO: 1770
  peptide (1)..(256): Ceres Seq. ID no. 13599871

SEQ ID NO: 15196 - DNA, 706 bp, Zea mays subsp. mays
  misc_feature (1)..(706): Ceres Seq. ID no. 13589561
  misc_feature (1)..(706): Ortholog of  Ceres SEQ ID NO 15169346 as cited in SEQ ID NO 53994
gttggtgatgctgtaatggaaaattcatttctacgacctcttggccatttggagttggacctgccagatgccccagaaaaagccccacgtcctcctgcacaagctgttgacccattctcaaaatttgggccaaaggcagagatatcacatatattccgcgcaccagagaagaggccacccaaggagctctcgctcgcgttcacgggtctcacgcttctgccatctattggattcttgatagggctcgttcgtcttggagtgaacttgaagaacttcccgtccttgccaggaccggccgcatttgcctcacttttccatgctgggataggagcagtcctgatgctctacgttctcttctggatcaagttggaccttttcacaactctcaagtacctcggcttccttggcatcttccttgtgtttgtgggccatagggctctatcctacctttcctcggtgtcgacaaaacagaagacggcatgagtggacagagttttttccaaccatccatttcttgaggggggggccattgcaggcccttgggtgtcttatgagggagggctcggtttatttcagttggctttgcagaatactgataactagaaaaagtagtaggacctcaccttcgtgtattatgatgatgcacatacaattttctgagtagaatggatgttgaatcatagaactaatgaataatatgaacact

SEQ ID NO: 15197 - protein, 160 aa, Zea mays subsp. mays
  peptide (1)..(160): Ceres Seq. ID no. 13589562
VGDAVMENSFLRPLGHLELDLPDAPEKAPRPPAQAVDPFSKFGPKAEISHIFRAPEKRPPKELSLAFTGLTLLPSIGFLIGLVRLGVNLKNFPSLPGPAAFASLFHAGIGAVLMLYVLFWIKLDLFTTLKYLGFLGIFLVFVGHRALSYLSSVSTKQKTA

SEQ ID NO: 15198 - protein, 155 aa, Zea mays subsp. mays
  peptide (1)..(155): Ceres Seq. ID no. 13589563
MENSFLRPLGHLELDLPDAPEKAPRPPAQAVDPFSKFGPKAEISHIFRAPEKRPPKELSLAFTGLTLLPSIGFLIGLVRLGVNLKNFPSLPGPAAFASLFHAGIGAVLMLYVLFWIKLDLFTTLKYLGFLGIFLVFVGHRALSYLSSVSTKQKTA

SEQ ID NO: 15199 - DNA, 549 bp, Zea mays subsp. mays
  misc_feature (1)..(549): Ceres Seq. ID no. 13624847
  misc_feature (1)..(549): Ortholog of  Ceres SEQ ID NO 13594464 as cited in SEQ ID NO 51203
  misc_feature (1)..(549): Ortholog of  Ceres SEQ ID NO 15224956 as cited in SEQ ID NO 59487
gctagcttttgtctctgtgtcgccttcctcctcctaagtttgtaaacctaattttgagcaaagttcatagcttttatcttcctcatggccactcgtcttcagtttgagaataactgtgaagttggagtcttttcaaaactcactaacgcctattgcttagtcgctattggaggctctgagaatttttacagtgcttttgagtcggagttagctgatgttatccctatcgttaagacctctcttggtggaacacgaatcattggccgtctttgcgctggaaacaagaatggtcttcttgtccctcatacaactactgaccaagagcttcagcacttgaggaacagtttacctgatgcagttgtggtccagagaatcgaggaacgtctgtctgctcttggaaattgcattgcctgcaatgaccatgtcgcccttgctcacaccgatcttgacaaggaaactgaggagataatagcagatgtgcttggtgttgaagttttccgtcagacaattgcaggcaacattcttgttggcagttactgtgccttgtcc

SEQ ID NO: 15200 - protein, 155 aa, Zea mays subsp. mays
  peptide (1)..(155): Ceres Seq. ID no. 13624848
MATRLQFENNCEVGVFSKLTNAYCLVAIGGSENFYSAFESELADVIPIVKTSLGGTRIIGRLCAGNKNGLLVPHTTTDQELQHLRNSLPDAVVVQRIEERLSALGNCIACNDHVALAHTDLDKETEEIIADVLGVEVFRQTIAGNILVGSYCALS

SEQ ID NO: 15201 - DNA, 573 bp, Zea mays subsp. mays
  misc_feature (1)..(573): Ceres Seq. ID no. 13624849
  misc_feature (1)..(573): Ortholog of  Ceres SEQ ID NO 12634327 as cited in SEQ ID NO 0
acgaccatgatttggtaaagaaagcaggaggaagccggcggtgtaggcgacccatggctccacagacgaggagagagaggttggcgggggaggcgcggccgagctcgtcggggctaacaccggcgaagccgggggcggtcgaggtgcagcgccgacgggtgggcagcggttggacgagccgtcggatctccatctacgcctcccgagtctacttcctcctcatcatgctccagatcccgctcttcagggtcccttgtagagctggcacatgcacaactcctattcaagtaacatcatctcagttggtctcaaatgatatattcccagcagctgttgtgaaggccatgctctaccctggagctaccgtgagcagcctaactaaaagcaagacatttccgagttggaatgacctgtttgacatgtacaacctgacagaagcaaaaaatgcttctgcagtagttgatctccagcgtctagagatacttgccggaagctacttctgtgttgctggagcgctcattggcatcataaatcctgggaggatgactttgtttggtacccttttgattatct

SEQ ID NO: 15202 - protein, 190 aa, Zea mays subsp. mays
  peptide (1)..(190): Ceres Seq. ID no. 13624850
DHDLVKKAGGSRRCRRPMAPQTRRERLAGEARPSSSGLTPAKPGAVEVQRRRVGSGWTSRRISIYASRVYFLLIMLQIPLFRVPCRAGTCTTPIQVTSSQLVSNDIFPAAVVKAMLYPGATVSSLTKSKTFPSWNDLFDMYNLTEAKNASAVVDLQRLEILAGSYFCVAGALIGIINPGRMTLFGTLLII

SEQ ID NO: 15203 - protein, 173 aa, Zea mays subsp. mays
  peptide (1)..(173): Ceres Seq. ID no. 13624851
MAPQTRRERLAGEARPSSSGLTPAKPGAVEVQRRRVGSGWTSRRISIYASRVYFLLIMLQIPLFRVPCRAGTCTTPIQVTSSQLVSNDIFPAAVVKAMLYPGATVSSLTKSKTFPSWNDLFDMYNLTEAKNASAVVDLQRLEILAGSYFCVAGALIGIINPGRMTLFGTLLII

SEQ ID NO: 15204 - protein, 116 aa, Zea mays subsp. mays
  peptide (1)..(116): Ceres Seq. ID no. 13624852
MLQIPLFRVPCRAGTCTTPIQVTSSQLVSNDIFPAAVVKAMLYPGATVSSLTKSKTFPSWNDLFDMYNLTEAKNASAVVDLQRLEILAGSYFCVAGALIGIINPGRMTLFGTLLII

SEQ ID NO: 15205 - DNA, 538 bp, Zea mays subsp. mays
  misc_feature (1)..(538): Ceres Seq. ID no. 13625118
  misc_feature (1)..(538): Ortholog of  Ceres SEQ ID NO 14302840 as cited in SEQ ID NO 62295
  misc_feature (1)..(538): Ortholog of  Ceres SEQ ID NO 13596892 as cited in SEQ ID NO 62900
attgcgcacaccttgatgctgggcatgagcaggacggggttggccggagcggcgctgcgggtggcgctgacggcgctgctgccgctggtcctgccggcgtactacgtgtacaagctgaccacgtacctcctcggcgccgtcttccccgaggacgtcgccggcaaggtggtactcatcaccggcgcctcctccggcatcggcgagcacctggcctatgagtacgcgaagcggggagcctacctggnnnnnggtggcgaggagggaggcgagcctccgcgaggtcggcgacgtcgcgctggggctgggctcgccgggcgtcctcgtcctcccggctgacgtctccaagcctcgggactgcgagggcttcatcgacgacacgattagctacttcggtagactggatcacctggtgaacaacgcgtccatctggcaagtgtgcaagttcgaagagatccaggacgtcaggcacttgagagccctgatggacatcaacttctggggccacgtgtacccaacccggctcgccatccctcacctc

SEQ ID NO: 15206 - protein, 111 aa, Zea mays subsp. mays
  peptide (1)..(111): Ceres Seq. ID no. 13625119
  misc_feature (82)..(82): Xaa is any aa, unknown or other
  misc_feature (83)..(83): Xaa is any aa, unknown or other
IAHTLMLGMSRTGLAGAALRVALTALLPLVLPAYYVYKLTTYLLGAVFPEDVAGKVVLITGASSGIGEHLAYEYAKRGAYLXXGGEEGGEPPRGRRRRAGAGLAGRPRPPG

SEQ ID NO: 15207 - protein, 108 aa, Zea mays subsp. mays
  peptide (1)..(108): Ceres Seq. ID no. 13625120
  misc_feature (11)..(11): Xaa is any aa, unknown or other
  misc_feature (12)..(12): Xaa is any aa, unknown or other
MSTRSGEPTWXXVARREASLREVGDVALGLGSPGVLVLPADVSKPRDCEGFIDDTISYFGRLDHLVNNASIWQVCKFEEIQDVRHLRALMDINFWGHVYPTRLAIPHL

SEQ ID NO: 15208 - protein, 106 aa, Zea mays subsp. mays
  peptide (1)..(106): Ceres Seq. ID no. 13625121
  misc_feature (77)..(77): Xaa is any aa, unknown or other
  misc_feature (78)..(78): Xaa is any aa, unknown or other
MLGMSRTGLAGAALRVALTALLPLVLPAYYVYKLTTYLLGAVFPEDVAGKVVLITGASSGIGEHLAYEYAKRGAYLXXGGEEGGEPPRGRRRRAGAGLAGRPRPPG

SEQ ID NO: 15209 - DNA, 596 bp, Zea mays subsp. mays
  misc_feature (1)..(596): Ceres Seq. ID no. 13625083
  misc_feature (1)..(596): Ortholog of  Ceres SEQ ID NO 13582619 as cited in SEQ ID NO 56520
  misc_feature (1)..(596): Ortholog of  Ceres SEQ ID NO 14315846 as cited in SEQ ID NO 58094
  misc_feature (1)..(596): Ortholog of  Ceres SEQ ID NO 14314632 as cited in SEQ ID NO 59923
  misc_feature (1)..(596): Ortholog of  Ceres SEQ ID NO 13660872 as cited in SEQ ID NO 60830
  misc_feature (1)..(596): Ortholog of  Ceres SEQ ID NO 12616221 as cited in SEQ ID NO 63291
acagtgcctctcgctcactgactgactactgtaataccagagatcgaacaacttggtcctgcagctcaagaagagagttttgtgcatttgggggccgggggcaagagagagagagagagccatggcggcggaccagcagccgcagctgcaggaggagatgaacgacgctgccggcggcggcctcaggctgcctccagggttccgcttccacccgagcgacttcgagattgtcagcttctacctcaccaacaaggtgctcaacacgcgcttcacctgcaccgccatcacggaggccgacctaaacaagattgagccatgggacctcccgagcaaggcgaagatgggcgagaaagagtggtacttcttctaccagaaggaccgcaagtacccgacggggctgagggcgaaccgggccaccgaggccggttactggaaggcgacgggcaaggacaaggaggtctacaacgccgcggaaggggtggcggtactggtcggcatgaagaagacgctcgtcttctacaggggcagggctcccaggggtgacaagacaaactgggtcatgcacgagtacaggctcgaaggcagcggcaggctcc

SEQ ID NO: 15210 - protein, 158 aa, Zea mays subsp. mays
  peptide (1)..(158): Ceres Seq. ID no. 13625084
MAADQQPQLQEEMNDAAGGGLRLPPGFRFHPSDFEIVSFYLTNKVLNTRFTCTAITEADLNKIEPWDLPSKAKMGEKEWYFFYQKDRKYPTGLRANRATEAGYWKATGKDKEVYNAAEGVAVLVGMKKTLVFYRGRAPRGDKTNWVMHEYRLEGSGRL

SEQ ID NO: 15211 - protein, 146 aa, Zea mays subsp. mays
  peptide (1)..(146): Ceres Seq. ID no. 13625085
MNDAAGGGLRLPPGFRFHPSDFEIVSFYLTNKVLNTRFTCTAITEADLNKIEPWDLPSKAKMGEKEWYFFYQKDRKYPTGLRANRATEAGYWKATGKDKEVYNAAEGVAVLVGMKKTLVFYRGRAPRGDKTNWVMHEYRLEGSGRL

SEQ ID NO: 15212 - protein, 85 aa, Zea mays subsp. mays
  peptide (1)..(85): Ceres Seq. ID no. 13625086
MGEKEWYFFYQKDRKYPTGLRANRATEAGYWKATGKDKEVYNAAEGVAVLVGMKKTLVFYRGRAPRGDKTNWVMHEYRLEGSGRL

SEQ ID NO: 15213 - DNA, 834 bp, Zea mays subsp. mays
  misc_feature (1)..(834): Ceres Seq. ID no. 13636282
  misc_feature (1)..(834): Ortholog of  Ceres SEQ ID NO 14306355 as cited in SEQ ID NO 1268
  misc_feature (1)..(834): Ortholog of  Ceres SEQ ID NO 15176321 as cited in SEQ ID NO 52814
  misc_feature (1)..(834): Ortholog of  Ceres SEQ ID NO 12563124 as cited in SEQ ID NO 57104
  misc_feature (1)..(834): Ortholog of  Ceres SEQ ID NO 12617639 as cited in SEQ ID NO 65219
  misc_feature (1)..(834): Ortholog of  Ceres SEQ ID NO 15175556 as cited in SEQ ID NO 0
  misc_feature (1)..(834): Ortholog of  Ceres SEQ ID NO 15179982 as cited in SEQ ID NO 0
gtgctttcttagaggtgggttggcttctcctccccctccggttcgggttcgggttcgtgaggttctccggggttcggtttcgtgggtgagcggatcgagatggcggcgtcggatgttgagtaccgctgcttcgtcggcggcctcgcctgggccacggacgaccactccctccacaacgccttcagcacctacggcgaggtcctcgagtccaagatcatcctcgatcgggagacgcagaggtcccgcggcttcggcttcgtcaccttctccacggaggagcgcatgcggaaccgcatcgagggcatgaacggcaaggagctggacggccgcaacatcaccgtcaacgaggcccagtcccgcggcggccgtggaggcggcggcggtgggtacggtggtggccgtggaggcggcggctacggcggtggcgggcgccgtgatggcggcggcggctacggcggtggcggcggctacggtggcggcggcggctacggtggtggtggcggcggctacggcggtggcaaccgtggcggcggctacggcaactccgacgggaactggaggaactgagcggtggggcccgcgcggccaagttatcctgttcgctgccgtgatgtttaccctagtccagagggtttatcttcgttcgtctcgtgtttgttgttgcccatctgtgtttttgattgcaaggtcgctctgtgtcagttgttagtgctgtgttcatcctcggctccagcagacccatgcatcaaacagcatggactgcggatcgatggatgctgttacccccgtcaggctttattctaagttaatcttaaggaaaaaatggtgcttctt

SEQ ID NO: 15214 - protein, 155 aa, Zea mays subsp. mays
  peptide (1)..(155): Ceres Seq. ID no. 13636283
MAASDVEYRCFVGGLAWATDDHSLHNAFSTYGEVLESKIILDRETQRSRGFGFVTFSTEERMRNRIEGMNGKELDGRNITVNEAQSRGGRGGGGGGYGGGRGGGGYGGGGRRDGGGGYGGGGGYGGGGGYGGGGGGYGGGNRGGGYGNSDGNWRN

SEQ ID NO: 15215 - protein, 101 aa, Zea mays subsp. mays
  peptide (1)..(101): Ceres Seq. ID no. 13636284
CFLRGGLASPPPPVRVRVREVLRGSVSWVSGSRWRRRMLSTAASSAASPGPRTTTPSTTPSAPTARSSSPRSSSIGRRRGPAASASSPSPRRSACGTASRA

SEQ ID NO: 15216 - protein, 94 aa, Zea mays subsp. mays
  peptide (1)..(94): Ceres Seq. ID no. 13636285
MRNRIEGMNGKELDGRNITVNEAQSRGGRGGGGGGYGGGRGGGGYGGGGRRDGGGGYGGGGGYGGGGGYGGGGGGYGGGNRGGGYGNSDGNWRN

SEQ ID NO: 15217 - DNA, 589 bp, Zea mays subsp. mays
  misc_feature (1)..(589): Ceres Seq. ID no. 13637313
  misc_feature (1)..(589): Ortholog of  Ceres SEQ ID NO 15176717 as cited in SEQ ID NO 0
aaaaaaaaatccccttgctcacgcgctctctgccccgcttgctatatcctcctagagcccagccaaatcccccgccgtcctcctgttcatctcctcttctccctctcctcctcctcctcctcgtcccccttcctcgggttggaaattggaatggaggcggcgacgatggcgtggacggcggcggtggtcggggcggggctggtgtactggttcgtgtgggtgatgggcgcggcggaggtgaagggcaagcgggcggtggatctcaagatgggatccatcacgcgggacaaggtgcaggacaagtacacccagtactggtccttcttccgccggcccaaggagacggccaccacggcggcgtcggcggagaaggtgccggccttcgtggacaccttctacaacctggtgaccgacatctacgagtggggctggggccagtccttccacttctcgccgtccctgcccggccgctcccaccgcgacgccacgcgcgtccacgaggagcgcgtcgccgacctcctcggcgcccggccgggccaccgcctcctcgacgtcggctgcggcgtcggcgggcccatgcgcgctatcg

SEQ ID NO: 15218 - protein, 196 aa, Zea mays subsp. mays
  peptide (1)..(196): Ceres Seq. ID no. 13637314
KKKSPCSRALCPACYILLEPSQIPRRPPVHLLFSLSSSSSSSPFLGLEIGMEAATMAWTAAVVGAGLVYWFVWVMGAAEVKGKRAVDLKMGSITRDKVQDKYTQYWSFFRRPKETATTAASAEKVPAFVDTFYNLVTDIYEWGWGQSFHFSPSLPGRSHRDATRVHEERVADLLGARPGHRLLDVGCGVGGPMRAI

SEQ ID NO: 15219 - protein, 195 aa, Zea mays subsp. mays
  peptide (1)..(195): Ceres Seq. ID no. 13637315
KKIPLLTRSLPRLLYPPRAQPNPPPSSCSSPLLPLLLLLLVPLPRVGNWNGGGDDGVDGGGGRGGAGVLVRVGDGRGGGEGQAGGGSQDGIHHAGQGAGQVHPVLVLLPPAQGDGHHGGVGGEGAGLRGHLLQPGDRHLRVGLGPVLPLLAVPARPLPPRRHARPRGARRRPPRRPAGPPPPRRRLRRRRAHARY

SEQ ID NO: 15220 - protein, 146 aa, Zea mays subsp. mays
  peptide (1)..(146): Ceres Seq. ID no. 13637316
MEAATMAWTAAVVGAGLVYWFVWVMGAAEVKGKRAVDLKMGSITRDKVQDKYTQYWSFFRRPKETATTAASAEKVPAFVDTFYNLVTDIYEWGWGQSFHFSPSLPGRSHRDATRVHEERVADLLGARPGHRLLDVGCGVGGPMRAI

SEQ ID NO: 15221 - DNA, 1361 bp, Zea mays subsp. mays; identical to SEQ ID NO: 2304
  misc_feature (1)..(1361): Ceres Seq. ID no. 13636326
  misc_feature (1)..(1361): Ortholog of  Ceres SEQ ID NO 14308880 as cited in SEQ ID NO 58793
  misc_feature (1)..(1361): Ortholog of  Ceres SEQ ID NO 13654557 as cited in SEQ ID NO 68444

SEQ ID NO: 15222 - protein, 418 aa, Zea mays subsp. mays; identical to SEQ ID NO: 2305
  peptide (1)..(418): Ceres Seq. ID no. 15219393

SEQ ID NO: 15223 - protein, 404 aa, Zea mays subsp. mays; identical to SEQ ID NO: 2306
  peptide (1)..(404): Ceres Seq. ID no. 15219394

SEQ ID NO: 15224 - protein, 387 aa, Zea mays subsp. mays; identical to SEQ ID NO: 2307
  peptide (1)..(387): Ceres Seq. ID no. 15219395

SEQ ID NO: 15225 - DNA, 519 bp, Zea mays subsp. mays
  misc_feature (1)..(519): Ceres Seq. ID no. 13626773
  misc_feature (1)..(519): Ortholog of  Ceres SEQ ID NO 14308851 as cited in SEQ ID NO 55618
atccttagtgtatctcctggccgtttctgcttcatcttctcgaatcgtcttctcttcttcttctcaaagtttagtgaaagatggccgatggtgaggacattcagccccttgtttgtgacaatggaactggaatggtgaaggctggatttgctggtgatgatgctccaagggctgtgttcccgagtattgttggtcgtcctagacacactggtgtcatggttgggatgggtcagaaagacgcttacgttggtgacgaagctcagtccaagagaggtattcttaccctcaagtatccgattgagcatggtattgtgagcaactgggatgacatggagaagatctggcatcacactttctacaacgagcttcgtgttgcacctgaagagcacccggttcttctcactgaggcgccgcttaaccctaaggctaacagggagaagatgactcagatcatgttcgagactttcaatgtccctgccatgtatgttgctattcaggctgttctttctctttacgcta

SEQ ID NO: 15226 - protein, 146 aa, Zea mays subsp. mays
  peptide (1)..(146): Ceres Seq. ID no. 13626774
MADGEDIQPLVCDNGTGMVKAGFAGDDAPRAVFPSIVGRPRHTGVMVGMGQKDAYVGDEAQSKRGILTLKYPIEHGIVSNWDDMEKIWHHTFYNELRVAPEEHPVLLTEAPLNPKANREKMTQIMFETFNVPAMYVAIQAVLSLYA

SEQ ID NO: 15227 - protein, 129 aa, Zea mays subsp. mays
  peptide (1)..(129): Ceres Seq. ID no. 13626775
MVKAGFAGDDAPRAVFPSIVGRPRHTGVMVGMGQKDAYVGDEAQSKRGILTLKYPIEHGIVSNWDDMEKIWHHTFYNELRVAPEEHPVLLTEAPLNPKANREKMTQIMFETFNVPAMYVAIQAVLSLYA

SEQ ID NO: 15228 - protein, 101 aa, Zea mays subsp. mays
  peptide (1)..(101): Ceres Seq. ID no. 13626776
MVGMGQKDAYVGDEAQSKRGILTLKYPIEHGIVSNWDDMEKIWHHTFYNELRVAPEEHPVLLTEAPLNPKANREKMTQIMFETFNVPAMYVAIQAVLSLYA

SEQ ID NO: 15229 - DNA, 945 bp, Zea mays subsp. mays; identical to SEQ ID NO: 3959
  misc_feature (1)..(945): Ceres Seq. ID no. 13636168
  misc_feature (1)..(945): Ortholog of  Ceres SEQ ID NO 14311229 as cited in SEQ ID NO 53262

SEQ ID NO: 15230 - protein, 195 aa, Zea mays subsp. mays; identical to SEQ ID NO: 3960
  peptide (1)..(195): Ceres Seq. ID no. 13636169

SEQ ID NO: 15231 - protein, 134 aa, Zea mays subsp. mays; identical to SEQ ID NO: 3961
  peptide (1)..(134): Ceres Seq. ID no. 13636170

SEQ ID NO: 15232 - protein, 107 aa, Zea mays subsp. mays; identical to SEQ ID NO: 3962
  peptide (1)..(107): Ceres Seq. ID no. 13636171

SEQ ID NO: 15233 - DNA, 1931 bp, Zea mays subsp. mays; identical to SEQ ID NO: 10020
  misc_feature (1)..(1931): Ceres Seq. ID no. 13636275
  misc_feature (1)..(1931): Ortholog of  Ceres SEQ ID NO 14309934 as cited in SEQ ID NO 20583
  misc_feature (1)..(1931): Ortholog of  Ceres SEQ ID NO 15176941 as cited in SEQ ID NO 55559
  misc_feature (1)..(1931): Ortholog of  Ceres SEQ ID NO 13654989 as cited in SEQ ID NO 63117
  misc_feature (1)..(1931): Ortholog of  Ceres SEQ ID NO 13584744 as cited in SEQ ID NO 69137

SEQ ID NO: 15234 - protein, 343 aa, Zea mays subsp. mays; identical to SEQ ID NO: 10021
  peptide (1)..(343): Ceres Seq. ID no. 13636276

SEQ ID NO: 15235 - protein, 211 aa, Zea mays subsp. mays; identical to SEQ ID NO: 10022
  peptide (1)..(211): Ceres Seq. ID no. 13636277

SEQ ID NO: 15236 - DNA, 549 bp, Zea mays subsp. mays
  misc_feature (1)..(549): Ceres Seq. ID no. 13625268
  misc_feature (1)..(549): Ortholog of  Ceres SEQ ID NO 14315892 as cited in SEQ ID NO 57776
accaacaggaaaaaaggcccagaggcggtgccgtgaccgattcgagacgcaagagaaggatcgagacgaggcggcggttttccgggggcagcatcggcgcggccacgaaagatgtcttactcaagaggctcaaggtatggatctcgctcgccttactcgagaagcacaaggtaccgaagtcgctctaggagtgtcgactctagtgatgctgaaaaccctgggaacaacctgtatgtgactggtttgtcagctcgtgtaacggatcgagatctggagaagcacttctccactgagggtgaggtgattgatgcaagcgttgtatatgatccttggacaagggaatcacggggttttggttttgttaccatggctgctgttaaagatgcagatcgctgcatcaaatatctggaccgttctgtgttgcaaggtcgggtcataactgttgagaagattttgttgacagcaacagggtagatgttggtagctgctctgcaacaaactgatacaacctaacaccaaaccatgccaacctcagccaaagggttgtat

SEQ ID NO: 15237 - protein, 120 aa, Zea mays subsp. mays
  peptide (1)..(120): Ceres Seq. ID no. 13625269
MSYSRGSRYGSRSPYSRSTRYRSRSRSVDSSDAENPGNNLYVTGLSARVTDRDLEKHFSTEGEVIDASVVYDPWTRESRGFGFVTMAAVKDADRCIKYLDRSVLQGRVITVEKILLTATG

SEQ ID NO: 15238 - protein, 78 aa, Zea mays subsp. mays
  peptide (1)..(78): Ceres Seq. ID no. 13625270
PTGKKAQRRCRDRFETQEKDRDEAAVFRGQHRRGHERCLTQEAQGMDLARLTREAQGTEVALGVSTLVMLKTLGTTCM

SEQ ID NO: 15239 - protein, 61 aa, Zea mays subsp. mays
  peptide (1)..(61): Ceres Seq. ID no. 13625271
QQEKRPRGGAVTDSRRKRRIETRRRFSGGSIGAATKDVLLKRLKVWISLALLEKHKVPKSL

SEQ ID NO: 15240 - DNA, 514 bp, Zea mays subsp. mays
  misc_feature (1)..(514): Ceres Seq. ID no. 13625317
  misc_feature (1)..(514): Ortholog of  Ceres SEQ ID NO 14309373 as cited in SEQ ID NO 0
aaaacttctcctcttgaggaaggcagcccgagcgagcgcgctgcaatggcggactcgtcggcgccgacgagagtgatgatggcggtgaacgagtcgtcgctcaaggggtacccgcacccctccatcagctgtcgcaccgccttcgactggacgctctccaagctcgtccgctccaaccctgggggcttccacttcctcttcgtccacgttcatgtccccgacgaggacggatttgatgacatggatagcatctatgcttcgccggaggactttcaccaaatgaagcagagagacaagataagagggcttcatttgctcgagtactttgtaaaccaatgccatcagttagggataaaatgcgaggcatggatcagacatggagatccaaaggaggttatctgcagcgaagtgaagagagtccagcctgaccttctagttgtgggaagtaggggtcttgggccatttcagaggaggacaagcctggtgcaatggtgagagctatctcgctgagtca

SEQ ID NO: 15241 - protein, 164 aa, Zea mays subsp. mays
  peptide (1)..(164): Ceres Seq. ID no. 13625318
KTSPLEEGSPSERAAMADSSAPTRVMMAVNESSLKGYPHPSISCRTAFDWTLSKLVRSNPGGFHFLFVHVHVPDEDGFDDMDSIYASPEDFHQMKQRDKIRGLHLLEYFVNQCHQLGIKCEAWIRHGDPKEVICSEVKRVQPDLLVVGSRGLGPFQRRTSLVQW

SEQ ID NO: 15242 - protein, 149 aa, Zea mays subsp. mays
  peptide (1)..(149): Ceres Seq. ID no. 13625319
MADSSAPTRVMMAVNESSLKGYPHPSISCRTAFDWTLSKLVRSNPGGFHFLFVHVHVPDEDGFDDMDSIYASPEDFHQMKQRDKIRGLHLLEYFVNQCHQLGIKCEAWIRHGDPKEVICSEVKRVQPDLLVVGSRGLGPFQRRTSLVQW

SEQ ID NO: 15243 - protein, 139 aa, Zea mays subsp. mays
  peptide (1)..(139): Ceres Seq. ID no. 13625320
MMAVNESSLKGYPHPSISCRTAFDWTLSKLVRSNPGGFHFLFVHVHVPDEDGFDDMDSIYASPEDFHQMKQRDKIRGLHLLEYFVNQCHQLGIKCEAWIRHGDPKEVICSEVKRVQPDLLVVGSRGLGPFQRRTSLVQW

SEQ ID NO: 15244 - DNA, 955 bp, Zea mays subsp. mays
  misc_feature (1)..(955): Ceres Seq. ID no. 13627624
  misc_feature (1)..(955): Ortholog of  Ceres SEQ ID NO 12609631 as cited in SEQ ID NO 51862
  misc_feature (1)..(955): Ortholog of  Ceres SEQ ID NO 13659322 as cited in SEQ ID NO 67043
gaaccgcacaaacgcgctcggcgcttccccacccaaaaaggaaaaccaaccaccactcccaccaccctccgcctccgcctgcgccacagctgccgattcgaaagccctcgtcctgacccctcgcaaaaccctagctccaaccaccatgaagggcaaggccaacgcctccaagaaggatgaggccaggctccgggccggcggcggcggcgccggaaagcgcaagaaggccgccgcgagcggcaagcccaagcgccctccctccgccttcttcgtcttcatgtctgaattcaggcaggagtaccaggcgcagcaccctggcaacaagagcgttgcggccgtgagcaaggcagcaggggaaaagtggcgctctatgtcagagcaagagaagcaaccctatgtggaccaagctgggcagaagaagcaggactatgagaagactaaggcaaatattgagaaggagagcacaagctcaaagaaggctaagactgatgacgacgatggctcgaagtccgaggtcgatgatgaggatggcggtagtgacgaggataacgacgacgacgagtaaatagtatttccgctgttgtgaggtagcaaatcgattgttaggtccccaattagctcactggtttgctatctttaatgttaagttgtttggaacaggtgtttatgaaggggatctattagtttcgtgaggttgttagtttagtgcattagcaaagaaaaagccgaatgctgctagctattatgttgcttttcttttgctaatcacttgtgtcacaactttctgtacctgtttcattgactaatctagtgactagtcagttatgggtttaatgtttggttttggttttatatatttctttgttgcattctgtgcggtctacggaagtcatctgtgctgtatgaatgatgaatatctgcttgtggctcgtttcagtttagtgagtttttgttt

SEQ ID NO: 15245 - protein, 187 aa, Zea mays subsp. mays
  peptide (1)..(187): Ceres Seq. ID no. 13627625
NRTNALGASPPKKENQPPLPPPSASACATAADSKALVLTPRKTLAPTTMKGKANASKKDEARLRAGGGGAGKRKKAAASGKPKRPPSAFFVFMSEFRQEYQAQHPGNKSVAAVSKAAGEKWRSMSEQEKQPYVDQAGQKKQDYEKTKANIEKESTSSKKAKTDDDDGSKSEVDDEDGGSDEDNDDDE

SEQ ID NO: 15246 - protein, 139 aa, Zea mays subsp. mays
  peptide (1)..(139): Ceres Seq. ID no. 13627626
MKGKANASKKDEARLRAGGGGAGKRKKAAASGKPKRPPSAFFVFMSEFRQEYQAQHPGNKSVAAVSKAAGEKWRSMSEQEKQPYVDQAGQKKQDYEKTKANIEKESTSSKKAKTDDDDGSKSEVDDEDGGSDEDNDDDE

SEQ ID NO: 15247 - protein, 95 aa, Zea mays subsp. mays
  peptide (1)..(95): Ceres Seq. ID no. 13627627
MSEFRQEYQAQHPGNKSVAAVSKAAGEKWRSMSEQEKQPYVDQAGQKKQDYEKTKANIEKESTSSKKAKTDDDDGSKSEVDDEDGGSDEDNDDDE

SEQ ID NO: 15248 - DNA, 1462 bp, Zea mays subsp. mays; identical to SEQ ID NO: 10801
  misc_feature (1)..(1462): Ceres Seq. ID no. 13579635
  misc_feature (1)..(1462): Ortholog of  Ceres SEQ ID NO 13596039 as cited in SEQ ID NO 62117

SEQ ID NO: 15249 - protein, 410 aa, Zea mays subsp. mays; identical to SEQ ID NO: 10802
  peptide (1)..(410): Ceres Seq. ID no. 13579636

SEQ ID NO: 15250 - protein, 381 aa, Zea mays subsp. mays; identical to SEQ ID NO: 10803
  peptide (1)..(381): Ceres Seq. ID no. 13579637

SEQ ID NO: 15251 - protein, 305 aa, Zea mays subsp. mays; identical to SEQ ID NO: 10804
  peptide (1)..(305): Ceres Seq. ID no. 13579638

SEQ ID NO: 15252 - DNA, 455 bp, Zea mays subsp. mays
  misc_feature (1)..(455): Ceres Seq. ID no. 13636910
  misc_feature (1)..(455): Ortholog of  Ceres SEQ ID NO 15175269 as cited in SEQ ID NO 63840
taatcgtccatccgtatttccgtcacaactcacaacccgagccccccaaacccgaagcagcaggagctcccctgaccttgctccgcctccgatcaaggaaaaggaagatgagctactacggccagcagccccccgtcggcgtcccgccgcagcaaggctacccggggaaggacggctacccgccagcggggtacccgccggccggctaccccccgccggcgcagggctacccgccgcagggctacccgcagcagggttacccacagcagggctacccgccgcagtacgcgcagccgcctccacagcagcagcagagcagcgggccttccttcatggaaggatgcttggctgccctctgctgctgctgcctcctggacgcctgcttctgacggaaccatccgtgccgggtccaacacggctgcaagtgaagcaaccagcttacggaagagctggaa

SEQ ID NO: 15253 - protein, 151 aa, Zea mays subsp. mays
  peptide (1)..(151): Ceres Seq. ID no. 13636911
NRPSVFPSQLTTRAPQTRSSRSSPDLAPPPIKEKEDELLRPAAPRRRPAAARLPGEGRLPASGVPAGRLPPAGAGLPAAGLPAAGLPTAGLPAAVRAAASTAAAEQRAFLHGRMLGCPLLLLPPGRLLLTEPSVPGPTRLQVKQPAYGRAG

SEQ ID NO: 15254 - protein, 128 aa, Zea mays subsp. mays
  peptide (1)..(128): Ceres Seq. ID no. 13636912
IVHPYFRHNSQPEPPKPEAAGAPLTLLRLRSRKRKMSYYGQQPPVGVPPQQGYPGKDGYPPAGYPPAGYPPPAQGYPPQGYPQQGYPQQGYPPQYAQPPPQQQQSSGPSFMEGCLAALCCCCLLDACF

SEQ ID NO: 15255 - protein, 93 aa, Zea mays subsp. mays
  peptide (1)..(93): Ceres Seq. ID no. 13636913
MSYYGQQPPVGVPPQQGYPGKDGYPPAGYPPAGYPPPAQGYPPQGYPQQGYPQQGYPPQYAQPPPQQQQSSGPSFMEGCLAALCCCCLLDACF

SEQ ID NO: 15256 - DNA, 538 bp, Zea mays subsp. mays
  misc_feature (1)..(538): Ceres Seq. ID no. 13629237
  misc_feature (1)..(538): Ortholog of  Ceres SEQ ID NO 12635789 as cited in SEQ ID NO 0
agttttcttgtgccgtagctttgtgacaaaagaagtagctgtttgcctctttgcagtgaaagcactaccaacaagaagatgattatcacagagaccaaccgcagagagatctgcaaataccttttcaaagaaggagtattgttcgccaagaaggacttcaatctcccaaagcatccgttgattgagtcagtgcccaacctgcaagtgatcaagctcatgcagagtttcaaatccaaggagtacgttagggagaccttcgcttggatgcactactattggtttctcaccaacgaagggattgagttcttgagaacttatcttaaccttccctcggatgttgttcccgcgaccttgaagaagtctgctaagcccattggtcgttccctttggtggccctcctggtgnnnngccctagaggtcctcgctttgagnanaccggtccntagnnntggtgaccgtgaggggtaccgagggccacnnnngcggtgatgcagcaggtggaaaagggtggagctccagctgattaccagccgctttc

SEQ ID NO: 15257 - protein, 136 aa, Zea mays subsp. mays
  peptide (1)..(136): Ceres Seq. ID no. 13629238
  misc_feature (109)..(109): Xaa is any aa, unknown or other
  misc_feature (110)..(110): Xaa is any aa, unknown or other
  misc_feature (118)..(118): Xaa is any aa, unknown or other
  misc_feature (119)..(119): Xaa is any aa, unknown or other
  misc_feature (122)..(122): Xaa is any aa, unknown or other
  misc_feature (123)..(123): Xaa is any aa, unknown or other
  misc_feature (124)..(124): Xaa is any aa, unknown or other
  misc_feature (134)..(134): Xaa is any aa, unknown or other
  misc_feature (135)..(135): Xaa is any aa, unknown or other
MIITETNRREICKYLFKEGVLFAKKDFNLPKHPLIESVPNLQVIKLMQSFKSKEYVRETFAWMHYYWFLTNEGIEFLRTYLNLPSDVVPATLKKSAKPIGRSLWWPSWXXALEVLALXXPVXXXGDREGYRGPXXR

SEQ ID NO: 15258 - protein, 90 aa, Zea mays subsp. mays
  peptide (1)..(90): Ceres Seq. ID no. 13629239
  misc_feature (63)..(63): Xaa is any aa, unknown or other
  misc_feature (64)..(64): Xaa is any aa, unknown or other
  misc_feature (72)..(72): Xaa is any aa, unknown or other
  misc_feature (73)..(73): Xaa is any aa, unknown or other
  misc_feature (76)..(76): Xaa is any aa, unknown or other
  misc_feature (77)..(77): Xaa is any aa, unknown or other
  misc_feature (78)..(78): Xaa is any aa, unknown or other
  misc_feature (88)..(88): Xaa is any aa, unknown or other
  misc_feature (89)..(89): Xaa is any aa, unknown or other
MQSFKSKEYVRETFAWMHYYWFLTNEGIEFLRTYLNLPSDVVPATLKKSAKPIGRSLWWPSWXXALEVLALXXPVXXXGDREGYRGPXXR

SEQ ID NO: 15259 - protein, 74 aa, Zea mays subsp. mays
  peptide (1)..(74): Ceres Seq. ID no. 13629240
  misc_feature (47)..(47): Xaa is any aa, unknown or other
  misc_feature (48)..(48): Xaa is any aa, unknown or other
  misc_feature (56)..(56): Xaa is any aa, unknown or other
  misc_feature (57)..(57): Xaa is any aa, unknown or other
  misc_feature (60)..(60): Xaa is any aa, unknown or other
  misc_feature (61)..(61): Xaa is any aa, unknown or other
  misc_feature (62)..(62): Xaa is any aa, unknown or other
  misc_feature (72)..(72): Xaa is any aa, unknown or other
  misc_feature (73)..(73): Xaa is any aa, unknown or other
MHYYWFLTNEGIEFLRTYLNLPSDVVPATLKKSAKPIGRSLWWPSWXXALEVLALXXPVXXXGDREGYRGPXXR

SEQ ID NO: 15260 - DNA, 1150 bp, Zea mays subsp. mays
  misc_feature (1)..(1150): Ceres Seq. ID no. 13636132
  misc_feature (1)..(1150): Ortholog of  Ceres SEQ ID NO 14304202 as cited in SEQ ID NO 56346
  misc_feature (1)..(1150): Ortholog of  Ceres SEQ ID NO 14304159 as cited in SEQ ID NO 56494
  misc_feature (1)..(1150): Ortholog of  Ceres SEQ ID NO 14314198 as cited in SEQ ID NO 57472
  misc_feature (1)..(1150): Ortholog of  Ceres SEQ ID NO 12613472 as cited in SEQ ID NO 60611
  misc_feature (1)..(1150): Ortholog of  Ceres SEQ ID NO 12623915 as cited in SEQ ID NO 61013
  misc_feature (1)..(1150): Ortholog of  Ceres SEQ ID NO 15173393 as cited in SEQ ID NO 63704
acacataaccagcacacagctctcgccttctctctcccatcggcacacccgagctcgctccctccttccacgtcgaggtccgagtcctgctttgatggcgaccgacgtggctgagactcccgcgccgttggtggatgcggccccagaggcgcccgccgacgccccggcggcgcctgctgccgacgcgaagccggccaaggccaagaaggccaccgcgccgaagaagcgcgccagcccgacccacccgccgtacgccgagatggtctcggaggcgatcacgtcgctcaaggagaggacggggtccagcagctatgcgattgccaagttcgtggaggacaagcacaaggacaagctcccgcccaacttccgcaagcttctgaacgttcagctcaagaagctcgtcgccggcggcaagctgaccaaggtgaagaactcgtacaagctgtcgtccgccaccaagccgaatcccaagcccaaggccgccccgaagaagcccaagaccggcgctaagaagcccaaggccgctgccaagcccaaagctaagacccccgccaaggcgaagcccgccacaaagcccaagcccgccgcgaagccgaaagccgtagtgaaaccgaagacacccgccaagcccaaggccaagccagctgccaaggcgaagcccaagaccgccggcgctaagccgaagccacttgctaagaaggccggccgcgccaaggcggcgaagacgtcggccaaggacacgccagggaagaaggcccctgccaagaaggccgctccctcaaagaaggcggcgaccccggtgcggaaagcgccgtcccgtaaggccaagaagtaaagcggccaagaaggggggcgcgatgctgtaaatttgatatcggagaggctcgggtacactggtcattcagtatccgagaccgatagctgaggctagtggcgatggaggactgtgttattactactataaactggtggttgtgtttctgtaactggtgaatgatcaagttggaagcttttagtctatcttagatatatcagtggatagtgttttttgtattttcgttttcttttccaatgtgtgttgggtcttgtggattatcctttttttctaatctaatacaatgaagaggcatgtcttttgaagcttcccctg

SEQ ID NO: 15261 - protein, 277 aa, Zea mays subsp. mays
  peptide (1)..(277): Ceres Seq. ID no. 13636133
HITSTQLSPSLSHRHTRARSLLPRRGPSPALMATDVAETPAPLVDAAPEAPADAPAAPAADAKPAKAKKATAPKKRASPTHPPYAEMVSEAITSLKERTGSSSYAIAKFVEDKHKDKLPPNFRKLLNVQLKKLVAGGKLTKVKNSYKLSSATKPNPKPKAAPKKPKTGAKKPKAAAKPKAKTPAKAKPATKPKPAAKPKAVVKPKTPAKPKAKPAAKAKPKTAGAKPKPLAKKAGRAKAAKTSAKDTPGKKAPAKKAAPSKKAATPVRKAPSRKAKK

SEQ ID NO: 15262 - protein, 246 aa, Zea mays subsp. mays
  peptide (1)..(246): Ceres Seq. ID no. 13636134
MATDVAETPAPLVDAAPEAPADAPAAPAADAKPAKAKKATAPKKRASPTHPPYAEMVSEAITSLKERTGSSSYAIAKFVEDKHKDKLPPNFRKLLNVQLKKLVAGGKLTKVKNSYKLSSATKPNPKPKAAPKKPKTGAKKPKAAAKPKAKTPAKAKPATKPKPAAKPKAVVKPKTPAKPKAKPAAKAKPKTAGAKPKPLAKKAGRAKAAKTSAKDTPGKKAPAKKAAPSKKAATPVRKAPSRKAKK

SEQ ID NO: 15263 - protein, 191 aa, Zea mays subsp. mays
  peptide (1)..(191): Ceres Seq. ID no. 13636135
MVSEAITSLKERTGSSSYAIAKFVEDKHKDKLPPNFRKLLNVQLKKLVAGGKLTKVKNSYKLSSATKPNPKPKAAPKKPKTGAKKPKAAAKPKAKTPAKAKPATKPKPAAKPKAVVKPKTPAKPKAKPAAKAKPKTAGAKPKPLAKKAGRAKAAKTSAKDTPGKKAPAKKAAPSKKAATPVRKAPSRKAKK

SEQ ID NO: 15264 - DNA, 1665 bp, Zea mays subsp. mays; identical to SEQ ID NO: 11280
  misc_feature (1)..(1665): Ceres Seq. ID no. 13633473
  misc_feature (1)..(1665): Ortholog of  Ceres SEQ ID NO 15171430 as cited in SEQ ID NO 51500
  misc_feature (1)..(1665): Ortholog of  Ceres SEQ ID NO 14304944 as cited in SEQ ID NO 53041
  misc_feature (1)..(1665): Ortholog of  Ceres SEQ ID NO 14307253 as cited in SEQ ID NO 54783
  misc_feature (1)..(1665): Ortholog of  Ceres SEQ ID NO 15172476 as cited in SEQ ID NO 54945
  misc_feature (1)..(1665): Ortholog of  Ceres SEQ ID NO 13594213 as cited in SEQ ID NO 57038
  misc_feature (1)..(1665): Ortholog of  Ceres SEQ ID NO 14312300 as cited in SEQ ID NO 58632
  misc_feature (1)..(1665): Ortholog of  Ceres SEQ ID NO 15176106 as cited in SEQ ID NO 60324
  misc_feature (1)..(1665): Ortholog of  Ceres SEQ ID NO 13654989 as cited in SEQ ID NO 63117
  misc_feature (1)..(1665): Ortholog of  Ceres SEQ ID NO 14313228 as cited in SEQ ID NO 67057
  misc_feature (1)..(1665): Ortholog of  Ceres SEQ ID NO 13584744 as cited in SEQ ID NO 69137

SEQ ID NO: 15265 - protein, 419 aa, Zea mays subsp. mays; identical to SEQ ID NO: 11281
  peptide (1)..(419): Ceres Seq. ID no. 13633474

SEQ ID NO: 15266 - protein, 399 aa, Zea mays subsp. mays; identical to SEQ ID NO: 11282
  peptide (1)..(399): Ceres Seq. ID no. 13633475

SEQ ID NO: 15267 - protein, 375 aa, Zea mays subsp. mays; identical to SEQ ID NO: 11283
  peptide (1)..(375): Ceres Seq. ID no. 13633476

SEQ ID NO: 15268 - DNA, 419 bp, Zea mays subsp. mays
  misc_feature (1)..(419): Ceres Seq. ID no. 13629513
  misc_feature (1)..(419): Ortholog of  Ceres SEQ ID NO 12626078 as cited in SEQ ID NO 69113
gccgccaacccccaaacaaaaccctaggccaccaccaggcacaagcagagcagaagcagacatggccaccattccgaccaccgattctggcctcgtcctcagttcctccgctctcctccggaggactaggagggccgcctcatccgtcaccgccaggctgccagccgtcgcccgccgtcgcccgcagctcctcgtgcgtgcctccgccaaggagatcgccttcgaccagggctccagagccgcccttcaggccggcgtcaanannntcgccggcgcgggcggcgtcaccctcggacccagagnnnnnaatgttgtcttggatgagtttggaacccccaaagtggtcaatgatggagttaccattgcccgcgctattgagctcgctgatcccatggagaatgctggtgcttccttgattc

SEQ ID NO: 15269 - protein, 139 aa, Zea mays subsp. mays
  peptide (1)..(139): Ceres Seq. ID no. 13629514
  misc_feature (87)..(87): Xaa is any aa, unknown or other
  misc_feature (88)..(88): Xaa is any aa, unknown or other
  misc_feature (89)..(89): Xaa is any aa, unknown or other
  misc_feature (101)..(101): Xaa is any aa, unknown or other
  misc_feature (102)..(102): Xaa is any aa, unknown or other
PPTPKQNPRPPPGTSRAEADMATIPTTDSGLVLSSSALLRRTRRAASSVTARLPAVARRRPQLLVRASAKEIAFDQGSRAALQAGVXXXAGAGGVTLGPRXXNVVLDEFGTPKVVNDGVTIARAIELADPMENAGASLI

SEQ ID NO: 15270 - protein, 137 aa, Zea mays subsp. mays
  peptide (1)..(137): Ceres Seq. ID no. 13629515
  misc_feature (87)..(87): Xaa is any aa, unknown or other
  misc_feature (88)..(88): Xaa is any aa, unknown or other
  misc_feature (101)..(101): Xaa is any aa, unknown or other
  misc_feature (102)..(102): Xaa is any aa, unknown or other
RQPPNKTLGHHQAQAEQKQTWPPFRPPILASSSVPPLSSGGLGGPPHPSPPGCQPSPAVARSSSCVPPPRRSPSTRAPEPPFRPASXXSPARAASPSDPEXXMLSWMSLEPPKWSMMELPLPALLSSLIPWRMLVLP

SEQ ID NO: 15271 - protein, 119 aa, Zea mays subsp. mays
  peptide (1)..(119): Ceres Seq. ID no. 13629516
  misc_feature (67)..(67): Xaa is any aa, unknown or other
  misc_feature (68)..(68): Xaa is any aa, unknown or other
  misc_feature (69)..(69): Xaa is any aa, unknown or other
  misc_feature (81)..(81): Xaa is any aa, unknown or other
  misc_feature (82)..(82): Xaa is any aa, unknown or other
MATIPTTDSGLVLSSSALLRRTRRAASSVTARLPAVARRRPQLLVRASAKEIAFDQGSRAALQAGVXXXAGAGGVTLGPRXXNVVLDEFGTPKVVNDGVTIARAIELADPMENAGASLI

SEQ ID NO: 15272 - DNA, 546 bp, Zea mays subsp. mays
  misc_feature (1)..(546): Ceres Seq. ID no. 13629579
  misc_feature (1)..(546): Ortholog of  Ceres SEQ ID NO 13656228 as cited in SEQ ID NO 65648
ctctttccattagccatcctagccttcgccccctcgacgagaagaaccacctcaaaaccgaacagccgcaaaagaaagctgctagctactctatacatgataactaggtagatatatataagcttccggggctttaatttggttgggagttccggccatgagcgagaagagattcatgcatggcgcaaatttcatgtgtgttttgcagaacaggaccgtgaagtaatatatatataatgacgaagtcaggggcgctacaacttgctcggagcaccggagggtcgcttagcaaggaccaagtcaaatccgccgttgatcagtatgtgaagtaccacgacctccacggaggcgaacaagaatcaagaaagtcaaattacgctgatttggcaaacaagtactatgatcttgtcactggcttctacgaatatggatggggcgactcattccattttgctggcggatatccgggtgaaacttcccgtgaagccattaagcggcaccagcattttatggcactacaattggggctcaagaagggtatgaagg

SEQ ID NO: 15273 - protein, 103 aa, Zea mays subsp. mays
  peptide (1)..(103): Ceres Seq. ID no. 13629580
MTKSGALQLARSTGGSLSKDQVKSAVDQYVKYHDLHGGEQESRKSNYADLANKYYDLVTGFYEYGWGDSFHFAGGYPGETSREAIKRHQHFMALQLGLKKGMK

SEQ ID NO: 15274 - DNA, 824 bp, Zea mays subsp. mays
  misc_feature (1)..(824): Ceres Seq. ID no. 13636883
  misc_feature (1)..(824): Ortholog of  Ceres SEQ ID NO 15176177 as cited in SEQ ID NO 0
accctagcctctatctcattccactccgacattcacgtgcagctgtcgggagcaggcaatggcgccggatctaagcgaactcgccgccgccgctccagcccgtggcgcctacctcgccggcgtcggtgtcgcggtcctcctcgctgcctccttcctcccagtagccgagtcgtcctgcgtgcgagataactcattggtgagagacataagccaaatgccgcaaagcagctatgggattgaaggattgtcacatataacagttgctggtgcgctcaatcatgggatgaaggaggtggaagtgtggcttcagacaataagtccaggtcaaaggacgccaatccacaggcattcctgtgaagaagttttcactgtcctcaaagggaagggtacgctcttgatgggatcaagctcactaaagtacccagggcagccacaggaaattcctttctttcagaataccacattttcaatccctgtaaatgatccacaccaggtttggaattctgacgagcacgaagatttgcaagttcttgtgatcatatcgagaccgcctgctaagatatttttatatgatgattggagcatgcctcatacagccgcggtactgaaattccccttcgtctgggatgaggactgcttcgaagcagcaaaagacgaactctaggtcacaagtgtttcctgcaatttatctgcttcatccatgatcctgctggtgctggactactacaattctcagcactagttgtaataaagccagtgcgcttttcatgtataattctgtattgtggctcgcgaaaataaaatttggcaacggtttatgaact

SEQ ID NO: 15275 - protein, 201 aa, Zea mays subsp. mays
  peptide (1)..(201): Ceres Seq. ID no. 13636884
MAPDLSELAAAAPARGAYLAGVGVAVLLAASFLPVAESSCVRDNSLVRDISQMPQSSYGIEGLSHITVAGALNHGMKEVEVWLQTISPGQRTPIHRHSCEEVFTVLKGKGTLLMGSSSLKYPGQPQEIPFFQNTTFSIPVNDPHQVWNSDEHEDLQVLVIISRPPAKIFLYDDWSMPHTAAVLKFPFVWDEDCFEAAKDEL

SEQ ID NO: 15276 - protein, 149 aa, Zea mays subsp. mays
  peptide (1)..(149): Ceres Seq. ID no. 13636885
MPQSSYGIEGLSHITVAGALNHGMKEVEVWLQTISPGQRTPIHRHSCEEVFTVLKGKGTLLMGSSSLKYPGQPQEIPFFQNTTFSIPVNDPHQVWNSDEHEDLQVLVIISRPPAKIFLYDDWSMPHTAAVLKFPFVWDEDCFEAAKDEL

SEQ ID NO: 15277 - protein, 126 aa, Zea mays subsp. mays
  peptide (1)..(126): Ceres Seq. ID no. 13636886
MKEVEVWLQTISPGQRTPIHRHSCEEVFTVLKGKGTLLMGSSSLKYPGQPQEIPFFQNTTFSIPVNDPHQVWNSDEHEDLQVLVIISRPPAKIFLYDDWSMPHTAAVLKFPFVWDEDCFEAAKDEL

SEQ ID NO: 15278 - DNA, 542 bp, Zea mays subsp. mays
  misc_feature (1)..(542): Ceres Seq. ID no. 13629835
  misc_feature (1)..(542): Ortholog of  Ceres SEQ ID NO 12780574 as cited in SEQ ID NO 65624
gaagccagagaaaaggttactccgcagaaagcaaaaccctagcccactccggcgcgccaccggccgatggtttcgatgagcaccacgccgaagccgcttgactccgccgtcgtcagcgcagccgttgacggcggggatgagggtggtggtggaggcggtggcgggaagaagcaggcgcacggggcggtgatggcgccgccaccgatggtggtcccggccgcggcgcccgcggccgaggaggaggttcggaaggtcaggaagccgtacaccatcaccaagtcgcgggagagctggacggagccggagcacgacaagttcctcgaggccctgcagctttttgatcgtgattggaagaaaattgaagcatatgttggctcaaagactgttatacagataaggagnnatgcacagaatacctttcctgaaggttcagaagaaatggtacgggcgagcatctgcccccacccaggccaaaacgaaaggcagctcatccatatccacagaaaggcatctaaaaatgtttctcaagctattttatcaca

SEQ ID NO: 15279 - protein, 158 aa, Zea mays subsp. mays
  peptide (1)..(158): Ceres Seq. ID no. 13629836
  misc_feature (112)..(112): Xaa is any aa, unknown or other
  misc_feature (113)..(113): Xaa is any aa, unknown or other
MVSMSTTPKPLDSAVVSAAVDGGDEGGGGGGGGKKQAHGAVMAPPPMVVPAAAPAAEEEVRKVRKPYTITKSRESWTEPEHDKFLEALQLFDRDWKKIEAYVGSKTVIQIRXXAQNTFPEGSEEMVRASICPHPGQNERQLIHIHRKASKNVSQAILS

SEQ ID NO: 15280 - protein, 155 aa, Zea mays subsp. mays
  peptide (1)..(155): Ceres Seq. ID no. 13629837
  misc_feature (109)..(109): Xaa is any aa, unknown or other
  misc_feature (110)..(110): Xaa is any aa, unknown or other
MSTTPKPLDSAVVSAAVDGGDEGGGGGGGGKKQAHGAVMAPPPMVVPAAAPAAEEEVRKVRKPYTITKSRESWTEPEHDKFLEALQLFDRDWKKIEAYVGSKTVIQIRXXAQNTFPEGSEEMVRASICPHPGQNERQLIHIHRKASKNVSQAILS

SEQ ID NO: 15281 - protein, 117 aa, Zea mays subsp. mays
  peptide (1)..(117): Ceres Seq. ID no. 13629838
  misc_feature (71)..(71): Xaa is any aa, unknown or other
  misc_feature (72)..(72): Xaa is any aa, unknown or other
MAPPPMVVPAAAPAAEEEVRKVRKPYTITKSRESWTEPEHDKFLEALQLFDRDWKKIEAYVGSKTVIQIRXXAQNTFPEGSEEMVRASICPHPGQNERQLIHIHRKASKNVSQAILS

SEQ ID NO: 15282 - DNA, 546 bp, Zea mays subsp. mays
  misc_feature (1)..(546): Ceres Seq. ID no. 13633729
  misc_feature (1)..(546): Ortholog of  Ceres SEQ ID NO 13590307 as cited in SEQ ID NO 67154
acgccttcaagctctgctagactgagaaaatcaacgagttctttctccggcgataccttttccaatcgatcagatggcgaaggatccagttcgtgttctcgtcaccggagctgcaggacaaatcggatacgctctagtccctatgattgcgagaggaatcatgcttggtgcagaccagcctgtgatcctccacatgctcgatatccctcctgctgctgaagctttgaacggtgtcaaaatggagttgatcgacgctgctttccctcttctcaaaggtgtggtggctaccactgacgctgttgaagggtgtactggcgtcaacgttgcagttatggttggtggtttcccgaggaaagaaggaatggagaggaaggatgtcatgtccaagaacgtttccatttacaagtctcaagccgctgccttggagaagcacgccgcaccaaactgcaaggttttggttgttgcaaaccctgcaaacaccaacgcgttgatccttaaggagtttgcaccgtcgattcctgagaannacatcacttgcttgacgag

SEQ ID NO: 15283 - protein, 157 aa, Zea mays subsp. mays
  peptide (1)..(157): Ceres Seq. ID no. 13633730
  misc_feature (151)..(151): Xaa is any aa, unknown or other
  misc_feature (152)..(152): Xaa is any aa, unknown or other
MAKDPVRVLVTGAAGQIGYALVPMIARGIMLGADQPVILHMLDIPPAAEALNGVKMELIDAAFPLLKGVVATTDAVEGCTGVNVAVMVGGFPRKEGMERKDVMSKNVSIYKSQAAALEKHAAPNCKVLVVANPANTNALILKEFAPSIPEXXITCLT

SEQ ID NO: 15284 - protein, 134 aa, Zea mays subsp. mays
  peptide (1)..(134): Ceres Seq. ID no. 13633731
  misc_feature (128)..(128): Xaa is any aa, unknown or other
  misc_feature (129)..(129): Xaa is any aa, unknown or other
MIARGIMLGADQPVILHMLDIPPAAEALNGVKMELIDAAFPLLKGVVATTDAVEGCTGVNVAVMVGGFPRKEGMERKDVMSKNVSIYKSQAAALEKHAAPNCKVLVVANPANTNALILKEFAPSIPEXXITCLT

SEQ ID NO: 15285 - protein, 128 aa, Zea mays subsp. mays
  peptide (1)..(128): Ceres Seq. ID no. 13633732
  misc_feature (122)..(122): Xaa is any aa, unknown or other
  misc_feature (123)..(123): Xaa is any aa, unknown or other
MLGADQPVILHMLDIPPAAEALNGVKMELIDAAFPLLKGVVATTDAVEGCTGVNVAVMVGGFPRKEGMERKDVMSKNVSIYKSQAAALEKHAAPNCKVLVVANPANTNALILKEFAPSIPEXXITCLT

SEQ ID NO: 15286 - DNA, 1747 bp, Zea mays subsp. mays; identical to SEQ ID NO: 12952
  misc_feature (1)..(1747): Ceres Seq. ID no. 13637284
  misc_feature (1)..(1747): Ortholog of  Ceres SEQ ID NO 14315418 as cited in SEQ ID NO 57506

SEQ ID NO: 15287 - protein, 366 aa, Zea mays subsp. mays; identical to SEQ ID NO: 12953
  peptide (1)..(366): Ceres Seq. ID no. 13637285

SEQ ID NO: 15288 - protein, 330 aa, Zea mays subsp. mays; identical to SEQ ID NO: 12954
  peptide (1)..(330): Ceres Seq. ID no. 13637286

SEQ ID NO: 15289 - protein, 255 aa, Zea mays subsp. mays; identical to SEQ ID NO: 12955
  peptide (1)..(255): Ceres Seq. ID no. 13637287

SEQ ID NO: 15290 - DNA, 445 bp, Zea mays subsp. mays
  misc_feature (1)..(445): Ceres Seq. ID no. 13627430
  misc_feature (1)..(445): Ortholog of  Ceres SEQ ID NO 14303770 as cited in SEQ ID NO 53890
aacccagggtgagtctccggatccgtcgccgtctggtctccgtgtgctctcgtcgccgtcgccgtcgccgccgtctgactgaccccctcgcctcccgcggcgtcgggtctctggtgctgctgctactgctgctgcgtgcagggctgtgatggcgacgaagaggagcgtgggcaccctcggcgaggcggatctgaagggtaagaaggtgttcgtgcgcgccgacctctacgtccctctcgacgacgcccagaagatcaccgacgacacccgcatccgcgcctccgtccccaccatcaagttcctcctcgagaagggcgccaaggtcatcctcgccagccacctgggtcgtccaaaaggtgtcaccccaaagtacagcttgaagcctcttgttccacgcttgtctgagctccttgaagttgaagtcgtgatggccaatgattgcatt

SEQ ID NO: 15291 - protein, 99 aa, Zea mays subsp. mays
  peptide (1)..(99): Ceres Seq. ID no. 13627431
MATKRSVGTLGEADLKGKKVFVRADLYVPLDDAQKITDDTRIRASVPTIKFLLEKGAKVILASHLGRPKGVTPKYSLKPLVPRLSELLEVEVVMANDCI

SEQ ID NO: 15292 - DNA, 1764 bp, Zea mays subsp. mays; identical to SEQ ID NO: 1515
  misc_feature (1)..(1764): Ceres Seq. ID no. 13636367
  misc_feature (1)..(1764): Ortholog of  Ceres SEQ ID NO 15177298 as cited in SEQ ID NO 52711

SEQ ID NO: 15293 - protein, 456 aa, Zea mays subsp. mays; identical to SEQ ID NO: 1516
  peptide (1)..(456): Ceres Seq. ID no. 13636368

SEQ ID NO: 15294 - protein, 392 aa, Zea mays subsp. mays; identical to SEQ ID NO: 1517
  peptide (1)..(392): Ceres Seq. ID no. 13636369

SEQ ID NO: 15295 - protein, 386 aa, Zea mays subsp. mays; identical to SEQ ID NO: 1518
  peptide (1)..(386): Ceres Seq. ID no. 13636370

SEQ ID NO: 15296 - DNA, 430 bp, Zea mays subsp. mays
  misc_feature (1)..(430): Ceres Seq. ID no. 13630640
  misc_feature (1)..(430): Ortholog of  Ceres SEQ ID NO 12635789 as cited in SEQ ID NO 0
agctttcttgtnnnngagctttgtgacaaaagaagaagctgtttgcctctttgcagtgaaagcactaccagcaagaagatgattatcaccgagannagccgnannnagatctcggnataccttttcaaagaaggagtattgctcgccaggaaggacttcactctcccaaagcatccgctgattgagccagcgtccaagcnnnnngcgatctgggtcatgccgagtttccaatccaaggagcacgtaagggagatcttcgcttggatgctactactattgnnntctgaccaacgaaggaactgagttcttgacaacttagcttacccttccctcggacgttgttcccgcgaccttgaagaagtctgctaaacccgttggtcgtccctttggtgggcctcctggtgatcgccctacaggtcctcgctttgag

SEQ ID NO: 15297 - protein, 100 aa, Zea mays subsp. mays
  peptide (1)..(100): Ceres Seq. ID no. 13630641
  misc_feature (4)..(4): Xaa is any aa, unknown or other
  misc_feature (5)..(5): Xaa is any aa, unknown or other
  misc_feature (32)..(32): Xaa is any aa, unknown or other
  misc_feature (34)..(34): Xaa is any aa, unknown or other
  misc_feature (35)..(35): Xaa is any aa, unknown or other
  misc_feature (36)..(36): Xaa is any aa, unknown or other
  misc_feature (39)..(39): Xaa is any aa, unknown or other
  misc_feature (67)..(67): Xaa is any aa, unknown or other
  misc_feature (68)..(68): Xaa is any aa, unknown or other
  misc_feature (94)..(94): Xaa is any aa, unknown or other
SFLXXELCDKRRSCLPLCSESTTSKKMIITEXSXXXISXYLFKEGVLLARKDFTLPKHPLIEPASKXXAIWVMPSFQSKEHVREIFAWMLLLLXSDQRRN

SEQ ID NO: 15298 - protein, 74 aa, Zea mays subsp. mays
  peptide (1)..(74): Ceres Seq. ID no. 13630642
  misc_feature (6)..(6): Xaa is any aa, unknown or other
  misc_feature (8)..(8): Xaa is any aa, unknown or other
  misc_feature (9)..(9): Xaa is any aa, unknown or other
  misc_feature (10)..(10): Xaa is any aa, unknown or other
  misc_feature (13)..(13): Xaa is any aa, unknown or other
  misc_feature (41)..(41): Xaa is any aa, unknown or other
  misc_feature (42)..(42): Xaa is any aa, unknown or other
  misc_feature (68)..(68): Xaa is any aa, unknown or other
MIITEXSXXXISXYLFKEGVLLARKDFTLPKHPLIEPASKXXAIWVMPSFQSKEHVREIFAWMLLLLXSDQRRN

SEQ ID NO: 15299 - DNA, 541 bp, Zea mays subsp. mays
  misc_feature (1)..(541): Ceres Seq. ID no. 13632682
  misc_feature (1)..(541): Ortholog of  Ceres SEQ ID NO 12610334 as cited in SEQ ID NO 56235
  misc_feature (1)..(541): Ortholog of  Ceres SEQ ID NO 13654825 as cited in SEQ ID NO 62409
acgaaccaaagagtgcaaaatggcagcgacgtctctctccatcgcaaccacattccgctcctcgtcttacctcactcacgcttctccccatggcttcttcccttcccgacccaacacaacattccgcatctgttcaccttcctccacaccgacccaccgtgcaacccacctccgtcccgtctccgccgtcgaagctccggagaagatcgagaagattgggtccgagatctcttctctgactctcgaggaagcccgcgtcctcgtggactaccttcaggacaagttcggtgtgtcgccgctctcgttagctcccgctgcggcggctgtggctgctccgggagacggtggcggtgcggcggctgcggtggaggagcagacggagttcgacgtggtgattaacgaagtgccgagcagtgcgcgtatcgcggtgattaaagcggtgagggctttgactagcttggcgttgaaggaagcgaaggagcttatcgaagggttgccgaagaagtttaaggaaggtgtgacgaaggatgaagctgaagaa

SEQ ID NO: 15300 - protein, 180 aa, Zea mays subsp. mays
  peptide (1)..(180): Ceres Seq. ID no. 13632683
RTKECKMAATSLSIATTFRSSSYLTHASPHGFFPSRPNTTFRICSPSSTPTHRATHLRPVSAVEAPEKIEKIGSEISSLTLEEARVLVDYLQDKFGVSPLSLAPAAAAVAAPGDGGGAAAAVEEQTEFDVVINEVPSSARIAVIKAVRALTSLALKEAKELIEGLPKKFKEGVTKDEAEE

SEQ ID NO: 15301 - protein, 174 aa, Zea mays subsp. mays
  peptide (1)..(174): Ceres Seq. ID no. 13632684
MAATSLSIATTFRSSSYLTHASPHGFFPSRPNTTFRICSPSSTPTHRATHLRPVSAVEAPEKIEKIGSEISSLTLEEARVLVDYLQDKFGVSPLSLAPAAAAVAAPGDGGGAAAAVEEQTEFDVVINEVPSSARIAVIKAVRALTSLALKEAKELIEGLPKKFKEGVTKDEAEE

SEQ ID NO: 15302 - protein, 132 aa, Zea mays subsp. mays
  peptide (1)..(132): Ceres Seq. ID no. 13632685
TNQRVQNGSDVSLHRNHIPLLVLPHSRFSPWLLPFPTQHNIPHLFTFLHTDPPCNPPPSRLRRRSSGEDREDWVRDLFSDSRGSPRPRGLPSGQVRCVAALVSSRCGGCGCSGRRWRCGGCGGGADGVRRGD

SEQ ID NO: 15303 - DNA, 1172 bp, Zea mays subsp. mays
  misc_feature (1)..(1172): Ceres Seq. ID no. 14309088
  misc_feature (1)..(1172): Ortholog of  Ceres SEQ ID NO 15176155 as cited in SEQ ID NO 0
ctctctgttgcatttcccgtcctgtccttccacccggcggcttaaaccctagttctcactcccatcgccgcttcagctccgccgctgcagatggagttctggggtctcgaggtcaagcctggttccactgttaagtgtgagcctggatatggctttgtgctgcacctttcccaggctgctcttggggaatcgaagaagagtgataatgccttgatgtatgtcaaaattgatgatcagaaacttgccattggaaccctctctgttgacaagaacccacacatacaatttgatctgattttcgataaagagtttgagctgtcgcacacatcaaaaactaccagcgttttcttcactggctacaaggttgagcagccattcgaggaagatgaaatggatcttgattctgaagatgaagacgaggagctgaatgttccagtagtcaaggaaaatggcaaagctgatgagaagaaacagaaaagtcaagaaaaggcagttgctgcaccttcaaaatcaagtccggattccaagaagagcaaggatgacgacgattctgatgaggacgagactgatgattctgatgaggatgagacggacgattctgatgagggtttgtctcctgaagaaggcgatgatgattcaagtgatgaagatgataccagtgacgatgaggaggaagacactccaactcctaagaagcctgaggtaggcaagaagagagctgctgaaagttccgtgctgaaaactcctctatctgataagaaagcaaaggttgccacaccgtcatctcagaagacaggtggcaagaagggcgccgccgtccatgtggcaactccacacccagcaaaaggcaagaccattgtaaacaatgacaaatcggtcaagtctccaaaatctgcgccaaaatctggtgtcccttgcaaatcgtgcagcaagtcattcatcagtgagacggcacttcaggctcactcgaaggcgaagcatgggggcaagtgagtcgcaggtccaatagagtcaacaacaaatgcgaaacatgggagaggagggtaagcgagagtctcgaaagagtgtcggtggaagtaggcctaaccttattttgtttagagacgggctatgcgttcgatgtagcaaaacaaggctgtggtttgtgtacttcaatatttgggttgtgtgtt

SEQ ID NO: 15304 - protein, 300 aa, Zea mays subsp. mays
  peptide (1)..(300): Ceres Seq. ID no. 14309089
MEFWGLEVKPGSTVKCEPGYGFVLHLSQAALGESKKSDNALMYVKIDDQKLAIGTLSVDKNPHIQFDLIFDKEFELSHTSKTTSVFFTGYKVEQPFEEDEMDLDSEDEDEELNVPVVKENGKADEKKQKSQEKAVAAPSKSSPDSKKSKDDDDSDEDETDDSDEDETDDSDEGLSPEEGDDDSSDEDDTSDDEEEDTPTPKKPEVGKKRAAESSVLKTPLSDKKAKVATPSSQKTGGKKGAAVHVATPHPAKGKTIVNNDKSVKSPKSAPKSGVPCKSCSKSFISETALQAHSKAKHGGK

SEQ ID NO: 15305 - protein, 259 aa, Zea mays subsp. mays
  peptide (1)..(259): Ceres Seq. ID no. 14309090
MYVKIDDQKLAIGTLSVDKNPHIQFDLIFDKEFELSHTSKTTSVFFTGYKVEQPFEEDEMDLDSEDEDEELNVPVVKENGKADEKKQKSQEKAVAAPSKSSPDSKKSKDDDDSDEDETDDSDEDETDDSDEGLSPEEGDDDSSDEDDTSDDEEEDTPTPKKPEVGKKRAAESSVLKTPLSDKKAKVATPSSQKTGGKKGAAVHVATPHPAKGKTIVNNDKSVKSPKSAPKSGVPCKSCSKSFISETALQAHSKAKHGGK

SEQ ID NO: 15306 - protein, 200 aa, Zea mays subsp. mays
  peptide (1)..(200): Ceres Seq. ID no. 14309091
MDLDSEDEDEELNVPVVKENGKADEKKQKSQEKAVAAPSKSSPDSKKSKDDDDSDEDETDDSDEDETDDSDEGLSPEEGDDDSSDEDDTSDDEEEDTPTPKKPEVGKKRAAESSVLKTPLSDKKAKVATPSSQKTGGKKGAAVHVATPHPAKGKTIVNNDKSVKSPKSAPKSGVPCKSCSKSFISETALQAHSKAKHGGK

SEQ ID NO: 15307 - DNA, 1462 bp, Zea mays subsp. mays; identical to SEQ ID NO: 10801
  misc_feature (1)..(1462): Ceres Seq. ID no. 13579635
  misc_feature (1)..(1462): Ortholog of  Ceres SEQ ID NO 13596039 as cited in SEQ ID NO 62117

SEQ ID NO: 15308 - protein, 410 aa, Zea mays subsp. mays; identical to SEQ ID NO: 10802
  peptide (1)..(410): Ceres Seq. ID no. 13579636

SEQ ID NO: 15309 - protein, 381 aa, Zea mays subsp. mays; identical to SEQ ID NO: 10803
  peptide (1)..(381): Ceres Seq. ID no. 13579637

SEQ ID NO: 15310 - protein, 305 aa, Zea mays subsp. mays; identical to SEQ ID NO: 10804
  peptide (1)..(305): Ceres Seq. ID no. 13579638

SEQ ID NO: 15311 - DNA, 435 bp, Zea mays subsp. mays
  misc_feature (1)..(435): Ceres Seq. ID no. 13637179
  misc_feature (1)..(435): Ortholog of  Ceres SEQ ID NO 12557737 as cited in SEQ ID NO 81
tctctgcatttaggttttcattttagcggcgggcgaaagagaaggagaagaaggtcctatccatggcgactcaagcggctaaacaatccgttcaatgcttcgggcgtaagaagacagcagtggctgtaacccactgcaagcctggatgcggtatgatcaagctcaacggctccccgatcgagctgttcaacccagagatcctccgtttcaagatcttcgagccagtccttctcctcggcaagcaccgtttcgctggcgtcgacatgaggatccgtgtcaagggtggtggtcacacttcccaggtctacgccatccgtcagagtatcgccaaggcgctcgtggcgttctaccagaagtacgtgaacgagcagtcgaagaaggaggtgaaggatatccttatccgttacgataggactctccttgtggcggatccga

SEQ ID NO: 15312 - protein, 124 aa, Zea mays subsp. mays
  peptide (1)..(124): Ceres Seq. ID no. 13637180
MATQAAKQSVQCFGRKKTAVAVTHCKPGCGMIKLNGSPIELFNPEILRFKIFEPVLLLGKHRFAGVDMRIRVKGGGHTSQVYAIRQSIAKALVAFYQKYVNEQSKKEVKDILIRYDRTLLVADP

SEQ ID NO: 15313 - protein, 94 aa, Zea mays subsp. mays
  peptide (1)..(94): Ceres Seq. ID no. 13637181
MIKLNGSPIELFNPEILRFKIFEPVLLLGKHRFAGVDMRIRVKGGGHTSQVYAIRQSIAKALVAFYQKYVNEQSKKEVKDILIRYDRTLLVADP

SEQ ID NO: 15314 - protein, 88 aa, Zea mays subsp. mays
  peptide (1)..(88): Ceres Seq. ID no. 13637182
MRYDQAQRLPDRAVQPRDPPFQDLRASPSPRQAPFRWRRHEDPCQGWWSHFPGLRHPSEYRQGARGVLPEVRERAVEEGGEGYPYPLR

SEQ ID NO: 15315 - DNA, 1116 bp, Zea mays subsp. mays
  misc_feature (1)..(1116): Ceres Seq. ID no. 13630146
  misc_feature (1)..(1116): Ortholog of  Ceres SEQ ID NO 12617450 as cited in SEQ ID NO 64747
  misc_feature (1)..(1116): Ortholog of  Ceres SEQ ID NO 12635077 as cited in SEQ ID NO 0
atcatcagtagctagctgykcgaacgctttcagccgatcgagcaccatcgtcacagtcagtagtagccaagcatatttctttctccgagtgatttgcgctgagcgatcagttcatccagagcgagcggagctgagctgagctgagcgagcttgcgttgcttgagagaccctgctgccatggcttcccaccaggacaaggctagctaccaggccggcgagaccaaggcccgcaccgaggagaagaccgggcaggcggtgggggcgaccaaggacacggcgcagcacgccaaggaccgggcggcggacgcggcggggcacgcggcgggcaagggccaggacgccaaggaggccaccaagcagaaggcgtccgacaccggcagctacctgggcaagaagaccgacgaggccaagcacaaggccggcgagacgacggaggccaccaagcasaaggccggcgagacgacggaggccgccaagcagaaggcmgscgacgmcgayggaggccgccaagcagaaggccgscgagacgacggagacgaccaagcagaaggccggcgagacgacggaggccgccaggcagaaggcagccgacgccatggaggccgccaagcagaaggccgccgaggccgggcagtacgccaaggacaccgccgtctccggcaaggacaagtccggcggcgtcatccagcaggccactgagcaggtgaagagcgcggcggcggggcgcaaggacgcggtgatgagcacgctggggatgggcggggacaacaagcagggcgacgccaacaccaacaccaacaccaacaccaccaaggactcctctaccatcaccagggatcactagacgcgtgtatgcacacgcagcacttggtccgatcctgtcgtccgtgaccctgtttgcttgttcgcgagtccagtatgggtttgtgcatgttttcagtgtcatggtttccttttctacgaatttggtgttgtaattttgatttgcaggtacgttgctgtgttttttctgcgtcatcaagtgtctgtaaacgagtcgggcgggtttgagtgtcctttgttgtgataataaagttggtaaatcctaattaatatatagcatgcgactgtcttgct

SEQ ID NO: 15316 - protein, 173 aa, Zea mays subsp. mays
  peptide (1)..(173): Ceres Seq. ID no. 15220747
  misc_feature (90)..(90): Xaa is any aa, unknown or other
  misc_feature (103)..(103): Xaa is any aa, unknown or other
  misc_feature (104)..(104): Xaa is any aa, unknown or other
  misc_feature (106)..(106): Xaa is any aa, unknown or other
  misc_feature (107)..(107): Xaa is any aa, unknown or other
  misc_feature (115)..(115): Xaa is any aa, unknown or other
MASHQDKASYQAGETKARTEEKTGQAVGATKDTAQHAKDRAADAAGHAAGKGQDAKEATKQKASDTGSYLGKKTDEAKHKAGETTEATKXKAGETTEAAKQKXXDXXGGRQAEGXRDDGDDQAEGRRDDGGRQAEGSRRHGGRQAEGRRGRAVRQGHRRLRQGQVRRRHPAGH

SEQ ID NO: 15317 - DNA, 546 bp, Zea mays subsp. mays
  misc_feature (1)..(546): Ceres Seq. ID no. 13633184
  misc_feature (1)..(546): Ortholog of  Ceres SEQ ID NO 12610896 as cited in SEQ ID NO 55861
atcccaacattctcgttccaacttgaaattcacatccaaatcttctccttcaactatcaccatggccagcatcaaagtccacggagtccccatgtccaccgccaccatgcgcgttctcgccgctctttacgagaaggagctcgagttcgagttgatccccgtcgacatgagagccggcgctcacaagcaggagcctttcctttccctcaaccccttcggtcagatccctgctctccaagacggtgacttaactctattcgagtcacgagccatcacagagtacatagcggatgagtacagtgagaaaggcgagaagcttatgtgcccaggctgcaacaaagtcaaggcactcaccaaggtctggcttaacgttgaaggtcaacagtttgaccctatcgcctctaagatcgccttcgagcgtgtcttcaaaggcatgtttggcatgaccaccgatcctgccgctgtccaagatctcgaaggcaaagctcgtcagggtcttggatatctacgaggcgaggtctccaaatccgagttcctcgcttgtga

SEQ ID NO: 15318 - protein, 181 aa, Zea mays subsp. mays
  peptide (1)..(181): Ceres Seq. ID no. 13633185
SQHSRSNLKFTSKSSPSTITMASIKVHGVPMSTATMRVLAALYEKELEFELIPVDMRAGAHKQEPFLSLNPFGQIPALQDGDLTLFESRAITEYIADEYSEKGEKLMCPGCNKVKALTKVWLNVEGQQFDPIASKIAFERVFKGMFGMTTDPAAVQDLEGKARQGLGYLRGEVSKSEFLAC

SEQ ID NO: 15319 - protein, 161 aa, Zea mays subsp. mays
  peptide (1)..(161): Ceres Seq. ID no. 13633186
MASIKVHGVPMSTATMRVLAALYEKELEFELIPVDMRAGAHKQEPFLSLNPFGQIPALQDGDLTLFESRAITEYIADEYSEKGEKLMCPGCNKVKALTKVWLNVEGQQFDPIASKIAFERVFKGMFGMTTDPAAVQDLEGKARQGLGYLRGEVSKSEFLAC

SEQ ID NO: 15320 - protein, 151 aa, Zea mays subsp. mays
  peptide (1)..(151): Ceres Seq. ID no. 13633187
MSTATMRVLAALYEKELEFELIPVDMRAGAHKQEPFLSLNPFGQIPALQDGDLTLFESRAITEYIADEYSEKGEKLMCPGCNKVKALTKVWLNVEGQQFDPIASKIAFERVFKGMFGMTTDPAAVQDLEGKARQGLGYLRGEVSKSEFLAC

SEQ ID NO: 15321 - DNA, 556 bp, Zea mays subsp. mays
  misc_feature (1)..(556): Ceres Seq. ID no. 13628901
  misc_feature (1)..(556): Ortholog of  Ceres SEQ ID NO 13595704 as cited in SEQ ID NO 51001
  misc_feature (1)..(556): Ortholog of  Ceres SEQ ID NO 13638279 as cited in SEQ ID NO 57674
  misc_feature (1)..(556): Ortholog of  Ceres SEQ ID NO 15177534 as cited in SEQ ID NO 0
aaaaaaaaaagcacacaccacgcagggcacaaggagaagaagaggggaagaaatattcttcccgtcgaaagacggagagaggaaaagggacaagggcaaggcaagagagaggcgtcgtcgtttgatctgctgccggagtgcgaagaggaagaggaagaggagcgccggagttgtaaagatgttcctggtggactggttctatggggtgctggcatcgcttgggctgtggcagaaggaggctaagatcctcttccttggcctcgacaacgccggcaagaccaccctcctccacatgctgaaggacgagcggctcgtacagcaccagccgacgcaataccccacgtcagaagagttgagcatcggcaggatcaagttcaaggcgttcgaccttgggggccaccagatcgcccgccgcgtctggaaggactactacgccaaggttgatgctgttgtgtacttggtggatgctgttgacaaggaacgttttgccgagtcgaagaaggagctcgatgcgcttcttgcagatgactcccttgcaaacgttcctttcctcata

SEQ ID NO: 15322 - protein, 185 aa, Zea mays subsp. mays
  peptide (1)..(185): Ceres Seq. ID no. 13628902
KKKAHTTQGTRRRRGEEIFFPSKDGERKRDKGKARERRRRLICCRSAKRKRKRSAGVVKMFLVDWFYGVLASLGLWQKEAKILFLGLDNAGKTTLLHMLKDERLVQHQPTQYPTSEELSIGRIKFKAFDLGGHQIARRVWKDYYAKVDAVVYLVDAVDKERFAESKKELDALLADDSLANVPFLI

SEQ ID NO: 15323 - protein, 126 aa, Zea mays subsp. mays
  peptide (1)..(126): Ceres Seq. ID no. 13628903
MFLVDWFYGVLASLGLWQKEAKILFLGLDNAGKTTLLHMLKDERLVQHQPTQYPTSEELSIGRIKFKAFDLGGHQIARRVWKDYYAKVDAVVYLVDAVDKERFAESKKELDALLADDSLANVPFLI

SEQ ID NO: 15324 - DNA, 427 bp, Zea mays subsp. mays
  misc_feature (1)..(427): Ceres Seq. ID no. 13637160
  misc_feature (1)..(427): Ortholog of  Ceres SEQ ID NO 14314198 as cited in SEQ ID NO 57472
atcccaaaacctaaatcccctcttcgtttccgagaaaaccaaagaaaaagagagagagactcacgatggcaccaaaggcaggaaagaaaccagcagagaagaaacccgccgccgcagagaagccagtggaggaagagaaggtagcggagaaagcaccagctgagaagaagcccaaggccggaaagaagctacctaaggaagccatcggcgcgaccgacaagaagaagaagcgcagcaagaagaacatcgagacgtacaagatatacatcttcaaggttcttaagcaagtccacccagacatcggaatctcgagtaaggccatggggatcatgaacagcttcatcaacgacatcttcgagaagcttgctcaggaagcgtcgaaactcgcaaggtacaacaagaagccgaccattacttctcgcgagat

SEQ ID NO: 15325 - protein, 120 aa, Zea mays subsp. mays
  peptide (1)..(120): Ceres Seq. ID no. 13637161
MAPKAGKKPAEKKPAAAEKPVEEEKVAEKAPAEKKPKAGKKLPKEAIGATDKKKKRSKKNIETYKIYIFKVLKQVHPDIGISSKAMGIMNSFINDIFEKLAQEASKLARYNKKPTITSRE

SEQ ID NO: 15326 - DNA, 386 bp, Zea mays subsp. mays
  misc_feature (1)..(386): Ceres Seq. ID no. 13633461
  misc_feature (1)..(386): Ortholog of  Ceres SEQ ID NO 15227057 as cited in SEQ ID NO 1374
acaacaacgagttaacgaaagccttttatccaagctcaggaaagctcacagtttcgttggatccaatcttagttttatccaagctcagcaatggcttctcgtcagcagcatcctactagctaccacgccggcgagacaaaggcccgtgccgaggagaagacgggtcaagtgatgnnngcggcgcaggagaaaggcagggaggccaagcacaaggcgtccgacgccgccgaccgcgccatggggatgggccacgaccccagggaggcgaccagggagaacgcgcgcgccgccgcgaaccgaatcatggggatgggccacgacgtcgctaagacggccaaggacagggagtagcgggtcaaggacgcggcctccggtgccgatgtccg

SEQ ID NO: 15327 - protein, 86 aa, Zea mays subsp. mays
  peptide (1)..(86): Ceres Seq. ID no. 13633462
  misc_feature (29)..(29): Xaa is any aa, unknown or other
MASRQQHPTSYHAGETKARAEEKTGQVMXAAQEKGREAKHKASDAADRAMGMGHDPREATRENARAAANRIMGMGHDVAKTAKDRE

SEQ ID NO: 15328 - protein, 59 aa, Zea mays subsp. mays
  peptide (1)..(59): Ceres Seq. ID no. 13633463
  misc_feature (2)..(2): Xaa is any aa, unknown or other
MXAAQEKGREAKHKASDAADRAMGMGHDPREATRENARAAANRIMGMGHDVAKTAKDRE

SEQ ID NO: 15329 - protein, 56 aa, Zea mays subsp. mays
  peptide (1)..(56): Ceres Seq. ID no. 13633464
QQRVNESLLSKLRKAHSFVGSNLSFIQAQQWLLVSSILLATTPARQRPVPRRRRVK

SEQ ID NO: 15330 - DNA, 1628 bp, Zea mays subsp. mays; identical to SEQ ID NO: 5721
  misc_feature (1)..(1628): Ceres Seq. ID no. 13636255
  misc_feature (1)..(1628): Ortholog of  Ceres SEQ ID NO 15224680 as cited in SEQ ID NO 59829
  misc_feature (1)..(1628): Ortholog of  Ceres SEQ ID NO 12627215 as cited in SEQ ID NO 60976
  misc_feature (1)..(1628): Ortholog of  Ceres SEQ ID NO 15178542 as cited in SEQ ID NO 65410
  misc_feature (1)..(1628): Ortholog of  Ceres SEQ ID NO 12635657 as cited in SEQ ID NO 0
  misc_feature (1)..(1628): Ortholog of  Ceres SEQ ID NO 12635879 as cited in SEQ ID NO 0
  misc_feature (1)..(1628): Ortholog of  Ceres SEQ ID NO 13599649 as cited in SEQ ID NO 0

SEQ ID NO: 15331 - protein, 270 aa, Zea mays subsp. mays; identical to SEQ ID NO: 5722
  peptide (1)..(270): Ceres Seq. ID no. 13636256

SEQ ID NO: 15332 - protein, 267 aa, Zea mays subsp. mays; identical to SEQ ID NO: 5723
  peptide (1)..(267): Ceres Seq. ID no. 13636257

SEQ ID NO: 15333 - protein, 234 aa, Zea mays subsp. mays; identical to SEQ ID NO: 5724
  peptide (1)..(234): Ceres Seq. ID no. 13636258

SEQ ID NO: 15334 - DNA, 1733 bp, Zea mays subsp. mays
  misc_feature (1)..(1733): Ceres Seq. ID no. 15176870
  misc_feature (1)..(1733): Ortholog of  Ceres SEQ ID NO 13599941 as cited in SEQ ID NO 0
aagctactaagtaataaaaccacgcgggcaccagcaggcagcagctagctagccatccagtccagagatggccacgagcggccccgtccttctggtctcgcaggcgcagcagcgcaagtcacggacctacaccccgagcccatggggtgacttcttcctccaccacgtcccatgcactccgtcacagctcttgtccatgaaggagagggcaaaggtcaaggagcaacaagtgaggcagatgatacacgaaacgatcgcctcctccgacctgcttcgtaagatggagctcgtggacacactacagcgcctcggggtggactaccactacaacgaggagatcgaccagttgctttgctctatctacgaccaccacgacgacggaggagacggcctcgacgatctctacgtcacctccctgcggttctatttgctcaggaagcatgggtacacaatctcttcagatggtggaatgatttccgatcgcatatagacctgagctttgcgcgggacagaatggtggagcttcatttctggatgctcggagtaatacatgatccctattgctcacggatcatgatagtcaagatcttcgtattcataagcttgtttgatgaccttatggacaactatagcaccacagaggagagcaatgtcttcaccgcagccatggaaaggttggttacatttatttgaaatcatatcattagagcgcaactatatacaactcagaatatatttaccatttctttgcttgaagaaataaaaacaaccctaattaatgagataggtgggacgaacagatggcacagcagcttccagcaggcttgaaggcactcttggtcaggatatttaacgctacgaacaagatcgaggaggagttaaaacttcaggggaacatgcatgctgaactcatcaaaaaaatggtgattaatagtgccaagttctaccatgctgaggtcaaatggcgcgacgaacacttcgtgccaactagtcttgaggagcacctccaaaaatctatccctaccagtgcttgtatgcagatggcaaatcttgcgttggtttcactgggaaatgtgactactagagaggacgtcgagtgggttttcaccttccccaaaatcatcagaggtgcttgtattgtgggccgcatctccaacgacatcgtgtcacatgaggtttaccaaaacctctccaccacattctagctagtcatatattccccatcagctgactatatacgtattctctaaagactcacattgcttgttcttgctttaatttccttgatgaagcgggaacaagcttcttcagaccatgtggcatccacggttcaaacttgcatgaagcagtacaacgtgacaataaaggaagccaacgagaaacttagagcggtaatcgaagaggcatggatggacatcgtccaagatagcctcgagcaggaacgccctagagcacttctcgacatagccatcaatgttgcacgagttgcagatttcatgtacaagcgcgaagacgcgtacacgctctcattcgtcatcaaggacattatagcttcaatgtacatctattccgtgtgagcttattgatctactgctagtaagaaagactttttcagtaatgtacatgaattgaaaaaggtccgttaattgatggtacatttaattaatcccaaaattattgtataagtagtatgtgtgatgtactgcatatcctaataaatgtgtttgtgttcc

SEQ ID NO: 15335 - protein, 140 aa, Zea mays subsp. mays
  peptide (1)..(140): Ceres Seq. ID no. 15176871
MATSGPVLLVSQAQQRKSRTYTPSPWGDFFLHHVPCTPSQLLSMKERAKVKEQQVRQMIHETIASSDLLRKMELVDTLQRLGVDYHYNEEIDQLLCSIYDHHDDGGDGLDDLYVTSLRFYLLRKHGYTISSDGGMISDRI

SEQ ID NO: 15336 - protein, 134 aa, Zea mays subsp. mays
  peptide (1)..(134): Ceres Seq. ID no. 15176872
MAQQLPAGLKALLVRIFNATNKIEEELKLQGNMHAELIKKMVINSAKFYHAEVKWRDEHFVPTSLEEHLQKSIPTSACMQMANLALVSLGNVTTREDVEWVFTFPKIIRGACIVGRISNDIVSHEVYQNLSTTF

SEQ ID NO: 15337 - protein, 102 aa, Zea mays subsp. mays
  peptide (1)..(102): Ceres Seq. ID no. 15176873
MHAELIKKMVINSAKFYHAEVKWRDEHFVPTSLEEHLQKSIPTSACMQMANLALVSLGNVTTREDVEWVFTFPKIIRGACIVGRISNDIVSHEVYQNLSTTF

SEQ ID NO: 15338 - DNA, 556 bp, Zea mays subsp. mays
  misc_feature (1)..(556): Ceres Seq. ID no. 13635982
  misc_feature (1)..(556): Ortholog of  Ceres SEQ ID NO 13598373 as cited in SEQ ID NO 62185
  misc_feature (1)..(556): Ortholog of  Ceres SEQ ID NO 12584664 as cited in SEQ ID NO 62232
  misc_feature (1)..(556): Ortholog of  Ceres SEQ ID NO 15169537 as cited in SEQ ID NO 64197
gaaccaagtcctgctagcggtgtccggtccggcgcccccctatttcctctcgcagcctcttctccccaaaccctaatcttgctcctgcctatctctgctccaatccgtcggtggagcggcggcgatggaggggaaggaggaaggtcggatcttcgtgggcggcctgtcgtggcaaacggacgagcgcaagcttcaggacgcctttggtcgcttcggcaaggtcgtcgatgttcagatcatgctggagaggcacacaaaccgccacaggggctttggcttcgtgacattcgaagatcgaagggcagttgacagcgctatcaaagagatgcgtggccaagagttagatggtcgtaccatctcagtgaacaaggctgagcctaagatgaatacagatgacacaaggttcgacaatggcggtggacgagactatcgaggtggtagaggtgatggtccaccccctggcaattgctatgagtgtggccgtcctggtcattgggtccgtgactgccctagtgctgctggtggtcgttctggcagattcccgtccaagttcagt

SEQ ID NO: 15339 - protein, 144 aa, Zea mays subsp. mays
  peptide (1)..(144): Ceres Seq. ID no. 13635983
MEGKEEGRIFVGGLSWQTDERKLQDAFGRFGKVVDVQIMLERHTNRHRGFGFVTFEDRRAVDSAIKEMRGQELDGRTISVNKAEPKMNTDDTRFDNGGGRDYRGGRGDGPPPGNCYECGRPGHWVRDCPSAAGGRSGRFPSKFS

SEQ ID NO: 15340 - protein, 106 aa, Zea mays subsp. mays
  peptide (1)..(106): Ceres Seq. ID no. 13635984
MLERHTNRHRGFGFVTFEDRRAVDSAIKEMRGQELDGRTISVNKAEPKMNTDDTRFDNGGGRDYRGGRGDGPPPGNCYECGRPGHWVRDCPSAAGGRSGRFPSKFS

SEQ ID NO: 15341 - protein, 102 aa, Zea mays subsp. mays
  peptide (1)..(102): Ceres Seq. ID no. 13635985
EPSPASGVRSGAPLFPLAASSPQTLILLLPISAPIRRWSGGDGGEGGRSDLRGRPVVANGRAQASGRLWSLRQGRRCSDHAGEAHKPPQGLWLRDIRRSKGS

SEQ ID NO: 15342 - DNA, 2628 bp, Zea mays subsp. mays
  misc_feature (1)..(2628): Ceres Seq. ID no. 13627034
  misc_feature (1)..(2628): Ortholog of  Ceres SEQ ID NO 15176759 as cited in SEQ ID NO 59678
  misc_feature (1)..(2628): Ortholog of  Ceres SEQ ID NO 14307904 as cited in SEQ ID NO 66440
  misc_feature (1)..(2628): Ortholog of  Ceres SEQ ID NO 13659971 as cited in SEQ ID NO 67565
  misc_feature (1)..(2628): Ortholog of  Ceres SEQ ID NO 13500385 as cited in SEQ ID NO 67583
atcacttgttcttcttcgagctaccagctgcctatcatggtcatcatggtcgagctgctgcccccacttgcctctctaatcctcagtcctctgtagagctggtcctcctacccctcactttgccttgagcaatttggtttctagcatctgtggggtggcttgtgggtggtcgccttggactgctccttcctccacctgccgcgccggcagggcgacgaggtccaaaagcctggtggggctcatcatcaagaacaccgaagcggcgagagtggcatgggatctgatccgaggcggagctcgaggagctgagggctgtacgtgctcttggatccggtagagatcacgtgccctcgtgttcgtccccggccgccgcgatggggaacacgtgcgtcggccccagcatcaccatgaacggcttcttccagtccgtgtccacggcgctgtggaagacgccgcaggaaggcgacgcgctgcccgccgccgccaatggccccggcgggccagccggggccggttcgcagtcggcgctgccgaagccggcgtccgacgtgcaccacgtcgccgtgcagagcgaggcccctgagcccgtcaagatcgccgcctaccactcggagccggcgcccgccgtgcggagcgaggcccctgagcccgtcaagatcgccgcctctcactcggagccggcgcccatggccgccaagcctggtggcgccgccgccaacgccagccccagccccagccccaggccgcgtccgcaggtgaagcgcgtgtcgagcgccgggctgctgctggggtcggtgctgaggcgcaagacggagaacctcaaggacaagtacagcctggggcggcggctcgggcaggggcagttcggcacgacgcacctgtgcgtggagcgcgccacggggaaggagctcgcgtgcaagtcgatcctgaagcgcaagctgggcagcgacgacgacgtggaggacgtgcggcgggagatccagataatgcaccacctggcgggccaccccagcgtggtcggcatccgcggcgcgtacgaggacgccgtggccgtgcacctcgtcatggagctctgcggcggcggcgagctgttcgaccggatcgtgcggaggggccactacaccgagaggaaggccgccgagctcgcccgcgtcatcgtcggcgtcgtggaggcgtgccactccatgggcgtcatgcaccgggacctcaagcccgagaacttcctcttcgctgaccactcggaggaggccgctctcaagaccattgacttcggtctctccatcttctttcgccctggccaaattttcaccgacgtcgtgggcagcccttactacgtggcgccggaggtactgaagaagagatacgggccagaggcggacgtctggagcgctggcgtaatcatctacatcctgctgtgcggagtgccgccattctgggcagagaacgagcagggcatattcgaggaggttctgcacgggaggctggacttcgagtcggagccgtggcccagcatctccgacggcgccaaggatctcgtgaggaggatgcttgtcagggacccgaggaagagactgaccgctcacgaagttctacggcatccgtgggttcaggtcggtggagtggctcctgacaggccgctggactcggccgttctgtctcgcatgaagcagttctcggctatgaataagctgaagaagatggctcttagggtgatcgccgagaacctgtcggaggacgagatcgccgggctgagggagatgttcaagatgatcgacgcggacaacagcgggcagatcacgttcgaggagctcaaggttggcctggagaaggtgggcgccaacctgcaggagtcggagatctacgcgctcatgcaagccgcggacgtggacaacaacggcacgatcgactacggcgagttcatcgcggccacgctgcacctgaacaaggtggagcgggaggaccacctgttcgcggcgttccagtacttcgacaaggacggcagcggctacatcaccgccgacgagctgcaggtggcgtgcgaggagttcggcctgggcgacgtccagctggaggacttgatcggggaagtcgaccaggacaacgacgggcgcatagactacaacgagttcgtggcgatgatgcagaagccgacggtggggggatcccgaagaaggccgatctgcagaacagcttcagcatcgggttcagcatcgggttcagggaggcgctcaggatggcctagacctctgtgtctctggcttccctgctgcctgcgtgtaggtgtagatgattgaattgagtgggtgtcagtgcagttgctgtagagaccaccgtagcatagagatctgatgagatgcgagttgaggcgggccaggagacgtgtacatgtgccatagccatacaggcggccctgcatcggtttgatttgattgcttggttccaaacggtcctgtgtttcatgtcgcgtgcacatgtgccatatctgcctgctgctgctactactgctatatgccgtgcacgtgcacgtcggtgacctgaaacttggctgtccggcggtccggccaccgagctctaaggctatccatagcggtttttctaaatttttatccttatatcattttttgcgtc

SEQ ID NO: 15343 - protein, 639 aa, Zea mays subsp. mays
  peptide (1)..(639): Ceres Seq. ID no. 13627035
MGNTCVGPSITMNGFFQSVSTALWKTPQEGDALPAAANGPGGPAGAGSQSALPKPASDVHHVAVQSEAPEPVKIAAYHSEPAPAVRSEAPEPVKIAASHSEPAPMAAKPGGAAANASPSPSPRPRPQVKRVSSAGLLLGSVLRRKTENLKDKYSLGRRLGQGQFGTTHLCVERATGKELACKSILKRKLGSDDDVEDVRREIQIMHHLAGHPSVVGIRGAYEDAVAVHLVMELCGGGELFDRIVRRGHYTERKAAELARVIVGVVEACHSMGVMHRDLKPENFLFADHSEEAALKTIDFGLSIFFRPGQIFTDVVGSPYYVAPEVLKKRYGPEADVWSAGVIIYILLCGVPPFWAENEQGIFEEVLHGRLDFESEPWPSISDGAKDLVRRMLVRDPRKRLTAHEVLRHPWVQVGGVAPDRPLDSAVLSRMKQFSAMNKLKKMALRVIAENLSEDEIAGLREMFKMIDADNSGQITFEELKVGLEKVGANLQESEIYALMQAADVDNNGTIDYGEFIAATLHLNKVEREDHLFAAFQYFDKDGSGYITADELQVACEEFGLGDVQLEDLIGEVDQDNDGRIDYNEFVAMMQKPTVGGSRRRPICRTASASGSASGSGRRSGWPRPLCLWLPCCLRVGVDD

SEQ ID NO: 15344 - protein, 628 aa, Zea mays subsp. mays
  peptide (1)..(628): Ceres Seq. ID no. 13627036
MNGFFQSVSTALWKTPQEGDALPAAANGPGGPAGAGSQSALPKPASDVHHVAVQSEAPEPVKIAAYHSEPAPAVRSEAPEPVKIAASHSEPAPMAAKPGGAAANASPSPSPRPRPQVKRVSSAGLLLGSVLRRKTENLKDKYSLGRRLGQGQFGTTHLCVERATGKELACKSILKRKLGSDDDVEDVRREIQIMHHLAGHPSVVGIRGAYEDAVAVHLVMELCGGGELFDRIVRRGHYTERKAAELARVIVGVVEACHSMGVMHRDLKPENFLFADHSEEAALKTIDFGLSIFFRPGQIFTDVVGSPYYVAPEVLKKRYGPEADVWSAGVIIYILLCGVPPFWAENEQGIFEEVLHGRLDFESEPWPSISDGAKDLVRRMLVRDPRKRLTAHEVLRHPWVQVGGVAPDRPLDSAVLSRMKQFSAMNKLKKMALRVIAENLSEDEIAGLREMFKMIDADNSGQITFEELKVGLEKVGANLQESEIYALMQAADVDNNGTIDYGEFIAATLHLNKVEREDHLFAAFQYFDKDGSGYITADELQVACEEFGLGDVQLEDLIGEVDQDNDGRIDYNEFVAMMQKPTVGGSRRRPICRTASASGSASGSGRRSGWPRPLCLWLPCCLRVGVDD

SEQ ID NO: 15345 - protein, 535 aa, Zea mays subsp. mays
  peptide (1)..(535): Ceres Seq. ID no. 13627037
MAAKPGGAAANASPSPSPRPRPQVKRVSSAGLLLGSVLRRKTENLKDKYSLGRRLGQGQFGTTHLCVERATGKELACKSILKRKLGSDDDVEDVRREIQIMHHLAGHPSVVGIRGAYEDAVAVHLVMELCGGGELFDRIVRRGHYTERKAAELARVIVGVVEACHSMGVMHRDLKPENFLFADHSEEAALKTIDFGLSIFFRPGQIFTDVVGSPYYVAPEVLKKRYGPEADVWSAGVIIYILLCGVPPFWAENEQGIFEEVLHGRLDFESEPWPSISDGAKDLVRRMLVRDPRKRLTAHEVLRHPWVQVGGVAPDRPLDSAVLSRMKQFSAMNKLKKMALRVIAENLSEDEIAGLREMFKMIDADNSGQITFEELKVGLEKVGANLQESEIYALMQAADVDNNGTIDYGEFIAATLHLNKVEREDHLFAAFQYFDKDGSGYITADELQVACEEFGLGDVQLEDLIGEVDQDNDGRIDYNEFVAMMQKPTVGGSRRRPICRTASASGSASGSGRRSGWPRPLCLWLPCCLRVGVDD

SEQ ID NO: 15346 - DNA, 485 bp, Zea mays subsp. mays
  misc_feature (1)..(485): Ceres Seq. ID no. 13634595
  misc_feature (1)..(485): Ortholog of  Ceres SEQ ID NO 13663345 as cited in SEQ ID NO 66704
  misc_feature (1)..(485): Ortholog of  Ceres SEQ ID NO 13598923 as cited in SEQ ID NO 0
aaagcaccacgcacgatcgccttcgccaaccgcgccgctctctctctctttctctctcgcacgagccgcgccggcgccgccaccacgcgcgcgggagacagagaccacagccgcagccaccgacgggcggaataggaatggtggcgccggggggaggagcaggaggaggtccgttgcggtggccggcggcggaggagcttgacactgtacggaagaaggtggtggagattagtggaagggatgaacaagaggttatggttgctgcttgcccctacagaatttgccctttgggggctcatattgatcatcagggtggagtagtcacagctatgaccataaattatggagtactccttggtttcgttccctctaatggttctgagcaacctttatttttctttcaggttttacttcattctggtcagtttgaaggtgctataagattcagagttgatgacttgcaaaagcctattgataaacctgag

SEQ ID NO: 15347 - protein, 161 aa, Zea mays subsp. mays
  peptide (1)..(161): Ceres Seq. ID no. 13634596
STTHDRLRQPRRSLSLSLSHEPRRRRHHARGRQRPQPQPPTGGIGMVAPGGGAGGGPLRWPAAEELDTVRKKVVEISGRDEQEVMVAACPYRICPLGAHIDHQGGVVTAMTINYGVLLGFVPSNGSEQPLFFFQVLLHSGQFEGAIRFRVDDLQKPIDKPE

SEQ ID NO: 15348 - protein, 116 aa, Zea mays subsp. mays
  peptide (1)..(116): Ceres Seq. ID no. 13634597
MVAPGGGAGGGPLRWPAAEELDTVRKKVVEISGRDEQEVMVAACPYRICPLGAHIDHQGGVVTAMTINYGVLLGFVPSNGSEQPLFFFQVLLHSGQFEGAIRFRVDDLQKPIDKPE

SEQ ID NO: 15349 - DNA, 1396 bp, Zea mays subsp. mays; identical to SEQ ID NO: 14449
  misc_feature (1)..(1396): Ceres Seq. ID no. 13636262
  misc_feature (1)..(1396): Ortholog of  Ceres SEQ ID NO 14311671 as cited in SEQ ID NO 51251
  misc_feature (1)..(1396): Ortholog of  Ceres SEQ ID NO 14304791 as cited in SEQ ID NO 53562
  misc_feature (1)..(1396): Ortholog of  Ceres SEQ ID NO 14307355 as cited in SEQ ID NO 54610
  misc_feature (1)..(1396): Ortholog of  Ceres SEQ ID NO 13594298 as cited in SEQ ID NO 57803
  misc_feature (1)..(1396): Ortholog of  Ceres SEQ ID NO 14301894 as cited in SEQ ID NO 61677
  misc_feature (1)..(1396): Ortholog of  Ceres SEQ ID NO 13503476 as cited in SEQ ID NO 61978
  misc_feature (1)..(1396): Ortholog of  Ceres SEQ ID NO 12578438 as cited in SEQ ID NO 62201
  misc_feature (1)..(1396): Ortholog of  Ceres SEQ ID NO 12617675 as cited in SEQ ID NO 64656

SEQ ID NO: 15350 - protein, 233 aa, Zea mays subsp. mays; identical to SEQ ID NO: 14450
  peptide (1)..(233): Ceres Seq. ID no. 13636263

SEQ ID NO: 15351 - protein, 201 aa, Zea mays subsp. mays; identical to SEQ ID NO: 14451
  peptide (1)..(201): Ceres Seq. ID no. 13636264

SEQ ID NO: 15352 - protein, 160 aa, Zea mays subsp. mays; identical to SEQ ID NO: 14452
  peptide (1)..(160): Ceres Seq. ID no. 13636265

SEQ ID NO: 15353 - DNA, 562 bp, Zea mays subsp. mays
  misc_feature (1)..(562): Ceres Seq. ID no. 13632771
  misc_feature (1)..(562): Ortholog of  Ceres SEQ ID NO 13656408 as cited in SEQ ID NO 65810
agaatctaccgtcgaccagaagagccctagaaaaccctagtagcatccacaattccacataacctcgcccgcgccgcctcccccacgagacgccttcttgctctcgcttccggtgacgcccgccacttcctccccgacgagatgacgaaacgcaccaagaaggcaggaatcgttggcaaatatggtaccaggtatggtgccagtttacgtaaacagatcaagaagatggaggtctcgcagcactccaaatacttctgtgagttctgtggcaagtttgccgtgaagaggaaagcagttggtatctggggatgcaaggactgtgggaaggttaaggccggtggcgcctacacaatgaacactgctagtgcggtcactgtgagaagcacaatccggcgcctgcgggagcagaccgaagcatgattgcgggcagcttgaaaaggagtacctggatttttggtagtcagccaagagccgtgancccatttnnntttttagctaaatgaacannnaatgtttatctatctgtagtgaccactttgtactcatggtttgtcatgctaaa

SEQ ID NO: 15354 - protein, 92 aa, Zea mays subsp. mays; identical to SEQ ID NO: 11541
  peptide (1)..(92): Ceres Seq. ID no. 13632772

SEQ ID NO: 15355 - protein, 64 aa, Zea mays subsp. mays; identical to SEQ ID NO: 11542
  peptide (1)..(64): Ceres Seq. ID no. 13632773

SEQ ID NO: 15356 - DNA, 1932 bp, Zea mays subsp. mays; identical to SEQ ID NO: 5189
  misc_feature (1)..(1932): Ceres Seq. ID no. 13637288
  misc_feature (1)..(1932): Ortholog of  Ceres SEQ ID NO 13596021 as cited in SEQ ID NO 62020

SEQ ID NO: 15357 - protein, 538 aa, Zea mays subsp. mays; identical to SEQ ID NO: 5190
  peptide (1)..(538): Ceres Seq. ID no. 13637289

SEQ ID NO: 15358 - protein, 517 aa, Zea mays subsp. mays; identical to SEQ ID NO: 5191
  peptide (1)..(517): Ceres Seq. ID no. 13637290

SEQ ID NO: 15359 - protein, 474 aa, Zea mays subsp. mays; identical to SEQ ID NO: 5192
  peptide (1)..(474): Ceres Seq. ID no. 13637291

SEQ ID NO: 15360 - DNA, 2430 bp, Zea mays subsp. mays
  misc_feature (1)..(2430): Ceres Seq. ID no. 15180086
  misc_feature (1)..(2430): Ortholog of  Ceres SEQ ID NO 15178728 as cited in SEQ ID NO 67280
aaaaaaaaccgagtcgagtccacagtccacaccaccaccgcgaggtccactaaaaaaacaagagcattaccggcaccaatcaatcaggctggcagtggagtgacagcggcggcaacaccacgcccacgcggcgccggagccgatcccccgatggatctcccgccgctctcccaccaggccctcttcgccgtcgtccgatccgccgacgcgcccgccgtccgcgcggtcctggccgacgccgaggcgtcggccacctccttggccgcgctcgccgccgctcagacggacgccggggaaaccgcgctgtacgttgccgcggaggccggcagcgaggaggtcgtgcgcctcctcctccctctctacgacttcgaggcagccaccgtccgctcacgccttgacctcgacgccttccatgtcgccgccaagcagggccacaccggggttgtgaaagagttcttggggcggtgcccagggctttgctcagtctgtgactcttccaacactagtcccctctactcggctgctgtcaaggatcacttggatgtggtaaatgctatactggacactgatgatagctgcataaagattgtgcggaagaatgggaaaacatccctacatactgctgcaagaattggataccatcgtattgtcaaagcactcatagagagagatccaggaatcgttccgatcaatgataggaagggacaaactgcacttcacatggctgtgaagggcaaaaatacagatgtagtggaagagttattgatggctgatgtttccattctcaatgtgagggacaagaaaggaaatactgctttgcacatagctacacggaaatggaggccccagaatatctcaatgtgaaaaacatgtcgtatgtaagccatggtggtttcttagtggagcagagcatctattggaagagcaaccatatatctaagaacacacgaccatcttataaagcactataaagacattagttgctgctgctattaactgtctgccactagtcttactaagtcattgcaacggcgcaggaatgtatctggatgctaatatctcggtatcactattgtggaagtgtggctgacttctcaacacactattctagcagtccagcccaccccacataggccttaaagtattatataaatgatgcttgtgtgttaaaggaagatcaaaaatagccatccagaaactcacagaacgatggggtgcttttctattttatggagtatttacgattagtgttctaacttctaagttaccttactctcaaactccgaacatatgtttatattatttgtgggaattgttcatacttgattccaaacatgctttgctctgacttgccaactttattttaccttactagtcactattgttttcagatggtacagcttcttcttagctatgaatcacttgaagttaatgctatcaacagtcaaaatgaaacagctatggatttggctgacaaagttccttatggtgagtctaaaacggaaataatagagtggctgacagaagctggtgcaaagaatgccagaaatgttgggaaaattgatgaggcatcagaactgaggagaactgtgagcgatatcaagcacaatgttcaggcacagcttagcgagaatgctaaaaccaacaaacgagtgactgggattcgcaaagagttgcagaaactgcatagagaagctatccaaaacaccatcaattcagtcaccttggtagcgaccctgattgcctccattgccttcgtcgccatattcaatctgccaggtcaatacttccaggatgtgaatagtgggggagacattggtgaggctgaaatagccaagcttaccggtttccgtgtcttctgccttctgaacgctactgctctcttcatctccctcgcggtggtcgtggtgcagatcaccttggttgcctgggaaactggtgcccagaagcaagttatcaagatcgtgaataagctcatgtggacggcatgccttagcacgggtgtggcttttatctcgctggcctatgttgtagttggcccgcagcatgcctggatggccttcacggcatcagccatcggagggccgatcatgattggaactttcctgttcctagcctatcttctgttgcgcccacggttcaagttcggcgaagacagacagcgccgcatcaagagggcaagcggcagcaaatccttctcctggtcaatccatgatgggttttcagatctggaagccttctctgatcatgagaagaggatctatgccctgtaggagggtgtaacagtaactactcccacaagaggcaactgggagagtacaaatggttcatgtatatatttggtttagccgttttagcctagccgctgttagacctttctccccatgtacaatatctaataatgaagagctgcagctattgtaaagtgct

SEQ ID NO: 15361 - protein, 312 aa, Zea mays subsp. mays
  peptide (1)..(312): Ceres Seq. ID no. 15180087
MLCSDLPTLFYLTSHYCFQMVQLLLSYESLEVNAINSQNETAMDLADKVPYGESKTEIIEWLTEAGAKNARNVGKIDEASELRRTVSDIKHNVQAQLSENAKTNKRVTGIRKELQKLHREAIQNTINSVTLVATLIASIAFVAIFNLPGQYFQDVNSGGDIGEAEIAKLTGFRVFCLLNATALFISLAVVVVQITLVAWETGAQKQVIKIVNKLMWTACLSTGVAFISLAYVVVGPQHAWMAFTASAIGGPIMIGTFLFLAYLLLRPRFKFGEDRQRRIKRASGSKSFSWSIHDGFSDLEAFSDHEKRIYAL

SEQ ID NO: 15362 - protein, 293 aa, Zea mays subsp. mays; identical to SEQ ID NO: 3352
  peptide (1)..(293): Ceres Seq. ID no. 15180088

SEQ ID NO: 15363 - protein, 287 aa, Zea mays subsp. mays
  peptide (1)..(287): Ceres Seq. ID no. 15180089
KKNRVESTVHTTTARSTKKTRALPAPINQAGSGVTAAATPRPRGAGADPPMDLPPLSHQALFAVVRSADAPAVRAVLADAEASATSLAALAAAQTDAGETALYVAAEAGSEEVVRLLLPLYDFEAATVRSRLDLDAFHVAAKQGHTGVVKEFLGRCPGLCSVCDSSNTSPLYSAAVKDHLDVVNAILDTDDSCIKIVRKNGKTSLHTAARIGYHRIVKALIERDPGIVPINDRKGQTALHMAVKGKNTDVVEELLMADVSILNVRDKKGNTALHIATRKWRPQNISM

SEQ ID NO: 15364 - DNA, 537 bp, Zea mays subsp. mays
  misc_feature (1)..(537): Ceres Seq. ID no. 15176189
  misc_feature (1)..(537): Ortholog of  Ceres SEQ ID NO 14302208 as cited in SEQ ID NO 63753
aaccagaacagtccctccctcggcctatccggctactcagcaccaagaacagacggccaagtgcactcgcgcctttatataaaggaatccaccagcagcattagctttggtttcttctccttgtatgcacacaaacccatcgcagggcattctcgagcatagcttctctgcctctctctcccctcctctcctctcgtccactcctttgtccaaagcttcgagatggctcagcagcagaaggtggtggtcagggttccaaccatgacagatgacaagatcaagcagaaggccatcgaagctgttgcggacatttacggtattgactccatagcagcggatctgaaggagaacaagatgaccatcataggcgagatggatgcagtagcgattgccaagaagttaaagaagattggaaagattgacattgtgtctgttggacctgcaaaagaagaaaagaaggaagaaaagaaagaggagaaaaagaaggaaaagaaagaagagaagaaagaggagaagaaagaagagaagaaagaagag

SEQ ID NO: 15365 - protein, 105 aa, Zea mays subsp. mays
  peptide (1)..(105): Ceres Seq. ID no. 15176190
MAQQQKVVVRVPTMTDDKIKQKAIEAVADIYGIDSIAADLKENKMTIIGEMDAVAIAKKLKKIGKIDIVSVGPAKEEKKEEKKEEKKKEKKEEKKEEKKEEKKEE

SEQ ID NO: 15366 - protein, 92 aa, Zea mays subsp. mays
  peptide (1)..(92): Ceres Seq. ID no. 15176191
MTDDKIKQKAIEAVADIYGIDSIAADLKENKMTIIGEMDAVAIAKKLKKIGKIDIVSVGPAKEEKKEEKKEEKKKEKKEEKKEEKKEEKKEE

SEQ ID NO: 15367 - protein, 61 aa, Zea mays subsp. mays
  peptide (1)..(61): Ceres Seq. ID no. 15176192
MTIIGEMDAVAIAKKLKKIGKIDIVSVGPAKEEKKEEKKEEKKKEKKEEKKEEKKEEKKEE

SEQ ID NO: 15368 - DNA, 1396 bp, Zea mays subsp. mays; identical to SEQ ID NO: 14449
  misc_feature (1)..(1396): Ceres Seq. ID no. 13636262
  misc_feature (1)..(1396): Ortholog of  Ceres SEQ ID NO 14311671 as cited in SEQ ID NO 51251
  misc_feature (1)..(1396): Ortholog of  Ceres SEQ ID NO 14304791 as cited in SEQ ID NO 53562
  misc_feature (1)..(1396): Ortholog of  Ceres SEQ ID NO 14307355 as cited in SEQ ID NO 54610
  misc_feature (1)..(1396): Ortholog of  Ceres SEQ ID NO 13594298 as cited in SEQ ID NO 57803
  misc_feature (1)..(1396): Ortholog of  Ceres SEQ ID NO 14301894 as cited in SEQ ID NO 61677
  misc_feature (1)..(1396): Ortholog of  Ceres SEQ ID NO 13503476 as cited in SEQ ID NO 61978
  misc_feature (1)..(1396): Ortholog of  Ceres SEQ ID NO 12578438 as cited in SEQ ID NO 62201
  misc_feature (1)..(1396): Ortholog of  Ceres SEQ ID NO 12617675 as cited in SEQ ID NO 64656

SEQ ID NO: 15369 - protein, 233 aa, Zea mays subsp. mays; identical to SEQ ID NO: 14450
  peptide (1)..(233): Ceres Seq. ID no. 13636263

SEQ ID NO: 15370 - protein, 201 aa, Zea mays subsp. mays; identical to SEQ ID NO: 14451
  peptide (1)..(201): Ceres Seq. ID no. 13636264

SEQ ID NO: 15371 - protein, 160 aa, Zea mays subsp. mays; identical to SEQ ID NO: 14452
  peptide (1)..(160): Ceres Seq. ID no. 13636265

SEQ ID NO: 15372 - DNA, 553 bp, Zea mays subsp. mays
  misc_feature (1)..(553): Ceres Seq. ID no. 13631750
  misc_feature (1)..(553): Ortholog of  Ceres SEQ ID NO 14302474 as cited in SEQ ID NO 60589
atcggagtctcctagttgtgctcaaatcccacaatcttcttgtagcacaccactgtcttcgtccaactcggcggcgatgtctgggcgcggcaagggcggcaaggggctgggcaagggtggtgcgaaacgccaccgtaaggttctccgcgacaacatccagggtatcacgaagccggcaatccggaggctggcgaggaggagcgacgtgaagcgtatctccgggcttatctacgaggagacccgcggcgtgctcaagatcttcctcgagaatgtcatccgcgacgcgggcacctacaccgagcacgctcgccgcaagaccgtcaccgccatggatgttgtggacgccctcaagcggcaggggcgcactctgtacgggttcggtgggtgagcgcatctcttccctcgtctgcagcggctgccggtggcgtttcctcagttccctctgccttgcttggcttgatgtagagagttatcagattaaaatatctctgatgtgcttcgttattgggtggaatcatgtgtcccagcagtgctgggaaatcgagatcaagat

SEQ ID NO: 15373 - protein, 128 aa, Zea mays subsp. mays
  peptide (1)..(128): Ceres Seq. ID no. 13631751
SESPSCAQIPQSSCSTPLSSSNSAAMSGRGKGGKGLGKGGAKRHRKVLRDNIQGITKPAIRRLARRSDVKRISGLIYEETRGVLKIFLENVIRDAGTYTEHARRKTVTAMDVVDALKRQGRTLYGFGG

SEQ ID NO: 15374 - protein, 103 aa, Zea mays subsp. mays
  peptide (1)..(103): Ceres Seq. ID no. 13631752
MSGRGKGGKGLGKGGAKRHRKVLRDNIQGITKPAIRRLARRSDVKRISGLIYEETRGVLKIFLENVIRDAGTYTEHARRKTVTAMDVVDALKRQGRTLYGFGG

SEQ ID NO: 15375 - protein, 94 aa, Zea mays subsp. mays
  peptide (1)..(94): Ceres Seq. ID no. 13631753
MSSATRAPTPSTLAARPSPPWMLWTPSSGRGALCTGSVGERISSLVCSGCRWRFLSSLCLAWLDVESYQIKISLMCFVIGWNHVSQQCWEIEIK

SEQ ID NO: 15376 - DNA, 1211 bp, Zea mays subsp. mays
  misc_feature (1)..(1211): Ceres Seq. ID no. 13636562
  misc_feature (1)..(1211): Ortholog of  Ceres SEQ ID NO 13639243 as cited in SEQ ID NO 56820
  misc_feature (1)..(1211): Ortholog of  Ceres SEQ ID NO 13496409 as cited in SEQ ID NO 65697
acaccttccctcggtcccttccatctcctagccgccgccgccgccgccgctgcccaaaaccctacctaccctcttcttcccctcactctcctttcatctccattctaatggcggcccaacccgtccggcgaagctgctagtgcttgtatctactatcttcatcaggtacttcgcgatcctactgaagtattccccgccgccgctgccatggccaccctcaaccctttcgaactccttggcgccgacgacaacgacgacccgacgcagctgattgcggcggcggcggctgctgctcagaaagccgaggcgaagaagtccgccgtggcgcctgctgggaaggctgcccagcctgcggcgaccaccaagttcccgaccaagcccgctcctccctcgcagacggttcgggatgcacgcggcggtggctcatcagctcgtggaggctttggccgtggtgaacgtggccgtggcagaggtggacggggatatggccagaaccgtggcttcagtggtgacaatggcaatgagttccagggaggttatggtggcggaggctatggggatggtgctgtaactgggtggatctgcaaggatgctactgcaaatgaggaggaagaaaaggaagaggacaaggagatgactctggaggaatttgagaaaataagagaggagaagaggaaagcactacttgcattgaaggctgaggagaggaaagttgaagttgacaaggatttgcagtctctgcagccactttcaaacaagaaagaaaatgatgaagttttcattaagctgggttctgacaaggataagaagaaggaaaatgcttgagcgtgatgagcgtgccaagaagtcggtgagcatcaacgagttcctgaaacctgctgaaggagaaaggtactacggcggccgtggccgtggaaggggccgtggggatcgtggtggttttagaggcggatacagagggggatacagtcgtggcccagctgctgctgctccatccattgaggatcaagctcagttcccaagccttggtgggaagtgaagggcgcccagctgctgctgtcaccgagcgttgtgttgtctgctgttgtcatatttaaattttgtccgacgttaaatttctgtgccacggtttaaacggaacaaataatgatgttgcatgtggctatctttagttatgtggtacttgacgttgaataccggagttgttgttt

SEQ ID NO: 15377 - protein, 205 aa, Zea mays subsp. mays
  peptide (1)..(205): Ceres Seq. ID no. 13636563
MATLNPFELLGADDNDDPTQLIAAAAAAAQKAEAKKSAVAPAGKAAQPAATTKFPTKPAPPSQTVRDARGGGSSARGGFGRGERGRGRGGRGYGQNRGFSGDNGNEFQGGYGGGGYGDGAVTGWICKDATANEEEEKEEDKEMTLEEFEKIREEKRKALLALKAEERKVEVDKDLQSLQPLSNKKENDEVFIKLGSDKDKKKENA

SEQ ID NO: 15378 - DNA, 1346 bp, Zea mays subsp. mays; identical to SEQ ID NO: 1190
  misc_feature (1)..(1346): Ceres Seq. ID no. 12633565
  misc_feature (1)..(1346): Ortholog of  Ceres SEQ ID NO 15171390 as cited in SEQ ID NO 51650
  misc_feature (1)..(1346): Ortholog of  Ceres SEQ ID NO 13594845 as cited in SEQ ID NO 51940

SEQ ID NO: 15379 - protein, 266 aa, Zea mays subsp. mays; identical to SEQ ID NO: 1191
  peptide (1)..(266): Ceres Seq. ID no. 12633566

SEQ ID NO: 15380 - protein, 185 aa, Zea mays subsp. mays; identical to SEQ ID NO: 1192
  peptide (1)..(185): Ceres Seq. ID no. 12633567

SEQ ID NO: 15381 - protein, 171 aa, Zea mays subsp. mays; identical to SEQ ID NO: 1193
  peptide (1)..(171): Ceres Seq. ID no. 12633568

SEQ ID NO: 15382 - DNA, 388 bp, Zea mays subsp. mays
  misc_feature (1)..(388): Ceres Seq. ID no. 13636823
  misc_feature (1)..(388): Ortholog of  Ceres SEQ ID NO 12597253 as cited in SEQ ID NO 62959
  misc_feature (1)..(388): Ortholog of  Ceres SEQ ID NO 12636917 as cited in SEQ ID NO 0
aagcaaatcgtaaaccgctacaaaaccgtcaaataggaaaaagtaatttgtgtttgtttagtttgttaagaagaatccgatggagtcgtcaccagcagcagcagcgaagccggcgagaggcacaggaggaaggaaaggaggtgatcggaagaagagtgtttccaagtccgtcaaggctggtcttcagtttcccgtcggtcgtatctctcgttacttgaagaaaggtcgttacgcgatcaggtacggcgccggtgctcccgtctacctcgccgccgtcctcgagtaccnnnnnngccgaggttctggagcttgctgggaacgcagcgagggacaacaagaagaacaggataaacccgaggcatctctgcttggcgataaggaacgatga

SEQ ID NO: 15383 - protein, 102 aa, Zea mays subsp. mays
  peptide (1)..(102): Ceres Seq. ID no. 13636824
  misc_feature (70)..(70): Xaa is any aa, unknown or other
  misc_feature (71)..(71): Xaa is any aa, unknown or other
  misc_feature (72)..(72): Xaa is any aa, unknown or other
MESSPAAAAKPARGTGGRKGGDRKKSVSKSVKAGLQFPVGRISRYLKKGRYAIRYGAGAPVYLAAVLEYXXXRGSGACWERSEGQQEEQDKPEASLLGDKER

SEQ ID NO: 15384 - protein, 71 aa, Zea mays subsp. mays
  peptide (1)..(71): Ceres Seq. ID no. 13636825
ANRKPLQNRQIGKSNLCLFSLLRRIRWSRHQQQQRSRREAQEEGKEVIGRRVFPSPSRLVFSFPSVVSLVT

SEQ ID NO: 15385 - DNA, 1401 bp, Zea mays subsp. mays; identical to SEQ ID NO: 11475
  misc_feature (1)..(1401): Ceres Seq. ID no. 13636633
  misc_feature (1)..(1401): Ortholog of  Ceres SEQ ID NO 14304148 as cited in SEQ ID NO 57313
  misc_feature (1)..(1401): Ortholog of  Ceres SEQ ID NO 13598513 as cited in SEQ ID NO 64102
  misc_feature (1)..(1401): Ortholog of  Ceres SEQ ID NO 14302224 as cited in SEQ ID NO 64268

SEQ ID NO: 15386 - protein, 393 aa, Zea mays subsp. mays; identical to SEQ ID NO: 11476
  peptide (1)..(393): Ceres Seq. ID no. 15220370

SEQ ID NO: 15387 - protein, 232 aa, Zea mays subsp. mays; identical to SEQ ID NO: 11477
  peptide (1)..(232): Ceres Seq. ID no. 15220371

SEQ ID NO: 15388 - protein, 228 aa, Zea mays subsp. mays; identical to SEQ ID NO: 11478
  peptide (1)..(228): Ceres Seq. ID no. 15220372

SEQ ID NO: 15389 - DNA, 717 bp, Zea mays subsp. mays
  misc_feature (1)..(717): Ceres Seq. ID no. 13628146
  misc_feature (1)..(717): Ortholog of  Ceres SEQ ID NO 12783998 as cited in SEQ ID NO 61535
  misc_feature (1)..(717): Ortholog of  Ceres SEQ ID NO 15174264 as cited in SEQ ID NO 61877
  misc_feature (1)..(717): Ortholog of  Ceres SEQ ID NO 12616383 as cited in SEQ ID NO 63582
ccaactacggtaactcgtctgctcgcatttcctcccaatccatcccgcctccaaacccgaactccaagtcgccccgcatcgatggcgcccaaggccgagaagaagcccgcggcgaagaagccggcggaggaggagcccgctgccgagaaggcgccggccgggaagaagcccaaggcggagaagcgtgtcccagcaggcaagtccgccggcaaggagggcggcgagggaaagaggggccggaagaagggcaagaagagcgtggagacctacaagatctacatcttcaaggtgctgaagcaggtgcacccggacatcggcatctcctctaaggccatgtccatcatgaactccttcatcaacgacatcttcgagaagctcgccgccgaggccgccaagctcgcgcggtacaacaagaagcccaccatcacctcccgtgagatccagacctccgtgcgcctcgtcctccccggggagctcgccaagcacgccgtctccgagggcaccaaggccgtcaccaagttcacctcgtcctaggctgcgtggcctccgcttgcaggcttccctcgtatgttcgcgtgtcttgctgtagttaggtgctgctgtgtctggtctcctccggtagcaactgttatctgatggaacagtaacaatgcttattgaatccagctagttgcttatttgtggatcctctctctttgttgttggccacctttatct

SEQ ID NO: 15390 - protein, 177 aa, Zea mays subsp. mays
  peptide (1)..(177): Ceres Seq. ID no. 13628147
PTTVTRLLAFPPNPSRLQTRTPSRPASMAPKAEKKPAAKKPAEEEPAAEKAPAGKKPKAEKRVPAGKSAGKEGGEGKRGRKKGKKSVETYKIYIFKVLKQVHPDIGISSKAMSIMNSFINDIFEKLAAEAAKLARYNKKPTITSREIQTSVRLVLPGELAKHAVSEGTKAVTKFTSS

SEQ ID NO: 15391 - protein, 150 aa, Zea mays subsp. mays
  peptide (1)..(150): Ceres Seq. ID no. 13628148
MAPKAEKKPAAKKPAEEEPAAEKAPAGKKPKAEKRVPAGKSAGKEGGEGKRGRKKGKKSVETYKIYIFKVLKQVHPDIGISSKAMSIMNSFINDIFEKLAAEAAKLARYNKKPTITSREIQTSVRLVLPGELAKHAVSEGTKAVTKFTSS

SEQ ID NO: 15392 - protein, 108 aa, Zea mays subsp. mays
  peptide (1)..(108): Ceres Seq. ID no. 13628149
NYGNSSARISSQSIPPPNPNSKSPRIDGAQGREEARGEEAGGGGARCREGAGREEAQGGEACPSRQVRRQGGRRGKEGPEEGQEERGDLQDLHLQGAEAGAPGHRHLL

SEQ ID NO: 15393 - DNA, 998 bp, Zea mays subsp. mays
  misc_feature (1)..(998): Ceres Seq. ID no. 13636513
  misc_feature (1)..(998): Ortholog of  Ceres SEQ ID NO 15174311 as cited in SEQ ID NO 0
ggacctttccaagtctcaaaccagagcgaggccgcactgcccgcgagtcctccactccgaccgcacgatggctgcgctgcgcctcgcctccttcaccctccgccccgccgctgccgcggcctccgcctcctccggcgggaccccagccgcgtccggctccgtctccgtctccttcgcccgcgcggcgcgagggctgccctccctccgcctggccccgccccgccrccgcrgggacmtcrccaggycycgcgccgcggccgaggccgcggcggagagctacgcrtccgcgctgtcggaggtggccgtcgagaacggcaccctcgagcagacggtctccgacctsgagaagctggagaagrtcttckcsgacgaggccgtcgccgagttcttcgacaaccccaccgtcccgcgcgaggagaaggccgagctcatcgrcgagatcgccargtcgtccgagctgcagccgcacgtcgtcaacttcctcaacgtcgtcgtcgacaacttccgcgcgkccatcgtgccgcagatcgtcgycgagttcgagaacgtctacaactcgctcacgggcaccgaggtcgccaccgtcacctccgtcgtgcagctcgagtcgcaggacctcgcgcagatcgcgcagcacgtccagaagatgaccggcgccaagaacgtccgcctcaagacgcagctcgacccggcgctcatcgccggcttcaccgtgcagtacggccgcgacggctccaacttgatcgacatgagcgtccggaagcagatcgaggagatcgcgtccgagttcgagttgcccgccgtcccgctcgaagtctgaggccggcttgaggcgtccatcctcgccctcgaagctataggtcctttttctgctgcctctctccctgctctgctattcatctgtatcattctctggttgttgaatgttttgagtgaatggtgaatgctgcatacctggattttaggattcatatttgaatgaatggtgaatacactgc

SEQ ID NO: 15394 - protein, 276 aa, Zea mays subsp. mays
  peptide (1)..(276): Ceres Seq. ID no. 15219366
  misc_feature (75)..(75): Xaa is any aa, unknown or other
  misc_feature (77)..(77): Xaa is any aa, unknown or other
  misc_feature (79)..(79): Xaa is any aa, unknown or other
  misc_feature (80)..(80): Xaa is any aa, unknown or other
  misc_feature (82)..(82): Xaa is any aa, unknown or other
  misc_feature (83)..(83): Xaa is any aa, unknown or other
  misc_feature (95)..(95): Xaa is any aa, unknown or other
  misc_feature (115)..(115): Xaa is any aa, unknown or other
  misc_feature (120)..(120): Xaa is any aa, unknown or other
  misc_feature (122)..(122): Xaa is any aa, unknown or other
  misc_feature (123)..(123): Xaa is any aa, unknown or other
  misc_feature (145)..(145): Xaa is any aa, unknown or other
  misc_feature (149)..(149): Xaa is any aa, unknown or other
  misc_feature (171)..(171): Xaa is any aa, unknown or other
  misc_feature (178)..(178): Xaa is any aa, unknown or other
GPFQVSNQSEAALPASPPLRPHDGCAAPRLLHPPPRRCRGLRLLRRDPSRVRLRLRLLRPRGARAALPPPGPAPXPXGXXQXXRRGRGRGGELRXRAVGGGRRERHPRADGLRPXEAGEXLXXRGRRRVLRQPHRPARGEGRAHXRDRXVVRAAAARRQLPQRRRRQLPRXHRAADRXRVRERLQLAHGHRGRHRHLRRAARVAGPRADRAARPEDDRRQERPPQDAARPGAHRRLHRAVRPRRLQLDRHERPEADRGDRVRVRVARRPARSLRPA

SEQ ID NO: 15395 - protein, 272 aa, Zea mays subsp. mays
  peptide (1)..(272): Ceres Seq. ID no. 15219367
  misc_feature (75)..(75): Xaa is any aa, unknown or other
  misc_feature (77)..(77): Xaa is any aa, unknown or other
  misc_feature (79)..(79): Xaa is any aa, unknown or other
  misc_feature (80)..(80): Xaa is any aa, unknown or other
  misc_feature (82)..(82): Xaa is any aa, unknown or other
  misc_feature (94)..(94): Xaa is any aa, unknown or other
  misc_feature (114)..(114): Xaa is any aa, unknown or other
  misc_feature (120)..(120): Xaa is any aa, unknown or other
  misc_feature (122)..(122): Xaa is any aa, unknown or other
  misc_feature (145)..(145): Xaa is any aa, unknown or other
  misc_feature (149)..(149): Xaa is any aa, unknown or other
  misc_feature (171)..(171): Xaa is any aa, unknown or other
  misc_feature (178)..(178): Xaa is any aa, unknown or other
DLSKSQTRARPHCPRVLHSDRTMAALRLASFTLRPAAAAASASSGGTPAASGSVSVSFARAARGLPSLRLAPPRXRXDXXRXRAAAEAAAESYXSALSEVAVENGTLEQTVSDXEKLEKXFXDEAVAEFFDNPTVPREEKAELIXEIAXSSELQPHVVNFLNVVVDNFRAXIVPQIVXEFENVYNSLTGTEVATVTSVVQLESQDLAQIAQHVQKMTGAKNVRLKTQLDPALIAGFTVQYGRDGSNLIDMSVRKQIEEIASEFELPAVPLEV

SEQ ID NO: 15396 - protein, 250 aa, Zea mays subsp. mays
  peptide (1)..(250): Ceres Seq. ID no. 15219368
  misc_feature (53)..(53): Xaa is any aa, unknown or other
  misc_feature (55)..(55): Xaa is any aa, unknown or other
  misc_feature (57)..(57): Xaa is any aa, unknown or other
  misc_feature (58)..(58): Xaa is any aa, unknown or other
  misc_feature (60)..(60): Xaa is any aa, unknown or other
  misc_feature (72)..(72): Xaa is any aa, unknown or other
  misc_feature (92)..(92): Xaa is any aa, unknown or other
  misc_feature (98)..(98): Xaa is any aa, unknown or other
  misc_feature (100)..(100): Xaa is any aa, unknown or other
  misc_feature (123)..(123): Xaa is any aa, unknown or other
  misc_feature (127)..(127): Xaa is any aa, unknown or other
  misc_feature (149)..(149): Xaa is any aa, unknown or other
  misc_feature (156)..(156): Xaa is any aa, unknown or other
MAALRLASFTLRPAAAAASASSGGTPAASGSVSVSFARAARGLPSLRLAPPRXRXDXXRXRAAAEAAAESYXSALSEVAVENGTLEQTVSDXEKLEKXFXDEAVAEFFDNPTVPREEKAELIXEIAXSSELQPHVVNFLNVVVDNFRAXIVPQIVXEFENVYNSLTGTEVATVTSVVQLESQDLAQIAQHVQKMTGAKNVRLKTQLDPALIAGFTVQYGRDGSNLIDMSVRKQIEEIASEFELPAVPLEV

SEQ ID NO: 15397 - DNA, 2065 bp, Zea mays subsp. mays; identical to SEQ ID NO: 14940
  misc_feature (1)..(2065): Ceres Seq. ID no. 13636855
  misc_feature (1)..(2065): Ortholog of  Ceres SEQ ID NO 14307682 as cited in SEQ ID NO 54529

SEQ ID NO: 15398 - protein, 565 aa, Zea mays subsp. mays; identical to SEQ ID NO: 14941
  peptide (1)..(565): Ceres Seq. ID no. 13636856

SEQ ID NO: 15399 - protein, 504 aa, Zea mays subsp. mays; identical to SEQ ID NO: 14942
  peptide (1)..(504): Ceres Seq. ID no. 13636857

SEQ ID NO: 15400 - protein, 475 aa, Zea mays subsp. mays; identical to SEQ ID NO: 14943
  peptide (1)..(475): Ceres Seq. ID no. 13636858

SEQ ID NO: 15401 - DNA, 685 bp, Zea mays subsp. mays; identical to SEQ ID NO: 10244
  misc_feature (1)..(685): Ceres Seq. ID no. 13628874
  misc_feature (1)..(685): Ortholog of  Ceres SEQ ID NO 12783998 as cited in SEQ ID NO 61535
  misc_feature (1)..(685): Ortholog of  Ceres SEQ ID NO 15174264 as cited in SEQ ID NO 61877
  misc_feature (1)..(685): Ortholog of  Ceres SEQ ID NO 12616383 as cited in SEQ ID NO 63582

SEQ ID NO: 15402 - protein, 175 aa, Zea mays subsp. mays; identical to SEQ ID NO: 10245
  peptide (1)..(175): Ceres Seq. ID no. 13628875

SEQ ID NO: 15403 - protein, 150 aa, Zea mays subsp. mays; identical to SEQ ID NO: 10246
  peptide (1)..(150): Ceres Seq. ID no. 13628876

SEQ ID NO: 15404 - protein, 96 aa, Zea mays subsp. mays; identical to SEQ ID NO: 10247
  peptide (1)..(96): Ceres Seq. ID no. 13628877

SEQ ID NO: 15405 - DNA, 616 bp, Zea mays subsp. mays
  misc_feature (1)..(616): Ceres Seq. ID no. 13636790
  misc_feature (1)..(616): Ortholog of  Ceres SEQ ID NO 13657220 as cited in SEQ ID NO 66169
  misc_feature (1)..(616): Ortholog of  Ceres SEQ ID NO 13663074 as cited in SEQ ID NO 69191
atgcacactcactcactccagtgcccactgcccactgcccactgcccgacgaggaagtttcacgatcccaacccgtataaatcgacgccgcgagggggagcgacgagcgatccccgtaattaacctgtcccagccgcaccgatccaccccccctcggcctcggcctccctccggccatggaggtgttctactacgtcgtgttcggcgcgctggccgccgtcgtggcggggctcgagctcggcaagagcggcaaggaccgcgtcgccaccacctccgcattcaactccttcaagaacaactacgtcctcgtctactccctcatgatgtccggggactggctgcagggcccctacgtctactacctctacagccagtatggcttcgacaagggcgacatcggccgcctcttcatcgccggcttcggatcctccatgctcttcggcaccatcgtcggctccctcgccgacaaacagggccgcaagagggcctgcgtcacctattgcatcagctacatcctcagctgcatcaccaagcactcccccgagtacagggtcctcatgatcggccgcatcctcgggggcatcgccacctcgctgctcttctccgccttcgagtc

SEQ ID NO: 15406 - protein, 205 aa, Zea mays subsp. mays
  peptide (1)..(205): Ceres Seq. ID no. 13636791
CTLTHSSAHCPLPTARRGSFTIPTRINRRREGERRAIPVINLSQPHRSTPPRPRPPSGHGGVLLRRVRRAGRRRGGARARQERQGPRRHHLRIQLLQEQLRPRLLPHDVRGLAAGPLRLLPLQPVWLRQGRHRPPLHRRLRILHALRHHRRLPRRQTGPQEGLRHLLHQLHPQLHHQALPRVQGPHDRPHPRGHRHLAALLRLRV

SEQ ID NO: 15407 - protein, 146 aa, Zea mays subsp. mays
  peptide (1)..(146): Ceres Seq. ID no. 13636792
MEVFYYVVFGALAAVVAGLELGKSGKDRVATTSAFNSFKNNYVLVYSLMMSGDWLQGPYVYYLYSQYGFDKGDIGRLFIAGFGSSMLFGTIVGSLADKQGRKRACVTYCISYILSCITKHSPEYRVLMIGRILGGIATSLLFSAFE

SEQ ID NO: 15408 - DNA, 540 bp, Zea mays subsp. mays
  misc_feature (1)..(540): Ceres Seq. ID no. 13628365
  misc_feature (1)..(540): Ortholog of  Ceres SEQ ID NO 13495070 as cited in SEQ ID NO 53216
  misc_feature (1)..(540): Ortholog of  Ceres SEQ ID NO 13656228 as cited in SEQ ID NO 65648
  misc_feature (1)..(540): Ortholog of  Ceres SEQ ID NO 15179618 as cited in SEQ ID NO 0
ctttccattagccatcctagccttcgccccctcgacgagaagaaccacctcaaaaccgaacagccgcaaaagaaagctgctagctactctatacatgataactagaacaggaccgtgaagtaatatatatataatgacgaagtcaggggcgctacaacttgctcggagcaccggagggtcgcttagcaaggaccaagtcaaatccgccgttgatcagtatgtgaagtaccacgacctccacggaggcgaacaagaatcaagaaagtcaaattacgctgatttggcaaacaagtactatgatcttgtcactggcttctacgaatatggatgaggcgactcattccattttgctggcggatatccgggtgaaacttcccgtgaagccattaagcggcaccagcattttatggcactacaattggggctcaagaagggtatgaaggttctggacgtgggatgtggaattgggggacctttaatagaaattgccagattcagctcaacttcaataactggattgaccaacaatgactaccatgt

SEQ ID NO: 15409 - protein, 65 aa, Zea mays subsp. mays
  peptide (1)..(65): Ceres Seq. ID no. 13628366
MTKSGALQLARSTGGSLSKDQVKSAVDQYVKYHDLHGGEQESRKSNYADLANKYYDLVTGFYEYG

SEQ ID NO: 15410 - protein, 47 aa, Zea mays subsp. mays
  peptide (1)..(47): Ceres Seq. ID no. 13628367
MILSLASTNMDEATHSILLADIRVKLPVKPLSGTSILWHYNWGSRRV

SEQ ID NO: 15411 - protein, 44 aa, Zea mays subsp. mays
  peptide (1)..(44): Ceres Seq. ID no. 13628368
MALQLGLKKGMKVLDVGCGIGGPLIEIARFSSTSITGLTNNDYH

SEQ ID NO: 15412 - DNA, 2368 bp, Zea mays subsp. mays
  misc_feature (1)..(2368): Ceres Seq. ID no. 15179435
  misc_feature (1)..(2368): Ortholog of  Ceres SEQ ID NO 13655755 as cited in SEQ ID NO 65117
atcttcgccgccgctaaacgttccccccacgccccaacctatccacgcgaaaccttctttcccccgggagacgattcgtcagggagaggaaagaggcaagaggggccatggacgctgccaagttggtgacgccggtcgctgtgtctcacattctggcgcacccgtcggcgggctccgacggcgcagtgaccgatctcgtcgttcaggtcctcgacctgaagtccgtcggcacgggcagccggttcagtttcacagcaactgacgggaaggataagatcaaggcgatgcttcccaccaacttcgggtcggaggtccgctctggcaacctgaagaacctcggcctcatccgcatcatcgactacacttgcaacgtcgtcaaaggcaaagatgacaaagtcttggttgtcatcaaatgcgagcttgtgtgccaagcgcttgacgccgagatcaacggcgaggccaaaaaagaggagcctccaattgtgctgaagcctaaggacgaatggatgggcgtgacatccccactcgctatgaagcccaagcaggaggtgaagtctgcgtcccagatcgtgaatgagcagcgtggaaatactgctcctgtcaagcccctttccatgacaaagagggtccatcctttgatcactctgaacccctaccagggtaactgggtcattaaggtgcgggtcacgagcaaaggcaacctgagaacctacaggaatgctcgcggagaaggctgtgtcttcaatgtagagctcaccgatgaggatggcacccagatccaagccaccatgtttaatgacgctgcaaagaagttctatccgatttttgagctgggaaaggtctattatgtctcaaaaggatctcttagaattgctaacaagcagttcaagactgtccaaaatgactacgagatgtcactaaacgagaatgctattgttgaagaagcagagggggagacttgcattccgcaagtgcaatacaaccttgtcaagattgatcaactaggatcatatgtcggtggcagggaacttgtagatattattggtgtggttcagagcgtatctcccacactcagtgtcaggagaaagattgacaacgagacaataccgaagcgtgacattgttgtggcggatgactctggcaaaactgttagtatctctctttggaatgatcttactactacgactgggcaagagcttttggacatggctgacagttcgcctgttgttgcgataaagagcctaaaagtgtctgacttccaaggcgtgtctctttctactgtaggcaaaagtactcttgcgattaatcctgatctacacgaggctcagaatcttaagtcatggtatgactctgaaggcaaagatacttcgctggcaccaattggtgcagaaatgggtgccgcacgggccggtggcttcaagtccacgtattctgatagagtttttctgtctcacattactagtgatcctgccatgggccaggaaaagcctgttttcttcagtttgtatgccaccataagccacatcaagcctgaccagaacatgtggtaccgtgcttgcaagacctgcaacaagaaggtgactgaaacttttggatctggatactggtgtgagggatgccaaaagaatgactcggaatgctcactgagatacatcatggtcatcaaggtttccgatcctactggcgaagcatgggtctctgtgttcaacgagcatgcagagaagatcattggctgcagcgccgacgagcttgatcggatcaggaaagaggagggggacgacagttatgttctgaagctcaaggaagccacctgggttcctcacctgttccgcgtcagcgtcacacagcatgaatacaataacgagaaaaggcagagaatcactgtgaggagtgaagcgccggtcgagcacgcagctgaatccaagtacctgcttgaacagatagcgaagcttactgcttgctagtagaagatgcaacctttctggtggttcgttaagggctgccctccgagatgtttcctctgggttttagcacttctgtaagatatatgtagaggtttggttaccttgatgtcaagcaacagatgctaggacagttcaagcatgatgcatgaagcctttgccgaattgcagtttcagttccctcattccgtgccaatgcaactttgttgagcaaatagcgagaattattaggactaattgatggtgtcaggtcattgcggccctaagctttagctctgtatcagcagtcagatgtattaaccattccctgctctaatagtcatctatcagcagtcagatgtatttaaccattccctgcttaatagctctctaccaggagtcggaagtttttaaccattccctgctcc

SEQ ID NO: 15413 - protein, 618 aa, Zea mays subsp. mays
  peptide (1)..(618): Ceres Seq. ID no. 15179436
MDAAKLVTPVAVSHILAHPSAGSDGAVTDLVVQVLDLKSVGTGSRFSFTATDGKDKIKAMLPTNFGSEVRSGNLKNLGLIRIIDYTCNVVKGKDDKVLVVIKCELVCQALDAEINGEAKKEEPPIVLKPKDEWMGVTSPLAMKPKQEVKSASQIVNEQRGNTAPVKPLSMTKRVHPLITLNPYQGNWVIKVRVTSKGNLRTYRNARGEGCVFNVELTDEDGTQIQATMFNDAAKKFYPIFELGKVYYVSKGSLRIANKQFKTVQNDYEMSLNENAIVEEAEGETCIPQVQYNLVKIDQLGSYVGGRELVDIIGVVQSVSPTLSVRRKIDNETIPKRDIVVADDSGKTVSISLWNDLTTTTGQELLDMADSSPVVAIKSLKVSDFQGVSLSTVGKSTLAINPDLHEAQNLKSWYDSEGKDTSLAPIGAEMGAARAGGFKSTYSDRVFLSHITSDPAMGQEKPVFFSLYATISHIKPDQNMWYRACKTCNKKVTETFGSGYWCEGCQKNDSECSLRYIMVIKVSDPTGEAWVSVFNEHAEKIIGCSADELDRIRKEEGDDSYVLKLKEATWVPHLFRVSVTQHEYNNEKRQRITVRSEAPVEHAAESKYLLEQIAKLTAC

SEQ ID NO: 15414 - protein, 559 aa, Zea mays subsp. mays
  peptide (1)..(559): Ceres Seq. ID no. 15179437
MLPTNFGSEVRSGNLKNLGLIRIIDYTCNVVKGKDDKVLVVIKCELVCQALDAEINGEAKKEEPPIVLKPKDEWMGVTSPLAMKPKQEVKSASQIVNEQRGNTAPVKPLSMTKRVHPLITLNPYQGNWVIKVRVTSKGNLRTYRNARGEGCVFNVELTDEDGTQIQATMFNDAAKKFYPIFELGKVYYVSKGSLRIANKQFKTVQNDYEMSLNENAIVEEAEGETCIPQVQYNLVKIDQLGSYVGGRELVDIIGVVQSVSPTLSVRRKIDNETIPKRDIVVADDSGKTVSISLWNDLTTTTGQELLDMADSSPVVAIKSLKVSDFQGVSLSTVGKSTLAINPDLHEAQNLKSWYDSEGKDTSLAPIGAEMGAARAGGFKSTYSDRVFLSHITSDPAMGQEKPVFFSLYATISHIKPDQNMWYRACKTCNKKVTETFGSGYWCEGCQKNDSECSLRYIMVIKVSDPTGEAWVSVFNEHAEKIIGCSADELDRIRKEEGDDSYVLKLKEATWVPHLFRVSVTQHEYNNEKRQRITVRSEAPVEHAAESKYLLEQIAKLTAC

SEQ ID NO: 15415 - protein, 485 aa, Zea mays subsp. mays
  peptide (1)..(485): Ceres Seq. ID no. 15179438
MGVTSPLAMKPKQEVKSASQIVNEQRGNTAPVKPLSMTKRVHPLITLNPYQGNWVIKVRVTSKGNLRTYRNARGEGCVFNVELTDEDGTQIQATMFNDAAKKFYPIFELGKVYYVSKGSLRIANKQFKTVQNDYEMSLNENAIVEEAEGETCIPQVQYNLVKIDQLGSYVGGRELVDIIGVVQSVSPTLSVRRKIDNETIPKRDIVVADDSGKTVSISLWNDLTTTTGQELLDMADSSPVVAIKSLKVSDFQGVSLSTVGKSTLAINPDLHEAQNLKSWYDSEGKDTSLAPIGAEMGAARAGGFKSTYSDRVFLSHITSDPAMGQEKPVFFSLYATISHIKPDQNMWYRACKTCNKKVTETFGSGYWCEGCQKNDSECSLRYIMVIKVSDPTGEAWVSVFNEHAEKIIGCSADELDRIRKEEGDDSYVLKLKEATWVPHLFRVSVTQHEYNNEKRQRITVRSEAPVEHAAESKYLLEQIAKLTAC

SEQ ID NO: 15416 - DNA, 2171 bp, Zea mays subsp. mays
  misc_feature (1)..(2171): Ceres Seq. ID no. 15179408
  misc_feature (1)..(2171): Ortholog of  Ceres SEQ ID NO 15171212 as cited in SEQ ID NO 56899
  misc_feature (1)..(2171): Ortholog of  Ceres SEQ ID NO 12613725 as cited in SEQ ID NO 68196
  misc_feature (1)..(2171): Ortholog of  Ceres SEQ ID NO 14301486 as cited in SEQ ID NO 69222
ataaataccactcctgcgattccaccttgcagttggaccggccgttgttgctttgcttcttcgcaaaaaaaaaacaaaaaaacaaaataggcctgtcttgctccgatcaggcgtgttcttaggcttcgctgcccctaccgcgtcttcgccgggatcggtccatggccggcgccgagcgcgcggaggcggtcgcgctggaacaagggctcctcgatccggaggaatccaaccaagtagtatacactggagatggatcagtcgacttttctggaaatcctgttgtcaaggaaagaacgggtagatggaaggcatgtccattcatattaggtaatgaatgctgtgaacgactggcctactatggcatctccacaaaccttgttacttacttgacaaaaaaactgcatgctggcaatgcctctgctgctagcagtgtgactacatggtcgggaacttgctacctaactccacttattggagcaatcctggctgatgcatactgggggaggtactggacaatcgcaacattttccacagtatacttcatcgggatgacactgctgactctttcagcatcagttcctatgctcatgcctccatcttgtgaaggatccttttgcccagcagcaagcccttttcagtatactgtcttttttcttggtctttatctgattgccctgggtactggtggaattaagccgtgtgtctcatcctttggagcggatcaatttgatgatacagatccagctgagcgaatccagaagggctctttcttcaattggttttatttttcaataaacattggtgctctcatatcaagcagctttctggtttgggtgcaagacaatgtaggatggggactggggtttggcattccgactgtattcatggggctggcaatcataagcttcttctctggtacatcactttataggttccaaaaaccaggaggtagtccaattacacgagtatgtcaggtgattgttgcctctttgcgcaagtggaatgtgcctgtcccagaggatagctctctcttgtatgagctacctaatggggtatcaacaattgaggggagtcggcaaatagagcacacagatgaactcagatgtttagataaggctgctacagttaccgaagttgatgtgaaaacggctgacttcaacaacccatggcggatatgcactgtcacccaggtggaagaactgaagatactagtaaggatgttccctgtctgggcaacaacaatagtgttttctgctgtatatgctcagatgtcaacaatgtttgtggaacaagggatggtgcttgacccatccttgggctctttcaagatccctccagcttcactatctactttcgacaccctaagtgtcatcatatgtgtcccgatgtatgattacatcgtggttccgatagccaggagattcactggcaacgagaggggctttacagagttgcagaggatgggtattggcctggtaatttccatcatggctatgtcagtcgccgcagtcctcgaaatcaagcggctagcagttgccagggaagcacacctggtggatcagaatgtcccggtcccactgagcatattctggcaaatccctcagtatttcctgattggtctagcggagattttcacattcattggggcgctcgagttcttctatgaccagtcaccagacgccatgaggagcctctgcagcgcgcttaatcttctcactactgcgtttgggaactatctcagcacgttcattttgacaatggttgcgtactttactacgaggggaggtaaccctgggtggattcctgacaacttgaacgaaggccatcttgattacttcttcttgctcatcgctggcatcagttttctgaacctgattgtttatgtcctctgtgctggcaaatacaagagcaagaaggcagcttgagttgtgaaggccaggggctggatggcgtgctgcgcgccatgttatggtggacacttcagttcaaaatctgtatatatgtttcccgcattaaccaccctagctgaagcaaccatctgcaattgttgcaaagtttatattcttcattgtgctggactaagttgattatacattcgtgcttctactttgtgtatgtatatatctgacctaaagttgctgaacatagacaatttcacttgccaaaaaaat

SEQ ID NO: 15417 - protein, 587 aa, Zea mays subsp. mays
  peptide (1)..(587): Ceres Seq. ID no. 15179409
MAGAERAEAVALEQGLLDPEESNQVVYTGDGSVDFSGNPVVKERTGRWKACPFILGNECCERLAYYGISTNLVTYLTKKLHAGNASAASSVTTWSGTCYLTPLIGAILADAYWGRYWTIATFSTVYFIGMTLLTLSASVPMLMPPSCEGSFCPAASPFQYTVFFLGLYLIALGTGGIKPCVSSFGADQFDDTDPAERIQKGSFFNWFYFSINIGALISSSFLVWVQDNVGWGLGFGIPTVFMGLAIISFFSGTSLYRFQKPGGSPITRVCQVIVASLRKWNVPVPEDSSLLYELPNGVSTIEGSRQIEHTDELRCLDKAATVTEVDVKTADFNNPWRICTVTQVEELKILVRMFPVWATTIVFSAVYAQMSTMFVEQGMVLDPSLGSFKIPPASLSTFDTLSVIICVPMYDYIVVPIARRFTGNERGFTELQRMGIGLVISIMAMSVAAVLEIKRLAVAREAHLVDQNVPVPLSIFWQIPQYFLIGLAEIFTFIGALEFFYDQSPDAMRSLCSALNLLTTAFGNYLSTFILTMVAYFTTRGGNPGWIPDNLNEGHLDYFFLLIAGISFLNLIVYVLCAGKYKSKKAA

SEQ ID NO: 15418 - protein, 458 aa, Zea mays subsp. mays
  peptide (1)..(458): Ceres Seq. ID no. 15179410
MTLLTLSASVPMLMPPSCEGSFCPAASPFQYTVFFLGLYLIALGTGGIKPCVSSFGADQFDDTDPAERIQKGSFFNWFYFSINIGALISSSFLVWVQDNVGWGLGFGIPTVFMGLAIISFFSGTSLYRFQKPGGSPITRVCQVIVASLRKWNVPVPEDSSLLYELPNGVSTIEGSRQIEHTDELRCLDKAATVTEVDVKTADFNNPWRICTVTQVEELKILVRMFPVWATTIVFSAVYAQMSTMFVEQGMVLDPSLGSFKIPPASLSTFDTLSVIICVPMYDYIVVPIARRFTGNERGFTELQRMGIGLVISIMAMSVAAVLEIKRLAVAREAHLVDQNVPVPLSIFWQIPQYFLIGLAEIFTFIGALEFFYDQSPDAMRSLCSALNLLTTAFGNYLSTFILTMVAYFTTRGGNPGWIPDNLNEGHLDYFFLLIAGISFLNLIVYVLCAGKYKSKKAA

SEQ ID NO: 15419 - protein, 447 aa, Zea mays subsp. mays
  peptide (1)..(447): Ceres Seq. ID no. 15179411
MLMPPSCEGSFCPAASPFQYTVFFLGLYLIALGTGGIKPCVSSFGADQFDDTDPAERIQKGSFFNWFYFSINIGALISSSFLVWVQDNVGWGLGFGIPTVFMGLAIISFFSGTSLYRFQKPGGSPITRVCQVIVASLRKWNVPVPEDSSLLYELPNGVSTIEGSRQIEHTDELRCLDKAATVTEVDVKTADFNNPWRICTVTQVEELKILVRMFPVWATTIVFSAVYAQMSTMFVEQGMVLDPSLGSFKIPPASLSTFDTLSVIICVPMYDYIVVPIARRFTGNERGFTELQRMGIGLVISIMAMSVAAVLEIKRLAVAREAHLVDQNVPVPLSIFWQIPQYFLIGLAEIFTFIGALEFFYDQSPDAMRSLCSALNLLTTAFGNYLSTFILTMVAYFTTRGGNPGWIPDNLNEGHLDYFFLLIAGISFLNLIVYVLCAGKYKSKKAA

SEQ ID NO: 15420 - DNA, 2013 bp, Zea mays subsp. mays
  misc_feature (1)..(2013): Ceres Seq. ID no. 12417337
  misc_feature (1)..(2013): Ortholog of  Ceres SEQ ID NO 15175923 as cited in SEQ ID NO 54037
  misc_feature (1)..(2013): Ortholog of  Ceres SEQ ID NO 14303366 as cited in SEQ ID NO 54418
  misc_feature (1)..(2013): Ortholog of  Ceres SEQ ID NO 13503610 as cited in SEQ ID NO 62416
  misc_feature (1)..(2013): Ortholog of  Ceres SEQ ID NO 13657610 as cited in SEQ ID NO 66165
  misc_feature (1)..(2013): Ortholog of  Ceres SEQ ID NO 13598312 as cited in SEQ ID NO 68448
  misc_feature (1)..(2013): Ortholog of  Ceres SEQ ID NO 13596100 as cited in SEQ ID NO 68573
gcacgagaccattacctagaacatcctaatcgaaaacttcagtaatcagtgctcgctagcccaccacgccctgaacctagcccggacaccagccagaacaggccatgtccatgggctccccggtgcagctcaggcggctgaagcctctgtaccagttcgtggtgaacaacatcctggccatcgtggccgtgccgctcgccaccgcggtcctgctcaaggcgtcgtcgctcgggcccgaggagatcctggcgctccggccggcgcacctgttcctggccgcgttcctgcctgccgcggccacggtgctgtacctgatgctccggccgcgcacggtgtacctggtggactacgcgtgcttccgcaccagccccaactgccgcgtcccgttcgcgacgttcctggagcactcccgcgtgtggccgggcttcgacgagcgcagcgtccggttcatgacgcgcctgctggagcggtcggggctcggggaggagacgtgcctgccgtacgcgcagcactacatcccgccgtcgcgcgacctggagtcctcccgcgccgaggccgagctcgtcatcttctcggccatcgacgacctgctcgccaagaccggggtctccccgcgggacatcgacatcctggtggtgaactgcagcctgttcgcgccgacgccgtccttcgcggacatggtcacgcaccggtacaggctccgcggggacgtgcgcaacgtgcacctcgccgggatggggtgcagcgcggggctcgtctccgtggagctggcccggaacctgctgcaggtggcgccgcggggcacgcgcgctctggtggtgtccacggagaccatcacccccaattactacatgggcgaggagcgcgcgatgctgctgcccaactgcctgttccgcatgggcggcgcggcggcgctgctgtccaccgacggcgccggcgcgcggttccgcctggcgcgcgtggtgcgcacgctgcgcggcgcgtcggacggcgcgtaccgctgcgtgtaccaggaggaggacgagcgcggcaacgtgggcatcaacctgtccaaggacctgatgagcatccgcgggcgacgcgctgaaggcgaacatcacggcgatggggcccctggtgctgccggcgtcggagcagctgctgttcgcgctgtccttcatcgcgcgcaaggtgctgaacaaccggatcaggccctacatcccggacttccgcacggcgttcgagcacttctgcatccacgcgggcgggcgcgccgtgatcgacgagctccagcgcagcctgacgctgtcggacgagcaggtggaggcgtcgcggatgacgctgcaccggttcggcaacacctccagcagctccctctggtacgagctcgcctacgtcgaggccaagggccgcatgcgcaggggagaccgcgtctggatgatcggcttcggctccggtttcaagtgcaacagcgccgcctgggagtgcatccgccccgccgccaacgccgacgggccgtgggccaactgcatccaccggtaccccgtgcacattcccgacgtgctcaagcactgagcccggcgccagctccagttccgtgccgtgccttgcctttcccttttcctcctcgcccggttgccattgcacctgctgctacatttggtttgtggacatcaaaacgaaccgctggaacagcgattggccgtggtcgtgaactaggttggtggaatatgtgatggagagtgacagagtacttgtcgtgtcgtatcaaggcggcggggtggtcgtcataaaggaggcgaggtcgggccaggctgccgtacatgggcgcccggggaacggacgtgtgttgtgcttgtccggggcgttgtattatctaccattttcctatttcttattacaattcattcctgcagtataccatgaaaagagatatgacatgagctagagctactagtagacgacaagacgagcaaaagctttgatgtatgtgtgcacctactctttatacaatcaagtgttctcatttaagtg

SEQ ID NO: 15421 - protein, 536 aa, Zea mays subsp. mays
  peptide (1)..(536): Ceres Seq. ID no. 12417338
MSMGSPVQLRRLKPLYQFVVNNILAIVAVPLATAVLLKASSLGPEEILALRPAHLFLAAFLPAAATVLYLMLRPRTVYLVDYACFRTSPNCRVPFATFLEHSRVWPGFDERSVRFMTRLLERSGLGEETCLPYAQHYIPPSRDLESSRAEAELVIFSAIDDLLAKTGVSPRDIDILVVNCSLFAPTPSFADMVTHRYRLRGDVRNVHLAGMGCSAGLVSVELARNLLQVAPRGTRALVVSTETITPNYYMGEERAMLLPNCLFRMGGAAALLSTDGAGARFRLARVVRTLRGASDGAYRCVYQEEDERGNVGINLSKDLMSIRGRRAEGEHHGDGAPGAAGVGAAAVRAVLHRAQGAEQPDQALHPGLPHGVRALLHPRGRARRDRRAPAQPDAVGRAGGGVADDAAPVRQHLQQLPLVRARLRRGQGPHAQGRPRLDDRLRLRFQVQQRRLGVHPPRRQRRRAVGQLHPPVPRAHSRRAQALSPAPAPVPCRALPFPFPPRPVAIAPAATFGLWTSKRTAGTAIGRGRELGWWNM

SEQ ID NO: 15422 - protein, 534 aa, Zea mays subsp. mays
  peptide (1)..(534): Ceres Seq. ID no. 12417339
MGSPVQLRRLKPLYQFVVNNILAIVAVPLATAVLLKASSLGPEEILALRPAHLFLAAFLPAAATVLYLMLRPRTVYLVDYACFRTSPNCRVPFATFLEHSRVWPGFDERSVRFMTRLLERSGLGEETCLPYAQHYIPPSRDLESSRAEAELVIFSAIDDLLAKTGVSPRDIDILVVNCSLFAPTPSFADMVTHRYRLRGDVRNVHLAGMGCSAGLVSVELARNLLQVAPRGTRALVVSTETITPNYYMGEERAMLLPNCLFRMGGAAALLSTDGAGARFRLARVVRTLRGASDGAYRCVYQEEDERGNVGINLSKDLMSIRGRRAEGEHHGDGAPGAAGVGAAAVRAVLHRAQGAEQPDQALHPGLPHGVRALLHPRGRARRDRRAPAQPDAVGRAGGGVADDAAPVRQHLQQLPLVRARLRRGQGPHAQGRPRLDDRLRLRFQVQQRRLGVHPPRRQRRRAVGQLHPPVPRAHSRRAQALSPAPAPVPCRALPFPFPPRPVAIAPAATFGLWTSKRTAGTAIGRGRELGWWNM

SEQ ID NO: 15423 - protein, 466 aa, Zea mays subsp. mays
  peptide (1)..(466): Ceres Seq. ID no. 12417340
MLRPRTVYLVDYACFRTSPNCRVPFATFLEHSRVWPGFDERSVRFMTRLLERSGLGEETCLPYAQHYIPPSRDLESSRAEAELVIFSAIDDLLAKTGVSPRDIDILVVNCSLFAPTPSFADMVTHRYRLRGDVRNVHLAGMGCSAGLVSVELARNLLQVAPRGTRALVVSTETITPNYYMGEERAMLLPNCLFRMGGAAALLSTDGAGARFRLARVVRTLRGASDGAYRCVYQEEDERGNVGINLSKDLMSIRGRRAEGEHHGDGAPGAAGVGAAAVRAVLHRAQGAEQPDQALHPGLPHGVRALLHPRGRARRDRRAPAQPDAVGRAGGGVADDAAPVRQHLQQLPLVRARLRRGQGPHAQGRPRLDDRLRLRFQVQQRRLGVHPPRRQRRRAVGQLHPPVPRAHSRRAQALSPAPAPVPCRALPFPFPPRPVAIAPAATFGLWTSKRTAGTAIGRGRELGWWNM

SEQ ID NO: 15424 - DNA, 1958 bp, Zea mays subsp. mays; identical to SEQ ID NO: 8207
  misc_feature (1)..(1958): Ceres Seq. ID no. 13636500
  misc_feature (1)..(1958): Ortholog of  Ceres SEQ ID NO 15177043 as cited in SEQ ID NO 57425

SEQ ID NO: 15425 - protein, 427 aa, Zea mays subsp. mays; identical to SEQ ID NO: 8208
  peptide (1)..(427): Ceres Seq. ID no. 13636501
  misc_feature (29)..(29): Xaa is any aa, unknown or other
  misc_feature (42)..(42): Xaa is any aa, unknown or other

SEQ ID NO: 15426 - protein, 382 aa, Zea mays subsp. mays; identical to SEQ ID NO: 8209
  peptide (1)..(382): Ceres Seq. ID no. 13636502
  misc_feature (70)..(70): Xaa is any aa, unknown or other
  misc_feature (83)..(83): Xaa is any aa, unknown or other

SEQ ID NO: 15427 - protein, 269 aa, Zea mays subsp. mays; identical to SEQ ID NO: 8210
  peptide (1)..(269): Ceres Seq. ID no. 13636503

SEQ ID NO: 15428 - DNA, 455 bp, Zea mays subsp. mays
  misc_feature (1)..(455): Ceres Seq. ID no. 7113127
  misc_feature (1)..(455): Ortholog of  Ceres SEQ ID NO 13594464 as cited in SEQ ID NO 51203
  misc_feature (1)..(455): Ortholog of  Ceres SEQ ID NO 15224956 as cited in SEQ ID NO 59487
gaacaaaaaccttttgattccaattgttcttctctcttcttcttcttcttcttcttcttcttcttcgccgcttcttctctctcgaattcaccccatctcaagtgtacgttagcctcctccctctaatggcgactcgtcttcagtttgagaacaactgcgaagttggtgtcttttccaaactcactaatgcctattgcttagtcgctataggaggctctgagaacttttacagtgcttttgagtcggagttagcagatgttatccctattgttaagacctctattggaggaacacgaattattgggcgtctttgtgctggaaacaagaatgggcttcttgtacctcatacaacaactgaccaagagcttcaacacttaaggaacagtctacctgatcaagttgtggtccagcgaattgatgaacgtctgtctgctcttggaaattgcattgcctgc

SEQ ID NO: 15429 - protein, 110 aa, Zea mays subsp. mays
  peptide (1)..(110): Ceres Seq. ID no. 7113128
MATRLQFENNCEVGVFSKLTNAYCLVAIGGSENFYSAFESELADVIPIVKTSIGGTRIIGRLCAGNKNGLLVPHTTTDQELQHLRNSLPDQVVVQRIDERLSALGNCIAC

SEQ ID NO: 15430 - DNA, 1080 bp, Zea mays subsp. mays
  misc_feature (1)..(1080): Ceres Seq. ID no. 13600524
  misc_feature (1)..(1080): Ortholog of  Ceres SEQ ID NO 13600310 as cited in SEQ ID NO 5086
atttctcaaacaagagcagattccattacatatgatgttaaagttcagatgattgaaatatacaatgagcaagagggatttattaatgactgatggtgcaaacaaaagattagagatacgcaataattctcatgtaaatggactcaacatcccagatgccaatattgtgccagtcaagtgcgcacaagatgttttggatctgatgaaagttggccagagaaaccgagcagttggatcaactgctcttaatgaacgaagtagccgctcacacagtgtgttgacagctcatgtacaaggaaaggaggtaatttcaggctcaactctaagagggtgtcttcatctagtggatctcgcgggaagtgagagggtagacaaatctgaagcgactggagaaagactaactgaagccaagcacataaacaaatctctgtcagcacttggtgatgttatatctgcacttgcccaaaagagttcccatgttccatatagaaatagcaagtttacacaagtgctgcaggatgccttaggtggtcaagcaaaaacattgatgtttgtgcatgtgaaccctgaaacagactcttttagtgaaacaatgagcactctcaaattcgctgagcgtgtagctacaatagaacttggtgccgcccgtgcaaacaaggaagcaggccaggtcaaagacctaaaggaagagatcgccaagcttaaattggcattagatgaaaaggaaaatgaagtggcacagtttaaagatcttgctaaccgtgtgacttctgagatgagaaatgcaagaacaagatcacctttaaccgccagcatgtccttgaaacctgaagtcagtcaagaatccagtgtagacacctgtacaagtgagataagaagttcatcatctggcaagcaaagaaggttccgttcaccgttgtcagtgagagagctagacgataagtcacctgtcatcagcagggaactgtacctgagtgcgcgaaagtacaagactccctctcctccggttagaagctcactctctgtcgagagaggcagctttgccaaaatcgtggagaacactggaagcatcgactgcac

SEQ ID NO: 15431 - protein, 338 aa, Zea mays subsp. mays
  peptide (1)..(338): Ceres Seq. ID no. 13600525
MSKRDLLMTDGANKRLEIRNNSHVNGLNIPDANIVPVKCAQDVLDLMKVGQRNRAVGSTALNERSSRSHSVLTAHVQGKEVISGSTLRGCLHLVDLAGSERVDKSEATGERLTEAKHINKSLSALGDVISALAQKSSHVPYRNSKFTQVLQDALGGQAKTLMFVHVNPETDSFSETMSTLKFAERVATIELGAARANKEAGQVKDLKEEIAKLKLALDEKENEVAQFKDLANRVTSEMRNARTRSPLTASMSLKPEVSQESSVDTCTSEIRSSSSGKQRRFRSPLSVRELDDKSPVISRELYLSARKYKTPSPPVRSSLSVERGSFAKIVENTGSIDC

SEQ ID NO: 15432 - protein, 331 aa, Zea mays subsp. mays
  peptide (1)..(331): Ceres Seq. ID no. 13600526
MTDGANKRLEIRNNSHVNGLNIPDANIVPVKCAQDVLDLMKVGQRNRAVGSTALNERSSRSHSVLTAHVQGKEVISGSTLRGCLHLVDLAGSERVDKSEATGERLTEAKHINKSLSALGDVISALAQKSSHVPYRNSKFTQVLQDALGGQAKTLMFVHVNPETDSFSETMSTLKFAERVATIELGAARANKEAGQVKDLKEEIAKLKLALDEKENEVAQFKDLANRVTSEMRNARTRSPLTASMSLKPEVSQESSVDTCTSEIRSSSSGKQRRFRSPLSVRELDDKSPVISRELYLSARKYKTPSPPVRSSLSVERGSFAKIVENTGSIDC

SEQ ID NO: 15433 - protein, 292 aa, Zea mays subsp. mays
  peptide (1)..(292): Ceres Seq. ID no. 13600527
MKVGQRNRAVGSTALNERSSRSHSVLTAHVQGKEVISGSTLRGCLHLVDLAGSERVDKSEATGERLTEAKHINKSLSALGDVISALAQKSSHVPYRNSKFTQVLQDALGGQAKTLMFVHVNPETDSFSETMSTLKFAERVATIELGAARANKEAGQVKDLKEEIAKLKLALDEKENEVAQFKDLANRVTSEMRNARTRSPLTASMSLKPEVSQESSVDTCTSEIRSSSSGKQRRFRSPLSVRELDDKSPVISRELYLSARKYKTPSPPVRSSLSVERGSFAKIVENTGSIDC

SEQ ID NO: 15434 - DNA, 1222 bp, Zea mays subsp. mays; identical to SEQ ID NO: 14395
  misc_feature (1)..(1222): Ceres Seq. ID no. 13623625
  misc_feature (1)..(1222): Ortholog of  Ceres SEQ ID NO 12578784 as cited in SEQ ID NO 20729
  misc_feature (1)..(1222): Ortholog of  Ceres SEQ ID NO 13658847 as cited in SEQ ID NO 66674

SEQ ID NO: 15435 - protein, 351 aa, Zea mays subsp. mays; identical to SEQ ID NO: 14396
  peptide (1)..(351): Ceres Seq. ID no. 13623626

SEQ ID NO: 15436 - protein, 252 aa, Zea mays subsp. mays; identical to SEQ ID NO: 14397
  peptide (1)..(252): Ceres Seq. ID no. 13623627

SEQ ID NO: 15437 - protein, 215 aa, Zea mays subsp. mays; identical to SEQ ID NO: 14398
  peptide (1)..(215): Ceres Seq. ID no. 13623628

SEQ ID NO: 15438 - DNA, 1027 bp, Zea mays subsp. mays
  misc_feature (1)..(1027): Ceres Seq. ID no. 13600228
  misc_feature (1)..(1027): Ortholog of  Ceres SEQ ID NO 13638213 as cited in SEQ ID NO 57275
gaccagatcgctacgagacgccgcgcgatcggacccaggccgacgccgacgacccctctcgccgccggcggccatggcgtacggcgaccgcgtcaccaccttcgaggactccgagaaggagagcgagtacggctatgtccgcaaggtctctggacctgtggttgtggctgatggaatgggtggtgctgccatgtatgaacttgttcgtgtcggacatgataacctcattggggaaattatccgtcttgagggcgattcagctacaatccaagtttatgaggaaacagctggactgatggttaatgaccctgtattgagaacaagaaagcctctttcagttgaattgggacctggaattcttggaaacatttttgacggtatccagcggcctctaaaaaccatcgctattaagtcaggagatgtgtatattcctcgtggtgtttcagttcctgcccttgacaaagatgtattgtgggaatttcagccaacgaagctaggtgttggagatgtcatcacaggtggagatctatacgctactgtttttgagaacacattgatgcagcaccatgttgctcttccaccgggttctatggggaaaataagttacattgcaccagctggccagtacaacctgcaggacacagtgctagaattggaatttcagggcataaaaaagaaatttaccatgcttcagacatggcctgtgcgttcaccaaggcctgttgcatcgaagcttgctgcggatacacctcttctgacagggcagcgtgtactggatgcactattcccctcggttctgggaggcacttgctgtattccaggagcatttggctgtggtaaaactgtcattagtcaggcactttccaagtactccaattccgaagctgtggtttatgtgggctgtggtgaacgaggaaacgagatggctgaggttctcatggactttccccagttgacaatgcaattcgctgatggccgtagagagtctgtcatgaaaagaacaacactggtggctaacacatcaaac

SEQ ID NO: 15439 - protein, 342 aa, Zea mays subsp. mays
  peptide (1)..(342): Ceres Seq. ID no. 13600229
TRSLRDAARSDPGRRRRPLSPPAAMAYGDRVTTFEDSEKESEYGYVRKVSGPVVVADGMGGAAMYELVRVGHDNLIGEIIRLEGDSATIQVYEETAGLMVNDPVLRTRKPLSVELGPGILGNIFDGIQRPLKTIAIKSGDVYIPRGVSVPALDKDVLWEFQPTKLGVGDVITGGDLYATVFENTLMQHHVALPPGSMGKISYIAPAGQYNLQDTVLELEFQGIKKKFTMLQTWPVRSPRPVASKLAADTPLLTGQRVLDALFPSVLGGTCCIPGAFGCGKTVISQALSKYSNSEAVVYVGCGERGNEMAEVLMDFPQLTMQFADGRRESVMKRTTLVANTSN

SEQ ID NO: 15440 - protein, 318 aa, Zea mays subsp. mays
  peptide (1)..(318): Ceres Seq. ID no. 13600230
MAYGDRVTTFEDSEKESEYGYVRKVSGPVVVADGMGGAAMYELVRVGHDNLIGEIIRLEGDSATIQVYEETAGLMVNDPVLRTRKPLSVELGPGILGNIFDGIQRPLKTIAIKSGDVYIPRGVSVPALDKDVLWEFQPTKLGVGDVITGGDLYATVFENTLMQHHVALPPGSMGKISYIAPAGQYNLQDTVLELEFQGIKKKFTMLQTWPVRSPRPVASKLAADTPLLTGQRVLDALFPSVLGGTCCIPGAFGCGKTVISQALSKYSNSEAVVYVGCGERGNEMAEVLMDFPQLTMQFADGRRESVMKRTTLVANTSN

SEQ ID NO: 15441 - protein, 284 aa, Zea mays subsp. mays
  peptide (1)..(284): Ceres Seq. ID no. 13600231
MGGAAMYELVRVGHDNLIGEIIRLEGDSATIQVYEETAGLMVNDPVLRTRKPLSVELGPGILGNIFDGIQRPLKTIAIKSGDVYIPRGVSVPALDKDVLWEFQPTKLGVGDVITGGDLYATVFENTLMQHHVALPPGSMGKISYIAPAGQYNLQDTVLELEFQGIKKKFTMLQTWPVRSPRPVASKLAADTPLLTGQRVLDALFPSVLGGTCCIPGAFGCGKTVISQALSKYSNSEAVVYVGCGERGNEMAEVLMDFPQLTMQFADGRRESVMKRTTLVANTSN

SEQ ID NO: 15442 - DNA, 1984 bp, Zea mays subsp. mays; identical to SEQ ID NO: 2138
  misc_feature (1)..(1984): Ceres Seq. ID no. 12595533
  misc_feature (1)..(1984): Ortholog of  Ceres SEQ ID NO 12626078 as cited in SEQ ID NO 69113

SEQ ID NO: 15443 - protein, 598 aa, Zea mays subsp. mays; identical to SEQ ID NO: 2139
  peptide (1)..(598): Ceres Seq. ID no. 12595534

SEQ ID NO: 15444 - protein, 572 aa, Zea mays subsp. mays; identical to SEQ ID NO: 2140
  peptide (1)..(572): Ceres Seq. ID no. 12595535

SEQ ID NO: 15445 - protein, 478 aa, Zea mays subsp. mays; identical to SEQ ID NO: 2141
  peptide (1)..(478): Ceres Seq. ID no. 12595536

SEQ ID NO: 15446 - DNA, 1129 bp, Zea mays subsp. mays
  misc_feature (1)..(1129): Ceres Seq. ID no. 13589476
  misc_feature (1)..(1129): Ortholog of  Ceres SEQ ID NO 12465083 as cited in SEQ ID NO 68239
ttctcgccgaacggaaaaccctgcccggaccttcgttgcagcgctacgagcttcgacgggccgctcgatctccacctctgaagtggctgcttgtgatctagatctgaaagctgcagtggttgacagctgagtgtgaaactgtgaatcgaagatgagcgtggtgggcttcgacctcggcaatgagagctgcatcgtggcggtcgcgcggcagcgcggcatcgacgtggtcctcaacgaggagtccaagcgcgagacacccgccatcgtctgcttcggggacaagcagcggttcatcggcaccgccggcgccgcgtcctctaccatgaaccccaagaactccatttctcagatcaagcgcttgctaggccgcaagtactccgaccccgagctacagagagatctcgcctccttcccgttccgtgtcacggagggccccgatggttttcccctggtccatgtacgatacctgggcgaggaacggacgttcacctctaccaagctgcttgccatggtgctgtccaatttgaagggcattgctgagggtaacctgaatgctgcagttgttgattgttgcattggtattccagtctactttacggatctgcagcgcagggctgttcttgatgctgctactattgcgggtctccagccattgcgattgttccatgagacaacagccactgcactggcatatggtatttataagactgatctcccggagaatgaccagttgaacgttgcatttgttgatgtcggtcatgcaagcatgcaggtcagtgttgtcggttacaagaagggacagctcaagatgttgtcgcatacgtatgaccagtctcttggcgggagggactttgatgaggccctgtttaagcactttgcagctaaattcaaagaggaatataagattgatgtgtaccagaatgcgcgtgcatgcattaggttgcgtgtggcatgtgagaaacttaagaaggtactgagcgccaacccagaggccccactgaacattgagtgtttgatggatgagaaggatgtgcggggttttattaaaagggaggagttcgaacagatcagtgcctcggtgctggaacgcgtgaaaggaccactggaaaaggccttggctgaagctggg

SEQ ID NO: 15447 - protein, 326 aa, Zea mays subsp. mays
  peptide (1)..(326): Ceres Seq. ID no. 13589477
MSVVGFDLGNESCIVAVARQRGIDVVLNEESKRETPAIVCFGDKQRFIGTAGAASSTMNPKNSISQIKRLLGRKYSDPELQRDLASFPFRVTEGPDGFPLVHVRYLGEERTFTSTKLLAMVLSNLKGIAEGNLNAAVVDCCIGIPVYFTDLQRRAVLDAATIAGLQPLRLFHETTATALAYGIYKTDLPENDQLNVAFVDVGHASMQVSVVGYKKGQLKMLSHTYDQSLGGRDFDEALFKHFAAKFKEEYKIDVYQNARACIRLRVACEKLKKVLSANPEAPLNIECLMDEKDVRGFIKREEFEQISASVLERVKGPLEKALAEAG

SEQ ID NO: 15448 - protein, 269 aa, Zea mays subsp. mays
  peptide (1)..(269): Ceres Seq. ID no. 13589478
MNPKNSISQIKRLLGRKYSDPELQRDLASFPFRVTEGPDGFPLVHVRYLGEERTFTSTKLLAMVLSNLKGIAEGNLNAAVVDCCIGIPVYFTDLQRRAVLDAATIAGLQPLRLFHETTATALAYGIYKTDLPENDQLNVAFVDVGHASMQVSVVGYKKGQLKMLSHTYDQSLGGRDFDEALFKHFAAKFKEEYKIDVYQNARACIRLRVACEKLKKVLSANPEAPLNIECLMDEKDVRGFIKREEFEQISASVLERVKGPLEKALAEAG

SEQ ID NO: 15449 - protein, 207 aa, Zea mays subsp. mays
  peptide (1)..(207): Ceres Seq. ID no. 13589479
MVLSNLKGIAEGNLNAAVVDCCIGIPVYFTDLQRRAVLDAATIAGLQPLRLFHETTATALAYGIYKTDLPENDQLNVAFVDVGHASMQVSVVGYKKGQLKMLSHTYDQSLGGRDFDEALFKHFAAKFKEEYKIDVYQNARACIRLRVACEKLKKVLSANPEAPLNIECLMDEKDVRGFIKREEFEQISASVLERVKGPLEKALAEAG

SEQ ID NO: 15450 - DNA, 986 bp, Zea mays subsp. mays
  misc_feature (1)..(986): Ceres Seq. ID no. 13589517
  misc_feature (1)..(986): Ortholog of  Ceres SEQ ID NO 15226190 as cited in SEQ ID NO 351
gaggccagggcggagtccgagccctggggtcgggcgaggcggagtttcgtcgtcttccgggtcttagcccgagtccgagccctggggtcgggcggagcggagttcgccgtcttccgggtcttagcccgagtccgagccctggggtcgggcggagcggagttcgccgtcttccgggtcttagcccgagtccgagccctggggtcgggcggagcggagttcgccgtcttccgggtcttagcccgagtccgagccctggggtcgggcggagcggagttcgccgtcttccgggtcttagcccgagtccgagccctggggtcgggcggagcggagttcgccgtcttccgggtcttagcccgagtccgagccctggggtcgggcggagcggagttcgccgtggcgcctctggcaaggcctgactgcctgtcagactcactctgtcgagtggcaccgcagtcggggtggcgcaggcggcgctgtccttctgtcagactggtcagtggagcggtggagtgacagcggtcacttcggctctgccgggggggcgcgtgtcaggataaaggtgtcaggccacctttgcgttaaatgctcctgcaacttggtcagtcggtgtggtgatttagtcagggttgcttctgagcgaagccaaggcctcgggcgagccggtgatgtgtccgccgtaaaaaggggggcctcgggcgagacggaagntctctcgaggtcggctgccttcggccgaggctaggctcgggtggaagngcgatcgagtcactcgtgtggactggatccctggacttaatcggtgcccatcaggcctttgcagcttttngcttnatgggggttaccaagctgagaaattangcngtcttggagggtacccctaattatggtccccgacagtagcccccgaagctcncaaggggagtggtagcactcgcttgggaggcttttgtcgcactttttttgcaaggggacagcccttttctccg

SEQ ID NO: 15451 - protein, 170 aa, Zea mays subsp. mays
  peptide (1)..(170): Ceres Seq. ID no. 13589518
EARAESEPWGRARRSFVVFRVLARVRALGSGGAEFAVFRVLARVRALGSGGAEFAVFRVLARVRALGSGGAEFAVFRVLARVRALGSGGAEFAVFRVLARVRALGSGGAEFAVFRVLARVRALGSGGAEFAVAPLARPDCLSDSLCRVAPQSGWRRRRCPSVRLVSGAVE

SEQ ID NO: 15452 - protein, 137 aa, Zea mays subsp. mays
  peptide (1)..(137): Ceres Seq. ID no. 13589519
GQGGVRALGSGEAEFRRLPGLSPSPSPGVGRSGVRRLPGLSPSPSPGVGRSGVRRLPGLSPSPSPGVGRSGVRRLPGLSPSPSPGVGRSGVRRLPGLSPSPSPGVGRSGVRRLPGLSPSPSPGVGRSGVRRGASGKA

SEQ ID NO: 15453 - DNA, 606 bp, Zea mays subsp. mays
  misc_feature (1)..(606): Ceres Seq. ID no. 12594624
  misc_feature (1)..(606): Ortholog of  Ceres SEQ ID NO 13599971 as cited in SEQ ID NO 0
tttgccgtgtgctgcatctggggaagagctacgtacccatcagcctaaagcatctggggaagctgttgcatctcaagttcctagagatagtatacacgcctattgatgagctccctaaggaaattgggcatctgaggtctcttcagacactgatattagaccgtactggactagacgagctgccaccggttgtttgctcgcttacacggttgatgtgcctgatagcccaggggttcgaaaggttgccagctgacaggatggggaacctaacgtccctggaggagctacgactacgtagggtagttggccggagtgccacccaagccctagtggcagagcttggcaagctgacgaggttgagggtggtcgacatcaccttttcagagcagctagaggagagcttgcaagaagcattggtgcaatctctgtccaatctgcggggactccaggaactaacgcttttgtttaaaatgacacggtggggaagcgatatgtggggagactgggagccaccaaggcagctccggcgcctgattattgaaggcatcatcgtcttctcacgacagcctcgatggatcaaccgctcctgtctgccacgcctctgct

SEQ ID NO: 15454 - protein, 201 aa, Zea mays subsp. mays
  peptide (1)..(201): Ceres Seq. ID no. 12594625
CRVLHLGKSYVPISLKHLGKLLHLKFLEIVYTPIDELPKEIGHLRSLQTLILDRTGLDELPPVVCSLTRLMCLIAQGFERLPADRMGNLTSLEELRLRRVVGRSATQALVAELGKLTRLRVVDITFSEQLEESLQEALVQSLSNLRGLQELTLLFKMTRWGSDMWGDWEPPRQLRRLIIEGIIVFSRQPRWINRSCLPRLC

SEQ ID NO: 15455 - protein, 131 aa, Zea mays subsp. mays
  peptide (1)..(131): Ceres Seq. ID no. 12594626
MCLIAQGFERLPADRMGNLTSLEELRLRRVVGRSATQALVAELGKLTRLRVVDITFSEQLEESLQEALVQSLSNLRGLQELTLLFKMTRWGSDMWGDWEPPRQLRRLIIEGIIVFSRQPRWINRSCLPRLC

SEQ ID NO: 15456 - protein, 116 aa, Zea mays subsp. mays
  peptide (1)..(116): Ceres Seq. ID no. 12594627
MGNLTSLEELRLRRVVGRSATQALVAELGKLTRLRVVDITFSEQLEESLQEALVQSLSNLRGLQELTLLFKMTRWGSDMWGDWEPPRQLRRLIIEGIIVFSRQPRWINRSCLPRLC

SEQ ID NO: 15457 - DNA, 2388 bp, Zea mays subsp. mays
  misc_feature (1)..(2388): Ceres Seq. ID no. 13579684
  misc_feature (1)..(2388): Ortholog of  Ceres SEQ ID NO 13654989 as cited in SEQ ID NO 63117
  misc_feature (1)..(2388): Ortholog of  Ceres SEQ ID NO 13584744 as cited in SEQ ID NO 69137
  misc_feature (1)..(2388): Ortholog of  Ceres SEQ ID NO 15179672 as cited in SEQ ID NO 0
cggatttggaggagtcgaataaacaaggaaactcctcccggcccagaaagcacttcacttgcaacagtccccgtcagggagggagcattgctgtgcgggatggcgataaggaagagcggaggcggtggcggggtggggggtgtggcgcggcggctgctgcttctggcctgctgctgcatttggcctggtggacggatcttcactgctgcggacactgaccccaacgatcttaatgtcctcaatacgctcttcaccagtctgaattctcctgggcagctcagagcttggcgggcgaatggcggtgatccttgtggccagtcatggcagggcattacctgctcaggatcaggggtcactaaaatcctattaccaaacttgtcactcaccggaaatctggcctacaacatgaataacttgggttcattagttgagcttgacatgagccaaaataaccttggcggtggaggtcaaatacagtacaatcttcccaatatgaagcttgagaaactcaatcttgcaggaaatcaatttggtggaaatttaccctactcaatttcgacgatgcctaatcttaagtatttaaaccttaatcataaccaactacaaggaaacatcactgatgtattttccaacctttatagtttgtcagagctggatctctcctttaattctcttactggtgatctaccacaaagtttcactggattgtcaagcctgaaaagaatgtatttgcagaacaaccaatttactggttatatcaatgtcttagccaaccttccccttgaaaccctgaatgttggaaacaaccatttcactggttggattcccagtcagcttaagaagataaacaatctacagaccgacggaaattcttggagcacaggaccagcgccacctccacctccatatacagcgcctcctcctccaaaccattggaatggcgcgggtcagaatggtgatggttcatcaagttctggtggaagacctgggataggtggtggaggtgtagcaggaatcattatatcattgctgattgttggatcagttgttgcattttttctaatcaaaagaagaaaacacaaagctattatggaagaacaatttgaacagcatcagccgttcacttccttcccttcaaatgaagttaacgacatgaagcctatctatgagtccaccacagtagacatagagtctttggcttcacctgcttcgattaatctgaaaccacccccgaagatagaacagaacaaatcatttgatgatgatgatgatttttcaaacaagactgctgcaaatagaagtaatataacacctatgaaggcaactgtttattcagttgcagatctacagatggcaacagatagcttcagcttcgataaccttgttggagagggtacttttggacgtgtttacagggcacagttcaatggtggaaaggttctggccatcaagaaattagacattactgtgatgccatttcaatcgtctgatgactttgctgaactggtctcgaacatttcaaaattgcaccatccgaatctgaatgagcttgtaggctattgcatggaacatggccagcacttgcttgtgtatgatttccataggaatggatcgcttcatgatctacgccacctttcagatgagtacagcaaggcacttagctggaactctcgcatcaagttcgcactcggctctgcccgtgcactggagtaccttcatgaaatatgttctccatccatcatccataagaatttcaaggcatcaaatattttgctggactcagaattcaatccacacctttcagatactggacttgcaagcttcattcctggtgctgaattccaggcagcagaacaaagtgccggatacactgccccagaagtggacatgaccggtcagtacaccctcaagagtgatgtttacagctttggagttgtcatgcttgagctactgacaggacgtagaccatttgacagctctagacccaggtcagagcagtcacttgtgcggtgggcagcacctcagctgcatgacatcgatgcattggacagaatggtcgatcctgcactcaagggtctatacccagccaaatctctatcccgatttgctgatgtcctcgccctgtgtgtccagcctgaaccagaattcaggccaccaatgtcagaggtggtgcaagcattggttcgacttgtgcagagggccaacatgacgaagaggatgcttgatggaggagatacttctcgtggaccagatgatcaggaccaatatttcatatgacaagctgaactcgagcttttcagctacctctcagattgtatttatctcgtctcgttccactagcgcccggcagagacataatcacacaagtggaagagacagaactctgtc

SEQ ID NO: 15458 - protein, 758 aa, Zea mays subsp. mays
  peptide (1)..(758): Ceres Seq. ID no. 13579685
RIWRSRINKETPPGPESTSLATVPVREGALLCGMAIRKSGGGGGVGGVARRLLLLACCCIWPGGRIFTAADTDPNDLNVLNTLFTSLNSPGQLRAWRANGGDPCGQSWQGITCSGSGVTKILLPNLSLTGNLAYNMNNLGSLVELDMSQNNLGGGGQIQYNLPNMKLEKLNLAGNQFGGNLPYSISTMPNLKYLNLNHNQLQGNITDVFSNLYSLSELDLSFNSLTGDLPQSFTGLSSLKRMYLQNNQFTGYINVLANLPLETLNVGNNHFTGWIPSQLKKINNLQTDGNSWSTGPAPPPPPYTAPPPPNHWNGAGQNGDGSSSSGGRPGIGGGGVAGIIISLLIVGSVVAFFLIKRRKHKAIMEEQFEQHQPFTSFPSNEVNDMKPIYESTTVDIESLASPASINLKPPPKIEQNKSFDDDDDFSNKTAANRSNITPMKATVYSVADLQMATDSFSFDNLVGEGTFGRVYRAQFNGGKVLAIKKLDITVMPFQSSDDFAELVSNISKLHHPNLNELVGYCMEHGQHLLVYDFHRNGSLHDLRHLSDEYSKALSWNSRIKFALGSARALEYLHEICSPSIIHKNFKASNILLDSEFNPHLSDTGLASFIPGAEFQAAEQSAGYTAPEVDMTGQYTLKSDVYSFGVVMLELLTGRRPFDSSRPRSEQSLVRWAAPQLHDIDALDRMVDPALKGLYPAKSLSRFADVLALCVQPEPEFRPPMSEVVQALVRLVQRANMTKRMLDGGDTSRGPDDQDQYFI

SEQ ID NO: 15459 - protein, 725 aa, Zea mays subsp. mays
  peptide (1)..(725): Ceres Seq. ID no. 13579686
MAIRKSGGGGGVGGVARRLLLLACCCIWPGGRIFTAADTDPNDLNVLNTLFTSLNSPGQLRAWRANGGDPCGQSWQGITCSGSGVTKILLPNLSLTGNLAYNMNNLGSLVELDMSQNNLGGGGQIQYNLPNMKLEKLNLAGNQFGGNLPYSISTMPNLKYLNLNHNQLQGNITDVFSNLYSLSELDLSFNSLTGDLPQSFTGLSSLKRMYLQNNQFTGYINVLANLPLETLNVGNNHFTGWIPSQLKKINNLQTDGNSWSTGPAPPPPPYTAPPPPNHWNGAGQNGDGSSSSGGRPGIGGGGVAGIIISLLIVGSVVAFFLIKRRKHKAIMEEQFEQHQPFTSFPSNEVNDMKPIYESTTVDIESLASPASINLKPPPKIEQNKSFDDDDDFSNKTAANRSNITPMKATVYSVADLQMATDSFSFDNLVGEGTFGRVYRAQFNGGKVLAIKKLDITVMPFQSSDDFAELVSNISKLHHPNLNELVGYCMEHGQHLLVYDFHRNGSLHDLRHLSDEYSKALSWNSRIKFALGSARALEYLHEICSPSIIHKNFKASNILLDSEFNPHLSDTGLASFIPGAEFQAAEQSAGYTAPEVDMTGQYTLKSDVYSFGVVMLELLTGRRPFDSSRPRSEQSLVRWAAPQLHDIDALDRMVDPALKGLYPAKSLSRFADVLALCVQPEPEFRPPMSEVVQALVRLVQRANMTKRMLDGGDTSRGPDDQDQYFI

SEQ ID NO: 15460 - protein, 623 aa, Zea mays subsp. mays
  peptide (1)..(623): Ceres Seq. ID no. 13579687
MNNLGSLVELDMSQNNLGGGGQIQYNLPNMKLEKLNLAGNQFGGNLPYSISTMPNLKYLNLNHNQLQGNITDVFSNLYSLSELDLSFNSLTGDLPQSFTGLSSLKRMYLQNNQFTGYINVLANLPLETLNVGNNHFTGWIPSQLKKINNLQTDGNSWSTGPAPPPPPYTAPPPPNHWNGAGQNGDGSSSSGGRPGIGGGGVAGIIISLLIVGSVVAFFLIKRRKHKAIMEEQFEQHQPFTSFPSNEVNDMKPIYESTTVDIESLASPASINLKPPPKIEQNKSFDDDDDFSNKTAANRSNITPMKATVYSVADLQMATDSFSFDNLVGEGTFGRVYRAQFNGGKVLAIKKLDITVMPFQSSDDFAELVSNISKLHHPNLNELVGYCMEHGQHLLVYDFHRNGSLHDLRHLSDEYSKALSWNSRIKFALGSARALEYLHEICSPSIIHKNFKASNILLDSEFNPHLSDTGLASFIPGAEFQAAEQSAGYTAPEVDMTGQYTLKSDVYSFGVVMLELLTGRRPFDSSRPRSEQSLVRWAAPQLHDIDALDRMVDPALKGLYPAKSLSRFADVLALCVQPEPEFRPPMSEVVQALVRLVQRANMTKRMLDGGDTSRGPDDQDQYFI

SEQ ID NO: 15461 - DNA, 487 bp, Zea mays subsp. mays
  misc_feature (1)..(487): Ceres Seq. ID no. 7117870
  misc_feature (1)..(487): Ortholog of  Ceres SEQ ID NO 13565116 as cited in SEQ ID NO 0
aatctgattggggagaaaacaaaggctcaagatcgtattgctggtgcacacttctttagtcctgcgcatgtgatgccacttctggaaatagttcgtactcagcacacttcaccacaagttgttgttgacttgctggatgttgggaagaagattaaaaagacaccaatagtcgtcgggaactgtactggctttgcagttaataggatgttctttccatacactcaatcagcactcttttatgttgatcttgggtatggatgtttataagattgatcgtgcttgtaccaaatttggaatgcctatgggtcctttcagactggagaatctggtggggtttggggggggctggggccactggnatgcaataccttgaaaatttcccagagagggnctacaaatcaatgctacttcctctggatgatggaggacaatagggcaggngaagccacccnaaaaggattttacaagtatgagggcaagaggaaag

SEQ ID NO: 15462 - protein, 88 aa, Zea mays subsp. mays
  peptide (1)..(88): Ceres Seq. ID no. 7117871
NLIGEKTKAQDRIAGAHFFSPAHVMPLLEIVRTQHTSPQVVVDLLDVGKKIKKTPIVVGNCTGFAVNRMFFPYTQSALFYVDLGYGCL

SEQ ID NO: 15463 - protein, 64 aa, Zea mays subsp. mays
  peptide (1)..(64): Ceres Seq. ID no. 7117872
MPLLEIVRTQHTSPQVVVDLLDVGKKIKKTPIVVGNCTGFAVNRMFFPYTQSALFYVDLGYGCL

SEQ ID NO: 15464 - protein, 58 aa, Zea mays subsp. mays
  peptide (1)..(58): Ceres Seq. ID no. 7117873
  misc_feature (34)..(34): Xaa is any aa, unknown or other
  misc_feature (45)..(45): Xaa is any aa, unknown or other
MFIRLIVLVPNLECLWVLSDWRIWWGLGGAGATXMQYLENFPERXYKSMLLPLDDGGQ

SEQ ID NO: 15465 - DNA, 1856 bp, Zea mays subsp. mays; identical to SEQ ID NO: 4052
  misc_feature (1)..(1856): Ceres Seq. ID no. 13635560
  misc_feature (1)..(1856): Ortholog of  Ceres SEQ ID NO 14314404 as cited in SEQ ID NO 57421
  misc_feature (1)..(1856): Ortholog of  Ceres SEQ ID NO 13493536 as cited in SEQ ID NO 58515
  misc_feature (1)..(1856): Ortholog of  Ceres SEQ ID NO 15225741 as cited in SEQ ID NO 59606
  misc_feature (1)..(1856): Ortholog of  Ceres SEQ ID NO 12618461 as cited in SEQ ID NO 64349

SEQ ID NO: 15466 - protein, 549 aa, Zea mays subsp. mays; identical to SEQ ID NO: 4053
  peptide (1)..(549): Ceres Seq. ID no. 13635561
  misc_feature (496)..(496): Xaa is any aa, unknown or other

SEQ ID NO: 15467 - protein, 548 aa, Zea mays subsp. mays; identical to SEQ ID NO: 4054
  peptide (1)..(548): Ceres Seq. ID no. 13635562
  misc_feature (495)..(495): Xaa is any aa, unknown or other

SEQ ID NO: 15468 - protein, 418 aa, Zea mays subsp. mays; identical to SEQ ID NO: 4055
  peptide (1)..(418): Ceres Seq. ID no. 13635563
  misc_feature (365)..(365): Xaa is any aa, unknown or other

SEQ ID NO: 15469 - DNA, 767 bp, Zea mays subsp. mays
  misc_feature (1)..(767): Ceres Seq. ID no. 13635648
  misc_feature (1)..(767): Ortholog of  Ceres SEQ ID NO 13590691 as cited in SEQ ID NO 66290
acggcccggggaagggtttcaccgactttgctgctgtgaggaaagagattgctgatgaaacagatcgcataactgggaaaactaaagctatttcaaacgttcccatccatttgagtatatattcaccacatgttgttaacttgacacttatcgatcttcctggactgacaaaggtcgctgtagaggggcaaccagaatctattgttcaagatattgaaaacatggttcgagcttatgttgacaagccaaattgcatcatcttggctatctccccagctaaccaagatattgcaacgtcagatgctatcaagcttgctagggatgttgatccttcaggtgacaggacttttggagtcttaacaaagcttgatttaatggacaagggtaccaatgctgttgatgtgcttgaagggaggcaatatcgcttacaacacccctgggttggaattgtcaatcgctcacaagctgatatcaacaagaatgtcgatatgctctcagcaagacgcaaagaaaaagagtactttgagagtagtcctgaatatggtcacttggcacataaaatgggtgcagagtatcttgccaagcttctgtcacagcatttagaggctgtgatcagggcaaaaattccaagtattatagctatgattaacaaaacaattgatgaaatagaagcccagttggatcgacttggtaggccaattggaggtgacgctggggctcagttgtacacaatcttggatatgtgtcgggcatttgaccgtgtcttt

SEQ ID NO: 15470 - protein, 255 aa, Zea mays subsp. mays
  peptide (1)..(255): Ceres Seq. ID no. 13635649
GPGKGFTDFAAVRKEIADETDRITGKTKAISNVPIHLSIYSPHVVNLTLIDLPGLTKVAVEGQPESIVQDIENMVRAYVDKPNCIILAISPANQDIATSDAIKLARDVDPSGDRTFGVLTKLDLMDKGTNAVDVLEGRQYRLQHPWVGIVNRSQADINKNVDMLSARRKEKEYFESSPEYGHLAHKMGAEYLAKLLSQHLEAVIRAKIPSIIAMINKTIDEIEAQLDRLGRPIGGDAGAQLYTILDMCRAFDRVF

SEQ ID NO: 15471 - protein, 182 aa, Zea mays subsp. mays
  peptide (1)..(182): Ceres Seq. ID no. 13635650
MVRAYVDKPNCIILAISPANQDIATSDAIKLARDVDPSGDRTFGVLTKLDLMDKGTNAVDVLEGRQYRLQHPWVGIVNRSQADINKNVDMLSARRKEKEYFESSPEYGHLAHKMGAEYLAKLLSQHLEAVIRAKIPSIIAMINKTIDEIEAQLDRLGRPIGGDAGAQLYTILDMCRAFDRVF

SEQ ID NO: 15472 - protein, 131 aa, Zea mays subsp. mays
  peptide (1)..(131): Ceres Seq. ID no. 13635651
MDKGTNAVDVLEGRQYRLQHPWVGIVNRSQADINKNVDMLSARRKEKEYFESSPEYGHLAHKMGAEYLAKLLSQHLEAVIRAKIPSIIAMINKTIDEIEAQLDRLGRPIGGDAGAQLYTILDMCRAFDRVF

SEQ ID NO: 15473 - DNA, 936 bp, Zea mays subsp. mays
  misc_feature (1)..(936): Ceres Seq. ID no. 12636639
  misc_feature (1)..(936): Ortholog of  Ceres SEQ ID NO 14310460 as cited in SEQ ID NO 55105
  misc_feature (1)..(936): Ortholog of  Ceres SEQ ID NO 15179888 as cited in SEQ ID NO 66879
  misc_feature (1)..(936): Ortholog of  Ceres SEQ ID NO 12388689 as cited in SEQ ID NO 0
agagagagagagctcactagtccccccccccccccccgagcccatcaaggaggagttccccaccctctcctatgccgacttctaccagcttgccggagttgtggccgtcgaggtcaccggtgggcctgagatccccttccacccaggcagggaggacaagcctcagccgccacctgagggccgtcttcctgatgccaccaagggttctgaccacctgaggcaagtctttggcaagcagatgggtttgagtgatcaggacatcgttgccctctctggtggccacaccttgggaaggtgccacaaagagcggtctggttttgagggtgcctggactacgaaccctttggtctttgacaactcttacttcaaggaacttctgagtggtgacaaggagggccttcttcagctcccaagtgacaaagccctgctgagcgaccctgtcttccgccctcttgtggagaaatatgctgcagatgagaaggcattctttgatgactacaaagaggcccacctcaagctctccgaactggggtatgctgatgcttaaatggtccatatcctggagcgggacacaaactgctgcctgtatggactcgtgcgattcagggtgaaccatcagattgtctagtgtcttctctgtaataaatttatctgttcttggtactttgtctatggttgaatcggaacccattttccgtttgcctagattcttaatttctggtgctgtatccagctgaaactagtagatctatgatcttgtggctgcagcatgttcttgtcacttaccttttatctggtctccgttggttcggttcacaggttgtgtgctttaaaaggctgtgcttaagtcctgcaattcgagtccaccaaactgtagggtgcaagtcgagattttattagtgatgcaagttgctggtattggtgcattatcgggct

SEQ ID NO: 15474 - protein, 181 aa, Zea mays subsp. mays
  peptide (1)..(181): Ceres Seq. ID no. 12636640
ERESSLVPPPPPEPIKEEFPTLSYADFYQLAGVVAVEVTGGPEIPFHPGREDKPQPPPEGRLPDATKGSDHLRQVFGKQMGLSDQDIVALSGGHTLGRCHKERSGFEGAWTTNPLVFDNSYFKELLSGDKEGLLQLPSDKALLSDPVFRPLVEKYAADEKAFFDDYKEAHLKLSELGYADA

SEQ ID NO: 15475 - protein, 102 aa, Zea mays subsp. mays
  peptide (1)..(102): Ceres Seq. ID no. 12636641
MGLSDQDIVALSGGHTLGRCHKERSGFEGAWTTNPLVFDNSYFKELLSGDKEGLLQLPSDKALLSDPVFRPLVEKYAADEKAFFDDYKEAHLKLSELGYADA

SEQ ID NO: 15476 - DNA, 1709 bp, Zea mays subsp. mays
  misc_feature (1)..(1709): Ceres Seq. ID no. 13600415
  misc_feature (1)..(1709): Ortholog of  Ceres SEQ ID NO 15227226 as cited in SEQ ID NO 54691
  misc_feature (1)..(1709): Ortholog of  Ceres SEQ ID NO 14303169 as cited in SEQ ID NO 65741
gagctactactgttgaagcgattctcactaaaaccctcgaacacatcgcctttatctctttctctagatctactcgctatggctactatcaccgttgttaaggctagacagatcttcgacagtcgtggtaatcccaccgttgaggtggatatccacacgtcaaatggtgttaaggttacagcagctgttccaagtggagcttccactggtatctatgaggctcttgagctgagggatggaggatctgactaccttggaaagggtgtatctaaggctgttggcaatgtgaacaacatcatcgggccagcacttattggaaaggacccaactcagcagactgctattgacaacttcatggtccatgaacttgacggaacccaaaacgagtgggggtggtgcaagcaaaagcttggagccaatgcgattcttgctgtgtctcttgctgtctgcaaagctggggctgttgtcagcggcattcctctatacaagcacattgccaaccttgctggtaaccccaagattgtgctaccagttcctgccttcaacgtcatcaatggtggatcccatgccggaaacaagcttgctatgcaggagtttatgatcctccctgttggagctgcttctttcaaggaagccatgaagatgggtgtggaagtttaccaccacttgaagtctgtgattaagaagaagtacggccaggatgccacaaatgttggtgatgaaggtgggtttgcaccaaacattcaggagaacaaggagggtcttgaattgctcaagactgctatcgagaaggctggatacactggaaaggttgtcattggaatggatgttgccgcttcagagttctactcagaagacaagacctacgacttgaacttcaaagaagagaacaacaatggctctcagaagatttctggtgatgctctaaaggacctgtacaagtcctttgtcgctgagtacccaatcgtgtccattgaggacccatttgaccaagatgactgggagcactatgctaagatgaccactgagtgtggaaccgaggttcagattgtcggtgatgatttgttggtcactaaccccaagagagttgctaaggcaatcgccgagaagtcttgcaatgctcttcttttgaaggttaaccaaatcggatctgtaaccgagagtatcgaggcagttaagatgtcgaagaaagcaggttggggagtgatgaccagccacagaagtggtgaaaccgaggacacattcattgctgacttagccgttggcttgtctactggacaaatcaaaaccggtgctccttgcagatccgagcgtcttgccaagtacaaccagcttttgcgtattgaggaggagttgggatcagaggcaatttacgctggagtcaacttccgcaaacctgtagaaccctactaaatggagcttttagaagcaaagtggtcttctttgtgacgaggagaagatgacctgagtttgatcatttgctttaattaaataaaacgttctgtttttgtttcttctttgtttggtttcttacgtcttttgttgaaccctttttgggaaaagttactcatttttgtaagggaaacatgagaatgctctgcctttgtcgaggacggtagccccttatttcaatctaatttcggctttactcaaaaaaaaaaaaaaaaaaaactcgagggggggcccggtacccaattgttaaacacaat

SEQ ID NO: 15477 - protein, 470 aa, Zea mays subsp. mays
  peptide (1)..(470): Ceres Seq. ID no. 13600416
ELLLLKRFSLKPSNTSPLSLSLDLLAMATITVVKARQIFDSRGNPTVEVDIHTSNGVKVTAAVPSGASTGIYEALELRDGGSDYLGKGVSKAVGNVNNIIGPALIGKDPTQQTAIDNFMVHELDGTQNEWGWCKQKLGANAILAVSLAVCKAGAVVSGIPLYKHIANLAGNPKIVLPVPAFNVINGGSHAGNKLAMQEFMILPVGAASFKEAMKMGVEVYHHLKSVIKKKYGQDATNVGDEGGFAPNIQENKEGLELLKTAIEKAGYTGKVVIGMDVAASEFYSEDKTYDLNFKEENNNGSQKISGDALKDLYKSFVAEYPIVSIEDPFDQDDWEHYAKMTTECGTEVQIVGDDLLVTNPKRVAKAIAEKSCNALLLKVNQIGSVTESIEAVKMSKKAGWGVMTSHRSGETEDTFIADLAVGLSTGQIKTGAPCRSERLAKYNQLLRIEEELGSEAIYAGVNFRKPVEPY

SEQ ID NO: 15478 - protein, 444 aa, Zea mays subsp. mays
  peptide (1)..(444): Ceres Seq. ID no. 13600417
MATITVVKARQIFDSRGNPTVEVDIHTSNGVKVTAAVPSGASTGIYEALELRDGGSDYLGKGVSKAVGNVNNIIGPALIGKDPTQQTAIDNFMVHELDGTQNEWGWCKQKLGANAILAVSLAVCKAGAVVSGIPLYKHIANLAGNPKIVLPVPAFNVINGGSHAGNKLAMQEFMILPVGAASFKEAMKMGVEVYHHLKSVIKKKYGQDATNVGDEGGFAPNIQENKEGLELLKTAIEKAGYTGKVVIGMDVAASEFYSEDKTYDLNFKEENNNGSQKISGDALKDLYKSFVAEYPIVSIEDPFDQDDWEHYAKMTTECGTEVQIVGDDLLVTNPKRVAKAIAEKSCNALLLKVNQIGSVTESIEAVKMSKKAGWGVMTSHRSGETEDTFIADLAVGLSTGQIKTGAPCRSERLAKYNQLLRIEEELGSEAIYAGVNFRKPVEPY

SEQ ID NO: 15479 - protein, 352 aa, Zea mays subsp. mays
  peptide (1)..(352): Ceres Seq. ID no. 13600418
MVHELDGTQNEWGWCKQKLGANAILAVSLAVCKAGAVVSGIPLYKHIANLAGNPKIVLPVPAFNVINGGSHAGNKLAMQEFMILPVGAASFKEAMKMGVEVYHHLKSVIKKKYGQDATNVGDEGGFAPNIQENKEGLELLKTAIEKAGYTGKVVIGMDVAASEFYSEDKTYDLNFKEENNNGSQKISGDALKDLYKSFVAEYPIVSIEDPFDQDDWEHYAKMTTECGTEVQIVGDDLLVTNPKRVAKAIAEKSCNALLLKVNQIGSVTESIEAVKMSKKAGWGVMTSHRSGETEDTFIADLAVGLSTGQIKTGAPCRSERLAKYNQLLRIEEELGSEAIYAGVNFRKPVEPY

SEQ ID NO: 15480 - DNA, 470 bp, Zea mays subsp. mays
  misc_feature (1)..(470): Ceres Seq. ID no. 7118147
  misc_feature (1)..(470): Ortholog of  Ceres SEQ ID NO 14308925 as cited in SEQ ID NO 0
aactgagcctaagaaaaagaccaaaactgttattgagaagtattgggattgggagctttcaaatgagacacaacctatttggcttcggaaccccaaagaggtttcaactgaggaatacaatgattttttcaagaaaaccttcaatgagtacttgggccctttggcatcatcacacttcactacagagggtgaggtagaatttaggtcaattctttttgttcctgctacaaggaaaggaagatgtaactgctgatagtaggaagaccaagaatatcagactatatgttaagcgtgtattcatatcagatgactttgatggagaattgttcccaagatatttgagttttgtggaaggggtgttgttgactcaaatgaccttccattgaatgtttctcgtgagattccttcaagaaaagtcgaattgttcgtataaatgagaaaaaggctgggtgcggaaagcctttgatatg

SEQ ID NO: 15481 - protein, 83 aa, Zea mays subsp. mays
  peptide (1)..(83): Ceres Seq. ID no. 7118148
TEPKKKTKTVIEKYWDWELSNETQPIWLRNPKEVSTEEYNDFFKKTFNEYLGPLASSHFTTEGEVEFRSILFVPATRKGRCNC

SEQ ID NO: 15482 - protein, 64 aa, Zea mays subsp. mays
  peptide (1)..(64): Ceres Seq. ID no. 7118149
LSLRKRPKLLLRSIGIGSFQMRHNLFGFGTPKRFQLRNTMIFSRKPSMSTWALWHHHTSLQRVR

SEQ ID NO: 15483 - protein, 44 aa, Zea mays subsp. mays
  peptide (1)..(44): Ceres Seq. ID no. 7118150
MRHNLFGFGTPKRFQLRNTMIFSRKPSMSTWALWHHHTSLQRVR

SEQ ID NO: 15484 - DNA, 2887 bp, Zea mays subsp. mays; identical to SEQ ID NO: 10739
  misc_feature (1)..(2887): Ceres Seq. ID no. 13635664
  misc_feature (1)..(2887): Ortholog of  Ceres SEQ ID NO 13600310 as cited in SEQ ID NO 5086
  misc_feature (1)..(2887): Ortholog of  Ceres SEQ ID NO 14313863 as cited in SEQ ID NO 54791
  misc_feature (1)..(2887): Ortholog of  Ceres SEQ ID NO 15226111 as cited in SEQ ID NO 55604
  misc_feature (1)..(2887): Ortholog of  Ceres SEQ ID NO 15180362 as cited in SEQ ID NO 0

SEQ ID NO: 15485 - protein, 897 aa, Zea mays subsp. mays; identical to SEQ ID NO: 10740
  peptide (1)..(897): Ceres Seq. ID no. 13635665

SEQ ID NO: 15486 - protein, 808 aa, Zea mays subsp. mays; identical to SEQ ID NO: 10741
  peptide (1)..(808): Ceres Seq. ID no. 13635666

SEQ ID NO: 15487 - protein, 573 aa, Zea mays subsp. mays; identical to SEQ ID NO: 10742
  peptide (1)..(573): Ceres Seq. ID no. 13635667

SEQ ID NO: 15488 - DNA, 2150 bp, Zea mays subsp. mays
  misc_feature (1)..(2150): Ceres Seq. ID no. 13666124
  misc_feature (1)..(2150): Ortholog of  Ceres SEQ ID NO 12484007 as cited in SEQ ID NO 0
cactagtcccccccccccccccccttttcagagatggggcttaaactgcgggttgacatgcctcagcaggctatggatattgccacagtattctttcgtcagtcaaccacagcaagtgaagcaaaggagaacataaaaacacttaatgaccaaagagagagaaatgtcaaagctcttcaagaaaagatgaaattgaacaagaaggaggttcaacgctttaatcctgttgatgctttccccggggatgccataatatttatgagggtcttgaatctcctcagaggtctttcagcttcactaaatgttaggatagtttatctggacatcatgaggccatctgctgaatcaactttgttagggagtttgacacacggacaaatacctaacagtcagtggatttttgactcacctgctaactctgatgtggagtctaaactgagaaattatctgcttgagttgggaagcgacaaaattttaggaatacaagtctgcgcatataaagatggaaaggtcataatagatactgctgctggtatgctggggaagtatatccccgacctgttcaacctgattctctttttcctgttttctcagtgactaagggtatcactgctgggatggtacattggcttgtggacaaagggaagctgaagtacgaggaaacagttgccaacatatggccgaattttggaactaacggaaaggagttaataaaggtccatcatcttctaaatcacacatccggtttgcacaatgcactgggtgatgtggtaaagaatgatcctttgttggtatgtgactgggaggagacactaaaccagattacgaagagtacacctgagaccgaacctggttcagcacaaatttaccattacctctccttcggttggctgtgtgggggagtcatagagcatgcatctgggaagaagtttcaagagattctagaagaggctattgttcgtcctcttcacattgagggggagttgtatgttggcattccaccaggtgtcgagtctcggctggcagcgctgacagttgacaccgaggagctccagaagctatcaggaatcagggcaggtgcagatgtgccagcagctctgctgaacaacatcgcgcagatggcgtccggtgtgcccgctattttcaacacgctaaacgtccgtcgggccatcatccctgccgccaacggccactgctctgcccgcgcgctcgctcgatactacgcggcgctagcggccggcggttctgttcccccgccgcactcttcgggcgccatgccgcccctcggcagccacgtgcacacccccaagttcccgaccgcgccgctcaagaagaagaagaagggcgccggaaagaagaagggcgccggcggcggctccatgggagacctcaaggtccaggatataagcggcggcagcagcgacaggaacgggtactgccagctgcgcaccagcgacgccgacagcgaggcggggagcggcagcggcggaggcggcaggatgttcggcagcgacaggatcctcgacgcgttcatgggcgtcggcgagtacgagggcatggcgcaccgggacggcaagttcgggctcgggttcaggaggtacgacgacgccggcagcggcagaggcaggctgaggtgcttcgggcactccgggatgggcggctcgaccgggttctgcgacgtggagaacggcttcgccatcgcggtgacggtgaacaagctgtctctgggcagcgtcacgcgcggcgtcgtccggctcgtcctcgaggaactgggcctgcccgtgccggacgagtactcggccaccggggagaaggggcctgacatgatgctcaacctgacgacaacgacgacgactacgccgccgcaactgagatgacgacggcgaaactgagattaccaggttgggttcgtaataatctgtggaacgagatatatagcgagcagaaggaaggtggggtacagggatttggtggacagtatatatacgcgtgccattttgattttgacgtggcatgtaaaactcggcaaattctggtatattacgaagcaagctgggtgctgggaattgtggccagcagtacaagaaatggacatgctagtttgttgaccaaaaaaaaaaaaaaaaaaaactcgagggggggcccggtac

SEQ ID NO: 15489 - protein, 419 aa, Zea mays subsp. mays
  peptide (1)..(419): Ceres Seq. ID no. 13666125
MVHWLVDKGKLKYEETVANIWPNFGTNGKELIKVHHLLNHTSGLHNALGDVVKNDPLLVCDWEETLNQITKSTPETEPGSAQIYHYLSFGWLCGGVIEHASGKKFQEILEEAIVRPLHIEGELYVGIPPGVESRLAALTVDTEELQKLSGIRAGADVPAALLNNIAQMASGVPAIFNTLNVRRAIIPAANGHCSARALARYYAALAAGGSVPPPHSSGAMPPLGSHVHTPKFPTAPLKKKKKGAGKKKGAGGGSMGDLKVQDISGGSSDRNGYCQLRTSDADSEAGSGSGGGGRMFGSDRILDAFMGVGEYEGMAHRDGKFGLGFRRYDDAGSGRGRLRCFGHSGMGGSTGFCDVENGFAIAVTVNKLSLGSVTRGVVRLVLEELGLPVPDEYSATGEKGPDMMLNLTTTTTTTPPQLR

SEQ ID NO: 15490 - protein, 252 aa, Zea mays subsp. mays
  peptide (1)..(252): Ceres Seq. ID no. 13666126
MASGVPAIFNTLNVRRAIIPAANGHCSARALARYYAALAAGGSVPPPHSSGAMPPLGSHVHTPKFPTAPLKKKKKGAGKKKGAGGGSMGDLKVQDISGGSSDRNGYCQLRTSDADSEAGSGSGGGGRMFGSDRILDAFMGVGEYEGMAHRDGKFGLGFRRYDDAGSGRGRLRCFGHSGMGGSTGFCDVENGFAIAVTVNKLSLGSVTRGVVRLVLEELGLPVPDEYSATGEKGPDMMLNLTTTTTTTPPQLR

SEQ ID NO: 15491 - DNA, 1035 bp, Zea mays subsp. mays
  misc_feature (1)..(1035): Ceres Seq. ID no. 13579701
  misc_feature (1)..(1035): Ortholog of  Ceres SEQ ID NO 14315553 as cited in SEQ ID NO 60445
  misc_feature (1)..(1035): Ortholog of  Ceres SEQ ID NO 13598045 as cited in SEQ ID NO 66822
agtcgtgtgcccgagccgaggttccccaaacacgcacagcacacgaacacacaccgcgcccagctccgaggtgatcttccggcggccggcgagatgagccgtggcacaggcgcgggctatgaccgccacatcaccatcttctccccggagggacgcctgtaccaagtcgagtacgcgttcaaggcggtgaagtcggcgggtgtcacgtcgatcggcgtccgcggcgcggactccgtctgcgttgttacgcagaagaaagtcccggataagttgctggatcagacgagcgtgacacacctgttcccgatcaccaagtacgtcggattgcttgccactggccttacagctgatggtaggtcattggtttcccaagcaaggaacgaagcagctgagtttcgtttcaaatggggctaccgagatgccagttgatgtgttagcaaaatggattgctgacaaagctcaagtttacacgcagcatgcatacatgagaccccttggagtagttgctatggtcttgggctacgatgaagagaaaaatgcccaactattcaagtgcgaccctgctggtcacttctttggacataaggcaactagtgccgggctcaaggagcaggaagcaataaattttctggagaagaaaatgaaggatgacccgaaattcacctatgacgaaactgtgcagattgcaatatctgcgttgcaatcagttctccaggaagatttcaaggccactgagatcgaagttggtgttgtgagaaaagatgaccgcgttttcagagctctcacgacagaggagatcgatcagcacctgacggcaattagtgaacgtgactgagatgtcatatgctgcacatttcagcgctgcacacactgcgccgtgccattgtgcttcggcagtcattaagtttcatagtcatcaaaggaactgagtgtaccatttcacgtttaagaccgaaaacaagccccctctcgatgtactcgtttcatatcgttctgtggttgattgaaattggcacggtttggttttgggttgct

SEQ ID NO: 15492 - protein, 161 aa, Zea mays subsp. mays
  peptide (1)..(161): Ceres Seq. ID no. 13579702
MVGHWFPKQGTKQLSFVSNGATEMPVDVLAKWIADKAQVYTQHAYMRPLGVVAMVLGYDEEKNAQLFKCDPAGHFFGHKATSAGLKEQEAINFLEKKMKDDPKFTYDETVQIAISALQSVLQEDFKATEIEVGVVRKDDRVFRALTTEEIDQHLTAISERD

SEQ ID NO: 15493 - protein, 142 aa, Zea mays subsp. mays
  peptide (1)..(142): Ceres Seq. ID no. 13579703
SRVPEPRFPKHAQHTNTHRAQLRGDLPAAGEMSRGTGAGYDRHITIFSPEGRLYQVEYAFKAVKSAGVTSIGVRGADSVCVVTQKKVPDKLLDQTSVTHLFPITKYVGLLATGLTADGRSLVSQARNEAAEFRFKWGYRDAS

SEQ ID NO: 15494 - protein, 138 aa, Zea mays subsp. mays
  peptide (1)..(138): Ceres Seq. ID no. 13579704
MPVDVLAKWIADKAQVYTQHAYMRPLGVVAMVLGYDEEKNAQLFKCDPAGHFFGHKATSAGLKEQEAINFLEKKMKDDPKFTYDETVQIAISALQSVLQEDFKATEIEVGVVRKDDRVFRALTTEEIDQHLTAISERD

SEQ ID NO: 15495 - DNA, 2134 bp, Zea mays subsp. mays
  misc_feature (1)..(2134): Ceres Seq. ID no. 13600631
  misc_feature (1)..(2134): Ortholog of  Ceres SEQ ID NO 15176911 as cited in SEQ ID NO 54868
  misc_feature (1)..(2134): Ortholog of  Ceres SEQ ID NO 13596433 as cited in SEQ ID NO 68721
  misc_feature (1)..(2134): Ortholog of  Ceres SEQ ID NO 13599169 as cited in SEQ ID NO 0
tttttctctacgaattccttcagttcagttccgttgcgttcatttcctttcctccatgaatgattcgtgattgatgcctggatcgcgatcgcttctatttttcttcttcttttggtgcctaaacaaaaatattttatattgttattgggatggacttggtttctattgctttttcgtggggaatttccaaatttgtttcttcctgcgggtttatcggttaacgcgcgatgcatctgaggaggaggatcgattcactactctttgagattccgtatccgtctctgaaatgggaatatgacaatttttttaaaatccggtaccaacaggtataaccccccagaactacgatttccttccacggaaggagaattttgtccggagctcgaatttgtgccacgtttcacttcgttttttggagttttctgctcaactgagggaaagcagagccaccagagcttggccgtttcagatctctgtctgctaggctgccctttgctcaagggcaatcctcccttttcattcaacgcaaaaaaaaagatctttttttgcgtctttctatgaaatctggtgacaaatgttcagttgaactcagattcttcagatgcaattgaagatctcaaatcatcacatcattttttctgtcgaaataatttatgtgtgtgtgtgtttttcttaaaaaaactgttttttatgcttctgaatgcttgctgcattttcccgtgcatttgaaacaggaaaaacgtactagcgaaagctatagctgtgatctgaactcaattgctccgtaccgttttactttgcttcatgatccgttaatgaaagcaaaaagtaagcgcacggtgcgcatggatctgggttagttatgtactttgcttacttctgacataaagggcgcatttcaattttcaacaacacaaaagttgacgtccaagtggcctttgccttttccgctttctaagcaacttcgcttactgttcacttcacgaaatttccttatgctttacttgttttgcaactgaatgtggagtagcaatgtaacaaagtgaaaaagggtgtctggctgattcatttagtttctgctcgttttgctttcttgagatggttcgtgttagccttaacctttgtgatagcacaagaccaatgtggttgggactctgaacatgctcggattagcaaagaggatcaacgccaggttcctcctcaccagtaccagtgaggtctatggtgatcctctccagcacccgcaggtggagacttactggggcaatgtcaatcccatcggtgtcaggagctgttacgatgagggcaagcgtacagctgaaacgttgaccatggattaccaccgtggtgccaaccttgaggttaggatcgcacgtatcttcaatacatatggccctcgcatgtgcattgacgatggccgtgttgtcagtaactttgttgctcaggcactgaggaaggagcccttgacggtttatggtgatggaaagcaaaccaggagtttccaatatgtttctgatctggttgagggtctgatgaagctgatggaaggcgagcatgtggggccattcaacctgggtaaccctggcgagttcaccatgcttgagcttgccaaggttgtccaggacaccatcgaccccaacgcacggatcgagttccgcaagaacacccaggacgacccgcacaagcgcaagcccgacatcagccgcgccaaggagttcctcgggtgggagccgaagatccccctgcgtgagggccttcccctcatggtctccgacttccgcaagcgcatcttcggcgaccaagacgctgctgccaccaccaccggaaaccagcaaggttaggatgaaggagcgcacatgacatggaaatttttggtggccctgcttctagctgcttggttgctctctccttactgacaaaagctatgggccacgtagttcgttgggaatgtgttactggaatacctcggcacggctgatgctgtaatgccattctttttttcccctgtattttttctttctcagttctctcagtccttagctatacaaaaaaagttcagttgaacagttggagatgaacccggatgatctaattctttgttgagagcatagcatcatatatatggtataaatcc

SEQ ID NO: 15496 - protein, 226 aa, Zea mays subsp. mays; identical to SEQ ID NO: 2001
  peptide (1)..(226): Ceres Seq. ID no. 13600632

SEQ ID NO: 15497 - protein, 169 aa, Zea mays subsp. mays
  peptide (1)..(169): Ceres Seq. ID no. 13600633
MDYHRGANLEVRIARIFNTYGPRMCIDDGRVVSNFVAQALRKEPLTVYGDGKQTRSFQYVSDLVEGLMKLMEGEHVGPFNLGNPGEFTMLELAKVVQDTIDPNARIEFRKNTQDDPHKRKPDISRAKEFLGWEPKIPLREGLPLMVSDFRKRIFGDQDAAATTTGNQQG

SEQ ID NO: 15498 - protein, 146 aa, Zea mays subsp. mays
  peptide (1)..(146): Ceres Seq. ID no. 13600634
MCIDDGRVVSNFVAQALRKEPLTVYGDGKQTRSFQYVSDLVEGLMKLMEGEHVGPFNLGNPGEFTMLELAKVVQDTIDPNARIEFRKNTQDDPHKRKPDISRAKEFLGWEPKIPLREGLPLMVSDFRKRIFGDQDAAATTTGNQQG

SEQ ID NO: 15499 - DNA, 828 bp, Zea mays subsp. mays; identical to SEQ ID NO: 14873
  misc_feature (1)..(828): Ceres Seq. ID no. 12595473
  misc_feature (1)..(828): Ortholog of  Ceres SEQ ID NO 14309616 as cited in SEQ ID NO 52695

SEQ ID NO: 15500 - protein, 230 aa, Zea mays subsp. mays; identical to SEQ ID NO: 14874
  peptide (1)..(230): Ceres Seq. ID no. 12595474

SEQ ID NO: 15501 - protein, 222 aa, Zea mays subsp. mays; identical to SEQ ID NO: 14875
  peptide (1)..(222): Ceres Seq. ID no. 12595475

SEQ ID NO: 15502 - protein, 178 aa, Zea mays subsp. mays; identical to SEQ ID NO: 14876
  peptide (1)..(178): Ceres Seq. ID no. 12595476

SEQ ID NO: 15503 - DNA, 608 bp, Zea mays subsp. mays
  misc_feature (1)..(608): Ceres Seq. ID no. 13600372
  misc_feature (1)..(608): Ortholog of  Ceres SEQ ID NO 12783998 as cited in SEQ ID NO 61535
  misc_feature (1)..(608): Ortholog of  Ceres SEQ ID NO 15174264 as cited in SEQ ID NO 61877
  misc_feature (1)..(608): Ortholog of  Ceres SEQ ID NO 12616383 as cited in SEQ ID NO 63582
gaccagtcctccaacctcccagcgaacccaccccacacctttccccggcgaagcagcagcagccgcagcggcatccatggcccccaaggcggagaagaagccggtggcggagaaggccgagaagaccactgcggcgaagaagaccaaggccgagaagcggccgccggcgtccaaggagggcggcgagaagaagggcaagaagaagtcgaagaagagcgtggagacgtacaagatctacatcttcaaggtgctgaagcaggtgcacccggacatcggcatctcctccaaggccatgtccatcatgaactccttcatcaacgacatcttcgagaagctcgccggcgagtccgccaagctcgcccgctacaacaagaagcccaccatcacgtcccgggagatccagacctccgtccgcctcgtcctccccggcgagctcgccaagcacgccgtctccgagggcaccaaggccgtcaccaagttcacctccgcttagatagtctgttccggtttcttggtcgatcgatggtactctgtaatagtcatgtgttcggaccatgtcgtcttgtaagtgtttcattatcttgtgaaatagtaatggcgcttctttg

SEQ ID NO: 15504 - protein, 202 aa, Zea mays subsp. mays
  peptide (1)..(202): Ceres Seq. ID no. 13600373
DQSSNLPANPPHTFPRRSSSSRSGIHGPQGGEEAGGGEGREDHCGEEDQGREAAAGVQGGRREEGQEEVEEERGDVQDLHLQGAEAGAPGHRHLLQGHVHHELLHQRHLREARRRVRQARPLQQEAHHHVPGDPDLRPPRPPRRARQARRLRGHQGRHQVHLRLDSLFRFLGRSMVLCNSHVFGPCRLVSVSLSCEIVMALL

SEQ ID NO: 15505 - protein, 163 aa, Zea mays subsp. mays
  peptide (1)..(163): Ceres Seq. ID no. 13600374
TSPPTSQRTHPTPFPGEAAAAAAASMAPKAEKKPVAEKAEKTTAAKKTKAEKRPPASKEGGEKKGKKKSKKSVETYKIYIFKVLKQVHPDIGISSKAMSIMNSFINDIFEKLAGESAKLARYNKKPTITSREIQTSVRLVLPGELAKHAVSEGTKAVTKFTSA

SEQ ID NO: 15506 - protein, 138 aa, Zea mays subsp. mays
  peptide (1)..(138): Ceres Seq. ID no. 13600375
MAPKAEKKPVAEKAEKTTAAKKTKAEKRPPASKEGGEKKGKKKSKKSVETYKIYIFKVLKQVHPDIGISSKAMSIMNSFINDIFEKLAGESAKLARYNKKPTITSREIQTSVRLVLPGELAKHAVSEGTKAVTKFTSA

SEQ ID NO: 15507 - DNA, 437 bp, Zea mays subsp. mays
  misc_feature (1)..(437): Ceres Seq. ID no. 7119037
  misc_feature (1)..(437): Ortholog of  Ceres SEQ ID NO 12557737 as cited in SEQ ID NO 81
tccgccgccacccgaaaccccgacccgcgccgcctcgccgccgcgctaccagcagccaagcacaccgccgcgctcacagcaaccaagcacaccgccgcagccaccatggcagccgttctcacccgcccgacgccgggcaccgtccagtgcttcggccggaagaagaccgccgtcgccgtggcctactgcaagcccgggcgcggcctcatcaaggtcaacggcgcgccgatcgagctcatccgccctgagatgctccgtctgaaggccttcgagccgatcctgcttgccggcaggtcccgcttcaaggacatcgacatgcgcatccgcgttcgcggcgncggnaagacgagccagatctactccatccgccaggccatcgccaagtcgctcgtcgcctactaccagaagtacgtcgacgaggcggcccaagaaggagg

SEQ ID NO: 15508 - protein, 145 aa, Zea mays subsp. mays
  peptide (1)..(145): Ceres Seq. ID no. 7119038
  misc_feature (113)..(113): Xaa is any aa, unknown or other
  misc_feature (114)..(114): Xaa is any aa, unknown or other
SAATRNPDPRRLAAALPAAKHTAALTATKHTAAATMAAVLTRPTPGTVQCFGRKKTAVAVAYCKPGRGLIKVNGAPIELIRPEMLRLKAFEPILLAGRSRFKDIDMRIRVRGXXKTSQIYSIRQAIAKSLVAYYQKYVDEAAQEG

SEQ ID NO: 15509 - protein, 110 aa, Zea mays subsp. mays
  peptide (1)..(110): Ceres Seq. ID no. 7119039
  misc_feature (78)..(78): Xaa is any aa, unknown or other
  misc_feature (79)..(79): Xaa is any aa, unknown or other
MAAVLTRPTPGTVQCFGRKKTAVAVAYCKPGRGLIKVNGAPIELIRPEMLRLKAFEPILLAGRSRFKDIDMRIRVRGXXKTSQIYSIRQAIAKSLVAYYQKYVDEAAQEG

SEQ ID NO: 15510 - protein, 86 aa, Zea mays subsp. mays
  peptide (1)..(86): Ceres Seq. ID no. 7119040
PPPPETPTRAASPPRYQQPSTPPRSQQPSTPPQPPWQPFSPARRRAPSSASAGRRPPSPWPTASPGAASSRSTARRSSSSALRCSV

SEQ ID NO: 15511 - DNA, 738 bp, Zea mays subsp. mays
  misc_feature (1)..(738): Ceres Seq. ID no. 12636857
  misc_feature (1)..(738): Ortholog of  Ceres SEQ ID NO 12585210 as cited in SEQ ID NO 63226
accggatcaccagcctacagctcgtcacatctctctctccgcccggccggcctctagactcactctagccatatggccacggtgcacggcagcaggctcatcttcctcttcgaggccacgctcttctcggcgctgctgctcgtcccggcacgccctgcttccgccacagacggcagcgcgtacccggccggcgactgcccctacccgtgcctgccgccgcccgccgtcaccgccaactgcccgccgcctccgccggctgcggcgtcgtactcgtacccgccaccgccgggggcttacattccctacttccagcctgcggcgggtggcggtggtggcggcggtagtggggggtacggcggctacccggcgccgccgccgcccaaccccatcctgccgtggtacccatggtactacaagacgccgccgtcgtcctcggccgccacgtcgggcagggggagtcgcgttcttcttgggtcggccgccatggtagctgctgctgccctgctgatcatggcttagccgcagcccgcagcagtcgttctttttgcatcttcgatcttgtcctctcccccaggttttctttctttttttcttttgttgatttactgctcaggatttatattcagaggtatatatataacgaggcagcattatatatattgcttgtactcctaatttatcagctacatgtctctagttccatgattaaaatgattaccactcaactttgagtagtgg

SEQ ID NO: 15512 - protein, 162 aa, Zea mays subsp. mays; identical to SEQ ID NO: 14890
  peptide (1)..(162): Ceres Seq. ID no. 12636858

SEQ ID NO: 15513 - protein, 148 aa, Zea mays subsp. mays; identical to SEQ ID NO: 14891
  peptide (1)..(148): Ceres Seq. ID no. 12636859

SEQ ID NO: 15514 - protein, 108 aa, Zea mays subsp. mays; identical to SEQ ID NO: 14892
  peptide (1)..(108): Ceres Seq. ID no. 12636860

SEQ ID NO: 15515 - DNA, 1192 bp, Zea mays subsp. mays
  misc_feature (1)..(1192): Ceres Seq. ID no. 15178969
  misc_feature (1)..(1192): Ortholog of  Ceres SEQ ID NO 13656147 as cited in SEQ ID NO 64422
  misc_feature (1)..(1192): Ortholog of  Ceres SEQ ID NO 13596496 as cited in SEQ ID NO 68639
attccattccattccacacaaggctaggcacaagcgaaccaaacccatggcgtccgacggcagcggcgtggtgacggtgtacggcagcaacggcgcggagctgctggagccgtccaagcagcccaagtcggcgactttctccgtcaaggtggggctggcgcagatgctccggggcggggtcatcatggacgtggtgaccccggagcaggcgcgcctcgcggaggaggccggcgcgtgcgccgtgatggcgctggagcgggtccccgccgacatccgcgcgcagggcggcgtggcgcgcatgtcggacccgggcctcatccgcgacatcaagcgcgccgtcaccatcccggtcatggccaaggcccgcatcgggcacttcgtggaggcccagatcctggaggccgtgggcgtcgactacgtggacgagagcgaggtgctgacccccgccgacgacgcgcaccacatcaacaagcacaacttccgcgtccccttcgtctgcggctgccgcgacctcggcgaggcgctccgcagggtgcgcgagggcgccgccatgatccgcaccaagggggaggccggcacgggcaacgtcgtcgaggccgtgcgccacgtgcgctccgtcatgggcgacgtccgcgcgctccgcagcatggacgacgacgaggtcttcgcctacgccaagcgcatcgccgcgccctacgacctcgtcatgcagaccaagcagctgggccgcctccccgtcgtgcagttcgccgcggggggtgtcgccacgcccgccgacgccgcgctcatgatgcagctcggatgcgacggcgtcttcgtcggctcgggcatcttcaagagcggcgaccccgcgcgccgcgcccgcgccatcgtccaggcagtcacccactacagcgaccccaccatcctggccgacgtcagcacggggctcggggaggccatggtcggcatcaacctcaacgaccccaaggtggaacgatacgccgccagatccgagtgaaccctttctttccgtagtcatctccatccatctgccttggattgcatttccgtcgtctcatgtctctcaatcagtaataatggaatgaatgaaatggtaagaaacaaagctatggtactatgcagaacctctttcattttgtgctactgtactaagttagcctagtcccccccaccctggattatcatgttg

SEQ ID NO: 15516 - protein, 332 aa, Zea mays subsp. mays
  peptide (1)..(332): Ceres Seq. ID no. 15178970
FHSIPHKARHKRTKPMASDGSGVVTVYGSNGAELLEPSKQPKSATFSVKVGLAQMLRGGVIMDVVTPEQARLAEEAGACAVMALERVPADIRAQGGVARMSDPGLIRDIKRAVTIPVMAKARIGHFVEAQILEAVGVDYVDESEVLTPADDAHHINKHNFRVPFVCGCRDLGEALRRVREGAAMIRTKGEAGTGNVVEAVRHVRSVMGDVRALRSMDDDEVFAYAKRIAAPYDLVMQTKQLGRLPVVQFAAGGVATPADAALMMQLGCDGVFVGSGIFKSGDPARRARAIVQAVTHYSDPTILADVSTGLGEAMVGINLNDPKVERYAARSE

SEQ ID NO: 15517 - protein, 317 aa, Zea mays subsp. mays
  peptide (1)..(317): Ceres Seq. ID no. 15178971
MASDGSGVVTVYGSNGAELLEPSKQPKSATFSVKVGLAQMLRGGVIMDVVTPEQARLAEEAGACAVMALERVPADIRAQGGVARMSDPGLIRDIKRAVTIPVMAKARIGHFVEAQILEAVGVDYVDESEVLTPADDAHHINKHNFRVPFVCGCRDLGEALRRVREGAAMIRTKGEAGTGNVVEAVRHVRSVMGDVRALRSMDDDEVFAYAKRIAAPYDLVMQTKQLGRLPVVQFAAGGVATPADAALMMQLGCDGVFVGSGIFKSGDPARRARAIVQAVTHYSDPTILADVSTGLGEAMVGINLNDPKVERYAARSE

SEQ ID NO: 15518 - protein, 278 aa, Zea mays subsp. mays
  peptide (1)..(278): Ceres Seq. ID no. 15178972
MLRGGVIMDVVTPEQARLAEEAGACAVMALERVPADIRAQGGVARMSDPGLIRDIKRAVTIPVMAKARIGHFVEAQILEAVGVDYVDESEVLTPADDAHHINKHNFRVPFVCGCRDLGEALRRVREGAAMIRTKGEAGTGNVVEAVRHVRSVMGDVRALRSMDDDEVFAYAKRIAAPYDLVMQTKQLGRLPVVQFAAGGVATPADAALMMQLGCDGVFVGSGIFKSGDPARRARAIVQAVTHYSDPTILADVSTGLGEAMVGINLNDPKVERYAARSE

SEQ ID NO: 15519 - DNA, 432 bp, Zea mays subsp. mays
  misc_feature (1)..(432): Ceres Seq. ID no. 7114355
  misc_feature (1)..(432): Ortholog of  Ceres SEQ ID NO 13599149 as cited in SEQ ID NO 618
accggctctgcacccaaagtccgaacccaaatcgtgtgttcaccgttcccgacgaacctgccgcatcacctcaccgatcccccggcgcccgctggccctgtcccgactcccgagacatgcaacccgtttgccgctcgtgcttggcccccgcgcggccacagccggaggtaccccgcgcgcaaacacgccgcgcggaggcgggacgacggagcccgtcgagccgcgcaaggacgggccggcgtcggcggtcgatcaggcggaggaggccgggctggcgcccgaanagctggaggtgctggaggaggcggccatcatgggggaggacgaggggcgccggcccaccgactacgaacgccgcgcgcacatnttcgangagagctcgcgggtcttccgtgatctcaagcagcgaancgacggcgacggtggcggcgg

SEQ ID NO: 15520 - protein, 143 aa, Zea mays subsp. mays
  peptide (1)..(143): Ceres Seq. ID no. 7114356
  misc_feature (95)..(95): Xaa is any aa, unknown or other
  misc_feature (122)..(122): Xaa is any aa, unknown or other
  misc_feature (124)..(124): Xaa is any aa, unknown or other
  misc_feature (137)..(137): Xaa is any aa, unknown or other
PALHPKSEPKSCVHRSRRTCRITSPIPRRPLALSRLPRHATRLPLVLGPRAATAGGTPRANTPRGGGTTEPVEPRKDGPASAVDQAEEAGLAPEXLEVLEEAAIMGEDEGRRPTDYERRAHXFXESSRVFRDLKQRXDGDGGG

SEQ ID NO: 15521 - protein, 143 aa, Zea mays subsp. mays
  peptide (1)..(143): Ceres Seq. ID no. 7114357
  misc_feature (94)..(94): Xaa is any aa, unknown or other
  misc_feature (122)..(122): Xaa is any aa, unknown or other
  misc_feature (124)..(124): Xaa is any aa, unknown or other
  misc_feature (137)..(137): Xaa is any aa, unknown or other
RLCTQSPNPNRVFTVPDEPAASPHRSPGARWPCPDSRDMQPVCRSCLAPARPQPEVPRAQTRRAEAGRRSPSSRARTGRRRRSIRRRRPGWRPXSWRCWRRRPSWGRTRGAGPPTTNAARTXSXRARGSSVISSSEXTATVAA

SEQ ID NO: 15522 - protein, 131 aa, Zea mays subsp. mays
  peptide (1)..(131): Ceres Seq. ID no. 7114358
  misc_feature (95)..(95): Xaa is any aa, unknown or other
  misc_feature (123)..(123): Xaa is any aa, unknown or other
  misc_feature (125)..(125): Xaa is any aa, unknown or other
TGSAPKVRTQIVCSPFPTNLPHHLTDPPAPAGPVPTPETCNPFAARAWPPRGHSRRYPARKHAARRRDDGARRAAQGRAGVGGRSGGGGRAGARXAGGAGGGGHHGGGRGAPAHRLRTPRAHXRXELAGLP

SEQ ID NO: 15523 - DNA, 913 bp, Zea mays subsp. mays
  misc_feature (1)..(913): Ceres Seq. ID no. 13624158
  misc_feature (1)..(913): Ortholog of  Ceres SEQ ID NO 13504237 as cited in SEQ ID NO 100
  misc_feature (1)..(913): Ortholog of  Ceres SEQ ID NO 15176643 as cited in SEQ ID NO 57825
  misc_feature (1)..(913): Ortholog of  Ceres SEQ ID NO 12598265 as cited in SEQ ID NO 65873
  misc_feature (1)..(913): Ortholog of  Ceres SEQ ID NO 15180736 as cited in SEQ ID NO 0
agggtttcgtcgcttccagccgccgccgcgtccgcctcgccaagcgcagcagccgccgcagcacatctctctctcgatctcagccatggcggaggtggagcagcaacaggacacgccgaagctgttcaaccgctggaccttcgatgatgtccaggtgaacgacatctcgctgaacgactacctcgctgtgaacgcgacgaagcacgcgatgtacctgccgcacaccgcggggcgttactccaaanaagcggttccgcaaggcgcagtgcccgatcgtcgagcgcctcacaaactccctcatgatgcacgggcgcaacaacggcaagaaggtcatggctgtccgcatcatcaagcataccctggagatcattcacctgctcaccgatgccaaccccatccaggtcgtcgtcgacgcgatcatcaacagtggaccccgtgaggatgccacccgtattggttccgctggtgttgtgaggaggcaggccgtggatatctcacccctgaggagggtgaaccaggccatctacctcctcaccactggtgccagggagagtgctttccggaacatcaaaaccattgccgagtgccttgcagatgagctgatcaacgctgccaagggctcatccaacagttacgccatcaagaagaaggacgagattgagcgtgttgccaaggccaaccgttgaacggagcttgtatcctggtgcactctgcgctggaaacttttatgttactggcagtcgtatcggttcctgttttaccaatgtttagagttttttgagacctatatgcggttttggttttcagtgcacaattaaaattactgagtaatgtagttgattgggaacagaaagtgcctggtttaccgaactccatttctcttgtcatttttctttattctgtagtctgtatt

SEQ ID NO: 15524 - protein, 145 aa, Zea mays subsp. mays
  peptide (1)..(145): Ceres Seq. ID no. 13624159
  misc_feature (82)..(82): Xaa is any aa, unknown or other
GFRRFQPPPRPPRQAQQPPQHISLSISAMAEVEQQQDTPKLFNRWTFDDVQVNDISLNDYLAVNATKHAMYLPHTAGRYSKXAVPQGAVPDRRAPHKLPHDARAQQRQEGHGCPHHQAYPGDHSPAHRCQPHPGRRRRDHQQWTP

SEQ ID NO: 15525 - protein, 128 aa, Zea mays subsp. mays
  peptide (1)..(128): Ceres Seq. ID no. 13624160
MMHGRNNGKKVMAVRIIKHTLEIIHLLTDANPIQVVVDAIINSGPREDATRIGSAGVVRRQAVDISPLRRVNQAIYLLTTGARESAFRNIKTIAECLADELINAAKGSSNSYAIKKKDEIERVAKANR

SEQ ID NO: 15526 - protein, 127 aa, Zea mays subsp. mays
  peptide (1)..(127): Ceres Seq. ID no. 13624161
MHGRNNGKKVMAVRIIKHTLEIIHLLTDANPIQVVVDAIINSGPREDATRIGSAGVVRRQAVDISPLRRVNQAIYLLTTGARESAFRNIKTIAECLADELINAAKGSSNSYAIKKKDEIERVAKANR

SEQ ID NO: 15527 - protein, 117 aa, Zea mays subsp. mays
  peptide (1)..(117): Ceres Seq. ID no. 13624162
  misc_feature (54)..(54): Xaa is any aa, unknown or other
MAEVEQQQDTPKLFNRWTFDDVQVNDISLNDYLAVNATKHAMYLPHTAGRYSKXAVPQGAVPDRRAPHKLPHDARAQQRQEGHGCPHHQAYPGDHSPAHRCQPHPGRRRRDHQQWTP

SEQ ID NO: 15528 - DNA, 937 bp, Zea mays subsp. mays
  misc_feature (1)..(937): Ceres Seq. ID no. 13624118
  misc_feature (1)..(937): Ortholog of  Ceres SEQ ID NO 12368601 as cited in SEQ ID NO 6431
  misc_feature (1)..(937): Ortholog of  Ceres SEQ ID NO 15170454 as cited in SEQ ID NO 52794
cactactctctctctctctgcctgcaaagctgcttgatccatcatcgatcacatcactccaccagccgcagcgcacgaacgtacgactcatggcagatcgcgaccgcagcggcatctacggcggcggcgcctacgggcagcagcaggggggcggccgcccgatgggtgagcaggtgaagggcatgatccacgacaaggggccgacggcgtcccaggcgctgacggtggcgacgctgttccctctgggcgggctgctcctggtgctgtcgggcctggcgctggcggcctccacggtggggctggccctggccacgcccgtgttcctgctcttcagccccgtgctcgtccccgccgcgctgctcatcggcacggccgtcgcggggttcctcacgtcgggcgcgctggggctcggcggcctgtcctcgctcacgtgcctcgccaacacggcgcggcaggcgttccagcgcacccccggactacgtcgaggaggcgcgccgcaggatggcggaggccgcggcgcacgcgggccacaagaccgcgcaggccgggcacggcatccagagcaaggcgcaggaggccggtgctggcactggcgccggcggcggcaggacttcctcgtaaataagcaaatcatccatggatgcgtgcgtgtcaatgtcagcagggtcgtcgtggaatgctcttctctgtacgtgggtaaccgtcttttggtcgtcttccccgagtgcgtgataaatatcctggtgttcgtcgtgtgtggtgctgccctaggctggggcctggggtcggctgtgtaccggtatctgttcatcgccgctccgtcgcgttcggagatgtgaataagtgatgtgaaggttaagtttcagctttgctattgctattgtggcttgtgcatcagcggtttgctcgttgactgttatggaaataagcattggtg

SEQ ID NO: 15529 - protein, 278 aa, Zea mays subsp. mays
  peptide (1)..(278): Ceres Seq. ID no. 13624119
LLSLSLPAKLLDPSSITSLHQPQRTNVRLMADRDRSGIYGGGAYGQQQGGGRPMGEQVKGMIHDKGPTASQALTVATLFPLGGLLLVLSGLALAASTVGLALATPVFLLFSPVLVPAALLIGTAVAGFLTSGALGLGGLSSLTCLANTARQAFQRTPGLRRGGAPQDGGGRGARGPQDRAGRARHPEQGAGGRCWHWRRRRQDFLVNKQIIHGCVRVNVSRVVVECSSLYVGNRLLVVFPECVINILVFVVCGAALGWGLGSAVYRYLFIAAPSRSEM

SEQ ID NO: 15530 - protein, 249 aa, Zea mays subsp. mays
  peptide (1)..(249): Ceres Seq. ID no. 13624120
MADRDRSGIYGGGAYGQQQGGGRPMGEQVKGMIHDKGPTASQALTVATLFPLGGLLLVLSGLALAASTVGLALATPVFLLFSPVLVPAALLIGTAVAGFLTSGALGLGGLSSLTCLANTARQAFQRTPGLRRGGAPQDGGGRGARGPQDRAGRARHPEQGAGGRCWHWRRRRQDFLVNKQIIHGCVRVNVSRVVVECSSLYVGNRLLVVFPECVINILVFVVCGAALGWGLGSAVYRYLFIAAPSRSEM

SEQ ID NO: 15531 - protein, 225 aa, Zea mays subsp. mays
  peptide (1)..(225): Ceres Seq. ID no. 13624121
MGEQVKGMIHDKGPTASQALTVATLFPLGGLLLVLSGLALAASTVGLALATPVFLLFSPVLVPAALLIGTAVAGFLTSGALGLGGLSSLTCLANTARQAFQRTPGLRRGGAPQDGGGRGARGPQDRAGRARHPEQGAGGRCWHWRRRRQDFLVNKQIIHGCVRVNVSRVVVECSSLYVGNRLLVVFPECVINILVFVVCGAALGWGLGSAVYRYLFIAAPSRSEM

SEQ ID NO: 15532 - DNA, 609 bp, Zea mays subsp. mays
  misc_feature (1)..(609): Ceres Seq. ID no. 12594286
  misc_feature (1)..(609): Ortholog of  Ceres SEQ ID NO 15180386 as cited in SEQ ID NO 0
tgaatatcgatggcaatgtttgtactgtcatggtgactacattagttcttgagggctggcaacgtaagttggatccagattataatgttatgaagactctgcaaactttactttttaaggaagactgggcgaagtctcttcaatacactatccaagggctcatggcgccttagggtcgtccgcaatcctttctaaagttttgatctggtttgtgttcgaccggaggatcctcttctctcaccatcacgattctggcttcttttctacttaatttcacgtttcgtttctctgtacctgtcctggcgttgtgctgctaaagcagccttgatgataaagtaataactgcagtaaaaattttcagaagctaccagagtactatgctgctcagctctgggctgtcttcttatatgttcttgaagggccaaagaattaggtccttttcccccctcctaccaacacttttgacaatagctnttagatgatgtagcaaaaggcgttctgttctgatgatctttttgtaactggagaggttgtatccgtggactggagagttgcttatgtacagacagagatactgttaatctcgaaggaatccacttgtcaactgac

SEQ ID NO: 15533 - protein, 56 aa, Zea mays subsp. mays
  peptide (1)..(56): Ceres Seq. ID no. 12594287
NIDGNVCTVMVTTLVLEGWQRKLDPDYNVMKTLQTLLFKEDWAKSLQYTIQGLMAP

SEQ ID NO: 15534 - protein, 47 aa, Zea mays subsp. mays
  peptide (1)..(47): Ceres Seq. ID no. 12594288
MVTTLVLEGWQRKLDPDYNVMKTLQTLLFKEDWAKSLQYTIQGLMAP

SEQ ID NO: 15535 - protein, 34 aa, Zea mays subsp. mays
  peptide (1)..(34): Ceres Seq. ID no. 12594289
  misc_feature (33)..(33): Xaa is any aa, unknown or other
MLLSSGLSSYMFLKGQRIRSFSPLLPTLLTIAXR

SEQ ID NO: 15536 - DNA, 828 bp, Zea mays subsp. mays; identical to SEQ ID NO: 14873
  misc_feature (1)..(828): Ceres Seq. ID no. 12595473
  misc_feature (1)..(828): Ortholog of  Ceres SEQ ID NO 14309616 as cited in SEQ ID NO 52695

SEQ ID NO: 15537 - protein, 230 aa, Zea mays subsp. mays; identical to SEQ ID NO: 14874
  peptide (1)..(230): Ceres Seq. ID no. 12595474

SEQ ID NO: 15538 - protein, 222 aa, Zea mays subsp. mays; identical to SEQ ID NO: 14875
  peptide (1)..(222): Ceres Seq. ID no. 12595475

SEQ ID NO: 15539 - protein, 178 aa, Zea mays subsp. mays; identical to SEQ ID NO: 14876
  peptide (1)..(178): Ceres Seq. ID no. 12595476

SEQ ID NO: 15540 - DNA, 937 bp, Zea mays subsp. mays; identical to SEQ ID NO: 15528
  misc_feature (1)..(937): Ceres Seq. ID no. 13624118
  misc_feature (1)..(937): Ortholog of  Ceres SEQ ID NO 12368601 as cited in SEQ ID NO 6431
  misc_feature (1)..(937): Ortholog of  Ceres SEQ ID NO 15170454 as cited in SEQ ID NO 52794

SEQ ID NO: 15541 - protein, 278 aa, Zea mays subsp. mays; identical to SEQ ID NO: 15529
  peptide (1)..(278): Ceres Seq. ID no. 13624119

SEQ ID NO: 15542 - protein, 249 aa, Zea mays subsp. mays; identical to SEQ ID NO: 15530
  peptide (1)..(249): Ceres Seq. ID no. 13624120

SEQ ID NO: 15543 - protein, 225 aa, Zea mays subsp. mays; identical to SEQ ID NO: 15531
  peptide (1)..(225): Ceres Seq. ID no. 13624121

SEQ ID NO: 15544 - DNA, 1071 bp, Zea mays subsp. mays; identical to SEQ ID NO: 3700
  misc_feature (1)..(1071): Ceres Seq. ID no. 13624136
  misc_feature (1)..(1071): Ortholog of  Ceres SEQ ID NO 15173516 as cited in SEQ ID NO 61801

SEQ ID NO: 15545 - protein, 227 aa, Zea mays subsp. mays; identical to SEQ ID NO: 3701
  peptide (1)..(227): Ceres Seq. ID no. 13624137

SEQ ID NO: 15546 - protein, 183 aa, Zea mays subsp. mays; identical to SEQ ID NO: 3702
  peptide (1)..(183): Ceres Seq. ID no. 13624138

SEQ ID NO: 15547 - protein, 162 aa, Zea mays subsp. mays; identical to SEQ ID NO: 3703
  peptide (1)..(162): Ceres Seq. ID no. 13624139

SEQ ID NO: 15548 - DNA, 1263 bp, Zea mays subsp. mays
  misc_feature (1)..(1263): Ceres Seq. ID no. 14302660
  misc_feature (1)..(1263): Ortholog of  Ceres SEQ ID NO 15169372 as cited in SEQ ID NO 58778
atttgagaaggagagggaaaatgatgacctcgtggcttctgggccgccggggcccctccggcttctcctggagttccaccgccgaccaagtcacgcagggcatctccgccgccggcctcaccgccatcgtcactggggcgtccagcggcatcggcgcggagacggcgcgaacgctggcgctgcgcggggcccacgtcatcatggccgtcaggagccttcccgctgcccaggccgtcaaggacgccgtcctcgcccaggcgccgggggccaagctcgacgtcatggagctcgacctctcgtccatggcctctgtccgcgctttcgcgtcccaattcatcgacaggggtctccccctcaacatccttatcaacaatgcaggagtaatggcaataccttttgcgctttcaaaggatggaattgagatgcagtttgcaactaatcatgttgggcatttcctgctcacacaccttctattggataccatgaagaggacctctcatgaatcaaatttggaaggaagaattgtcaacgtgtcatcagaggggcacagacttgcatatcgggaaggaatccgttttgacaagatcaacgatgaatcagtgtatagtagcattggtgcatatgggcaatcaaagcttgcaaacatattgcatgctaatgaacttgccaggcgatttgaggaagataatgtcaacataactgcaaattctcttcatcctggttccattatcacgaaccttcttcgctaccacagtatcctagatgttctccatcggacgctgggtaaattggtgttgaaaaatgctgagcagggtgcggcaactacatgctatttggcactccacccgcatgtgaagggcgtgtccgggaagtacttctgcgactgtaacctgtacgagccaagcgcgaacgccaaggacatggagttggccaagaggctctgggacttcggcgtcgagctcatcacctagctcatgcttcttgttgttagcgacttgttttcagacatggatgtaatgtaaatcccttgacagatggtaaattctgtaggccctcgaggagctcctgtgtggtaaactcattcacctcaatctatctacgtgtattaaggtggattagggtgtaaattaaattaatttacactccaatcgccctcgaggagctccggtgtggataatgctttggttggatattttagtattcacctgaatttacgtgtattaagatgaattagggtgtaaattaaattaattacactccaag

SEQ ID NO: 15549 - protein, 322 aa, Zea mays subsp. mays
  peptide (1)..(322): Ceres Seq. ID no. 14302661
LRRRGKMMTSWLLGRRGPSGFSWSSTADQVTQGISAAGLTAIVTGASSGIGAETARTLALRGAHVIMAVRSLPAAQAVKDAVLAQAPGAKLDVMELDLSSMASVRAFASQFIDRGLPLNILINNAGVMAIPFALSKDGIEMQFATNHVGHFLLTHLLLDTMKRTSHESNLEGRIVNVSSEGHRLAYREGIRFDKINDESVYSSIGAYGQSKLANILHANELARRFEEDNVNITANSLHPGSIITNLLRYHSILDVLHRTLGKLVLKNAEQGAATTCYLALHPHVKGVSGKYFCDCNLYEPSANAKDMELAKRLWDFGVELIT

SEQ ID NO: 15550 - protein, 316 aa, Zea mays subsp. mays; identical to SEQ ID NO: 4121
  peptide (1)..(316): Ceres Seq. ID no. 14302662

SEQ ID NO: 15551 - protein, 315 aa, Zea mays subsp. mays; identical to SEQ ID NO: 4122
  peptide (1)..(315): Ceres Seq. ID no. 14302663

SEQ ID NO: 15552 - DNA, 451 bp, Zea mays subsp. mays
  misc_feature (1)..(451): Ceres Seq. ID no. 7119950
  misc_feature (1)..(451): Ortholog of  Ceres SEQ ID NO 13599169 as cited in SEQ ID NO 0
gtctgatttctctgacgggtgggtttggtttggatctgggcggaccaggcgctccacgcgatggcgcagaaggagaccaatggcagcaacggcgagcacatctccacccgcccgccgccgaccccgtcgcccctccgcttctccaagttcttccagnttaacctgcggatcctgggtcattgggtgggggcgggcttcatcggctcgcaccttcgtggacaggctcatggagaacagaaagcacgaggtcattgttgctgataactttttcaccggttcaaaagaaacctgaagaaagtggatcggacacccaagatttgagctcatcccgccatgatgtcactgagccactttntttgggggaggttgaccagatctatcaccttgcttgccctgcttcaccaatcttctacaagcacaatcctgttaagaccatcaagacaaatgttat

SEQ ID NO: 15553 - protein, 96 aa, Zea mays subsp. mays
  peptide (1)..(96): Ceres Seq. ID no. 7119951
  misc_feature (52)..(52): Xaa is any aa, unknown or other
SDFSDGWVWFGSGRTRRSTRWRRRRPMAATASTSPPARRRPRRPSASPSSSXLTCGSWVIGWGRASSARTFVDRLMENRKHEVIVADNFFTGSKET

SEQ ID NO: 15554 - protein, 70 aa, Zea mays subsp. mays
  peptide (1)..(70): Ceres Seq. ID no. 7119952
  misc_feature (26)..(26): Xaa is any aa, unknown or other
MAATASTSPPARRRPRRPSASPSSSXLTCGSWVIGWGRASSARTFVDRLMENRKHEVIVADNFFTGSKET

SEQ ID NO: 15555 - protein, 66 aa, Zea mays subsp. mays
  peptide (1)..(66): Ceres Seq. ID no. 7119953
  misc_feature (33)..(33): Xaa is any aa, unknown or other
MAQKETNGSNGEHISTRPPPTPSPLRFSKFFQXNLRILGHWVGAGFIGSHLRGQAHGEQKARGHCC

SEQ ID NO: 15556 - DNA, 456 bp, Zea mays subsp. mays
  misc_feature (1)..(456): Ceres Seq. ID no. 12595566
  misc_feature (1)..(456): Ortholog of  Ceres SEQ ID NO 14305657 as cited in SEQ ID NO 52544
aaaaaaactccactcgccctcccacacagaaaaccctagccgccgccaccgaagcggcctcccaggtaagcaggatcgtccagcccgccgccgccatgaagcgcaatccccgcgtcacgagctcccgccggaagtgccgcaaggcgcactttacggccccgtcctccgtccgccgcgttctcatgtccgcggggctgtcgacggagctccgccacaagtacaacgtgcgctccatcccgatccgcaaggacgacgaggtgcaggtcgtgcgcggcacctacaagggccgtgaggggaaggtggtgcaggtgtaccgccgccgctgggtcatccacgtcgagcggatcacccgcgagaaggtgaacggctccaccgtgaacgtgggcatccacccctccaaggtgatcgtcaccaagctgaagctcgacaaggaccgtaaggcgctcctcgacccgc

SEQ ID NO: 15557 - protein, 151 aa, Zea mays subsp. mays
  peptide (1)..(151): Ceres Seq. ID no. 12595567
KNSTRPPTQKTLAAATEAASQVSRIVQPAAAMKRNPRVTSSRRKCRKAHFTAPSSVRRVLMSAGLSTELRHKYNVRSIPIRKDDEVQVVRGTYKGREGKVVQVYRRRWVIHVERITREKVNGSTVNVGIHPSKVIVTKLKLDKDRKALLDP

SEQ ID NO: 15558 - protein, 120 aa, Zea mays subsp. mays
  peptide (1)..(120): Ceres Seq. ID no. 12595568
MKRNPRVTSSRRKCRKAHFTAPSSVRRVLMSAGLSTELRHKYNVRSIPIRKDDEVQVVRGTYKGREGKVVQVYRRRWVIHVERITREKVNGSTVNVGIHPSKVIVTKLKLDKDRKALLDP

SEQ ID NO: 15559 - protein, 96 aa, Zea mays subsp. mays
  peptide (1)..(96): Ceres Seq. ID no. 12595569
KKLHSPSHTENPSRRHRSGLPGKQDRPARRRHEAQSPRHELPPEVPQGALYGPVLRPPRSHVRGAVDGAPPQVQRALHPDPQGRRGAGRARHLQGP

SEQ ID NO: 15560 - DNA, 1015 bp, Zea mays subsp. mays; identical to SEQ ID NO: 3770
  misc_feature (1)..(1015): Ceres Seq. ID no. 12595679
  misc_feature (1)..(1015): Ortholog of  Ceres SEQ ID NO 12610385 as cited in SEQ ID NO 55938
  misc_feature (1)..(1015): Ortholog of  Ceres SEQ ID NO 15178805 as cited in SEQ ID NO 0

SEQ ID NO: 15561 - protein, 143 aa, Zea mays subsp. mays; identical to SEQ ID NO: 3771
  peptide (1)..(143): Ceres Seq. ID no. 12595680

SEQ ID NO: 15562 - protein, 91 aa, Zea mays subsp. mays; identical to SEQ ID NO: 3772
  peptide (1)..(91): Ceres Seq. ID no. 12595681

SEQ ID NO: 15563 - protein, 82 aa, Zea mays subsp. mays; identical to SEQ ID NO: 3773
  peptide (1)..(82): Ceres Seq. ID no. 12595682

SEQ ID NO: 15564 - protein, 81 aa, Zea mays subsp. mays; identical to SEQ ID NO: 3774
  peptide (1)..(81): Ceres Seq. ID no. 12595683

SEQ ID NO: 15565 - DNA, 461 bp, Zea mays subsp. mays
  misc_feature (1)..(461): Ceres Seq. ID no. 11029785
  misc_feature (1)..(461): Ortholog of  Ceres SEQ ID NO 13597648 as cited in SEQ ID NO 69125
ccaaaggaaggtgacagtattgttcaggatgctcctgcagatattccttcccttctagaattgaagcgcgtctactacgaactgatgattcgttattactctcacaacaatgattacttggaaatctgccgttgttacaaggctatttatgatattccagcaataaaagaggatccaacaaagtggataccgattcttaggaagatctgttggtacttggtgctagcacctcatgatcctatgcaatcaagccttctcaatgctacactagaggataaaaacctttcagaaatcccaaatttcaggttattactggaagcagctggccacccatggaggtgatacagtgggacaagtcctgtgggaattcttcaaggaggaatatgagaaaggagaaggatcttcttggggggagcttttgggtgncaaagcttcagaagatttgaggctgaggattatcc

SEQ ID NO: 15566 - protein, 113 aa, Zea mays subsp. mays
  peptide (1)..(113): Ceres Seq. ID no. 11029786
PKEGDSIVQDAPADIPSLLELKRVYYELMIRYYSHNNDYLEICRCYKAIYDIPAIKEDPTKWIPILRKICWYLVLAPHDPMQSSLLNATLEDKNLSEIPNFRLLLEAAGHPWR

SEQ ID NO: 15567 - protein, 85 aa, Zea mays subsp. mays
  peptide (1)..(85): Ceres Seq. ID no. 11029787
MIRYYSHNNDYLEICRCYKAIYDIPAIKEDPTKWIPILRKICWYLVLAPHDPMQSSLLNATLEDKNLSEIPNFRLLLEAAGHPWR

SEQ ID NO: 15568 - DNA, 934 bp, Zea mays subsp. mays
  misc_feature (1)..(934): Ceres Seq. ID no. 13589261
  misc_feature (1)..(934): Ortholog of  Ceres SEQ ID NO 12368601 as cited in SEQ ID NO 6431
  misc_feature (1)..(934): Ortholog of  Ceres SEQ ID NO 15170454 as cited in SEQ ID NO 52794
ctactctctctctctctgcctgcaaagctgcttgatccatcatcgatcacatcactccaccagccgcagcgcacgaacgtacgactcatggcagatcgcgaccgcagcggcatctacggcggcggcgcctacgggcagcagcaggggggcggccgcccgatgggtgagcaggtgaagggcatgatccacgacaaggggccgacggcgtcccaggcgctgacggtggcgacgctgttccctctgggcgggctgctcctggtgctgtcaggcctggcgctggcggcctccacggtggggctggccctggccacgcccgtgttcctgctcttcagccccgtgctcgtccccgccgcgctgctcatcggcacggccgtcgcggggttcctcacgtcgggcgcgctggggctcggcggcctgtcctcgctcacgtgcctcgccaacacggcgcggcaggcgttccagcgcaccccggactacgtcgaggaggcgcgccgcaggatggcggaggccgcggcgcacgcgggccacaagaccgcgcaggccgggcacggcatccagagcaaggcgcaggaggccggtgctggcactggcgccggcggcggcaggacttcctcgtaaataagcaaatcatccatggatgcgtgcgtgtcaatgtcagcagggtcgtcgtggaatgctcttctctgtacgtgggtaaccgtcttttggtcgtcttccccgagtgcgtgataaatatcctggtgttcgtcgtgtgtggtgctgccctaggctggggcctggggtcggctgtgtaccggtatctgttcatcgccgctccgtcgcgttcggagatgtgaataagtgatgtgaaggttaagtttcagctttgctattgctattgtggcttgtgcatcagcggtttgctcgttgactgttatggaaataagcattggtg

SEQ ID NO: 15569 - protein, 205 aa, Zea mays subsp. mays
  peptide (1)..(205): Ceres Seq. ID no. 13589262
LLSLSLPAKLLDPSSITSLHQPQRTNVRLMADRDRSGIYGGGAYGQQQGGGRPMGEQVKGMIHDKGPTASQALTVATLFPLGGLLLVLSGLALAASTVGLALATPVFLLFSPVLVPAALLIGTAVAGFLTSGALGLGGLSSLTCLANTARQAFQRTPDYVEEARRRMAEAAAHAGHKTAQAGHGIQSKAQEAGAGTGAGGGRTSS

SEQ ID NO: 15570 - protein, 176 aa, Zea mays subsp. mays
  peptide (1)..(176): Ceres Seq. ID no. 13589263
MADRDRSGIYGGGAYGQQQGGGRPMGEQVKGMIHDKGPTASQALTVATLFPLGGLLLVLSGLALAASTVGLALATPVFLLFSPVLVPAALLIGTAVAGFLTSGALGLGGLSSLTCLANTARQAFQRTPDYVEEARRRMAEAAAHAGHKTAQAGHGIQSKAQEAGAGTGAGGGRTSS

SEQ ID NO: 15571 - protein, 152 aa, Zea mays subsp. mays; identical to SEQ ID NO: 6432
  peptide (1)..(152): Ceres Seq. ID no. 13589264

SEQ ID NO: 15572 - DNA, 1007 bp, Zea mays subsp. mays
  misc_feature (1)..(1007): Ceres Seq. ID no. 14302668
  misc_feature (1)..(1007): Ortholog of  Ceres SEQ ID NO 13504265 as cited in SEQ ID NO 85
tctagtctagtacacgaatcacgaacgcgtccacctgcgcgcatcgccacgcaggttctctccaccaaaccttaacctccccttccagaaaccctccaagaggcagctcaaaggaatagtgagccgccccgccgctcctcagccatcctctccatctcggtgtcacacactccgcatacgcacctacgagagtcgagtgacagcgagcgagcgagcgagcgaagccatggctctccgcaccctggcatcgaagaacgccctatccttcgcgctcggcggcgcggcccggccgtcggcggcgtccgcgaggggggtgacgacggtcgcgctccccgacctctcctacgacttcggcgcgctggagccggccatctcgggggagatcatgcgcctgcaccaccagaagcaccacgccacctacgtcgccaactacaacaaggcgctggagcagctcgacgctgccgtcgccaagggcgacgcctccgctgtcgtccagctccagggcgccatcaagttcaacggcggcggtcatgtgaaccattcaatcttttggaagaacctcaagcctattagcgaaggtggtggggagccgccacatgggaaacttggctgggccatcgatgaggattttggttcatttgaggcacttgtaaagaggatgaatgcagaaggcgctgctttacaaggatctggatgggtgtggttagctttggataaagaggcaaaaaagctttcagttgaaactacagctaatcaggatcctctggtgactaaaggtgcaagcttggttccgctgttggggattgatgtctgggagcatgcgtactacctgcagtacaagaatgttaggccggattacctgaacaacatctggaaggtgatgaactggaaatatgctggagaggtgtacgaaaatgttcttgcttgaattgtcttaatggacaatactcatctgcgcgggtttgttttcggctgtttgaccatgtgaaataaagatggacttgtgt

SEQ ID NO: 15573 - protein, 233 aa, Zea mays subsp. mays
  peptide (1)..(233): Ceres Seq. ID no. 14302669
MALRTLASKNALSFALGGAARPSAASARGVTTVALPDLSYDFGALEPAISGEIMRLHHQKHHATYVANYNKALEQLDAAVAKGDASAVVQLQGAIKFNGGGHVNHSIFWKNLKPISEGGGEPPHGKLGWAIDEDFGSFEALVKRMNAEGAALQGSGWVWLALDKEAKKLSVETTANQDPLVTKGASLVPLLGIDVWEHAYYLQYKNVRPDYLNNIWKVMNWKYAGEVYENVLA

SEQ ID NO: 15574 - protein, 180 aa, Zea mays subsp. mays
  peptide (1)..(180): Ceres Seq. ID no. 14302670
MRLHHQKHHATYVANYNKALEQLDAAVAKGDASAVVQLQGAIKFNGGGHVNHSIFWKNLKPISEGGGEPPHGKLGWAIDEDFGSFEALVKRMNAEGAALQGSGWVWLALDKEAKKLSVETTANQDPLVTKGASLVPLLGIDVWEHAYYLQYKNVRPDYLNNIWKVMNWKYAGEVYENVLA

SEQ ID NO: 15575 - DNA, 1015 bp, Zea mays subsp. mays; identical to SEQ ID NO: 3770
  misc_feature (1)..(1015): Ceres Seq. ID no. 12595679
  misc_feature (1)..(1015): Ortholog of  Ceres SEQ ID NO 12610385 as cited in SEQ ID NO 55938
  misc_feature (1)..(1015): Ortholog of  Ceres SEQ ID NO 15178805 as cited in SEQ ID NO 0

SEQ ID NO: 15576 - protein, 143 aa, Zea mays subsp. mays; identical to SEQ ID NO: 3771
  peptide (1)..(143): Ceres Seq. ID no. 12595680

SEQ ID NO: 15577 - protein, 91 aa, Zea mays subsp. mays; identical to SEQ ID NO: 3772
  peptide (1)..(91): Ceres Seq. ID no. 12595681

SEQ ID NO: 15578 - protein, 82 aa, Zea mays subsp. mays; identical to SEQ ID NO: 3773
  peptide (1)..(82): Ceres Seq. ID no. 12595682

SEQ ID NO: 15579 - protein, 81 aa, Zea mays subsp. mays; identical to SEQ ID NO: 3774
  peptide (1)..(81): Ceres Seq. ID no. 12595683

SEQ ID NO: 15580 - DNA, 453 bp, Zea mays subsp. mays
  misc_feature (1)..(453): Ceres Seq. ID no. 7115007
  misc_feature (1)..(453): Ortholog of  Ceres SEQ ID NO 15227057 as cited in SEQ ID NO 1374
  misc_feature (1)..(453): Ortholog of  Ceres SEQ ID NO 12617450 as cited in SEQ ID NO 64747
  misc_feature (1)..(453): Ortholog of  Ceres SEQ ID NO 12635077 as cited in SEQ ID NO 0
aacaacgagttaacgaaagccttttatccaagctcaggaaagctcacagtttcgttggatccaatcttagttttatccaagctcagcaatggcttctcgtcagcagcatcctactagctaccacgccggcgagacaaaggcccgtgccgaggagaagacgggtcaagtgatgggggcggcgcaggagaaagggagggaggccaagcacaaggcgtccgacgccgccgaccgcgccatggggatgggccacgacgccagggaggcgaccagggagaaggcgcgcgccgccgcggaccgaaccatggggatgggccacgacgccggggagacggccaaggacagggcgtaccgcgcccacgacggcgcgcagcagaccgggagctacgtcgcgcagacggccgaggccgccaggcagaangcggccggcgccgcgctgtacgccaaggacacccg

SEQ ID NO: 15581 - protein, 121 aa, Zea mays subsp. mays
  peptide (1)..(121): Ceres Seq. ID no. 7115008
  misc_feature (110)..(110): Xaa is any aa, unknown or other
MASRQQHPTSYHAGETKARAEEKTGQVMGAAQEKGREAKHKASDAADRAMGMGHDAREATREKARAAADRTMGMGHDAGETAKDRAYRAHDGAQQTGSYVAQTAEAARQXAAGAALYAKDT

SEQ ID NO: 15582 - protein, 94 aa, Zea mays subsp. mays
  peptide (1)..(94): Ceres Seq. ID no. 7115009
  misc_feature (83)..(83): Xaa is any aa, unknown or other
MGAAQEKGREAKHKASDAADRAMGMGHDAREATREKARAAADRTMGMGHDAGETAKDRAYRAHDGAQQTGSYVAQTAEAARQXAAGAALYAKDT

SEQ ID NO: 15583 - protein, 72 aa, Zea mays subsp. mays
  peptide (1)..(72): Ceres Seq. ID no. 7115010
  misc_feature (61)..(61): Xaa is any aa, unknown or other
MGMGHDAREATREKARAAADRTMGMGHDAGETAKDRAYRAHDGAQQTGSYVAQTAEAARQXAAGAALYAKDT

SEQ ID NO: 15584 - DNA, 1834 bp, Zea mays subsp. mays
  misc_feature (1)..(1834): Ceres Seq. ID no. 13580193
  misc_feature (1)..(1834): Ortholog of  Ceres SEQ ID NO 15177258 as cited in SEQ ID NO 51386
gcgcctcccaaagctctcttgttcgttgctcatccccccccccccccccccgtgctggttaatcatccgttcgatttcgatcacatacatataatctccctcagctatcgcggccgcgcgcctgatcgacgtacgaccggtctggtacgtacgtgtgctcgcccgccatggctcgcggcgacggcgagctggagctgtccgtgggggtccgcggcaccggcggcgcggcggcggcggcggcggcggaccacgtggcgccgatcagcctcggcaggctcatcctcgccggcatggtcgccggcggcgtgcagtacggctgggcgctgcagctctccctcctcacgccctacgtgcagactctggggctctcacatgccctcacttcattcatgtggctatgcggtcctattgctggcttagtggtccaaccgctggttggcttgtacagtgataggtgcacagcaagatggggaagacgcaggccatttatcctgataggatgcatgctcatctgccttgccgtcattgttgttggcttctcgtccgacatcggagctgctctaggggacacgaaggaacactgcagcctctaccacggccctcgttggcatgctgcgatcgtctacgttctggggttttggctccttgacttctccaacaatactgtgcaaggtccagcgcgtgctatgatggctgatctgtgcggtcatcatgggcctagtgcagccaactcaatcttctgttcttggatggcgctgggaaacatcctaggctattcctctggttccacaaacaactggcacaagtggtttccgttccttttaacaaacgcgtgctgtgaagcctgcgcaaacctgaaaggcgcgtttctggtggctgtggtgttcctagtcatgtgcttgactgtaaccctgttcttcgccaacgaagtgccctacagaggaaaccagaacctccccacaaaggcaaacggcgaggtcgagactgaaccttccggcccactcgctgtgctcaagggcttcaagaacttgcccacggggatgccgtccgtgctcctcgtaactggactcacctggctctcttggttcccgttcatcctctacgacaccgactggatgggccgtgagatctaccacggcgaccccaagggtagcaacgctcagatctcggcgttcgacgaaggcgtcagagttggctcgttcgggctgctgctcaactcgatcgttctaggattcagctcgttcctgatcgagcccatgtgccggaaggtcgggccgagggtggtgtgggtgacgagcaacttcatggtctgcgtcgccatggcggccaccgcgctgatcagcttctggtcgctcaaggactaccacggatacgtgcaggacgccatcaccgccagcacgagcatcaaggccgtctgcctcgtcctcttcgcgttcctgggtgtccctctcgccatcctgtacagcgtcccgttcgcggtgacggcgcagctggcggccacgaaaggcggcgggcaggggctgtgcaccggcgtgctcaacatctccatcgtcatccctcaggtgatcatcgcgctgggcgcgggcccgtgggacgcgctgttcggcaagggcaacatcccggcgttcggcgtggcgtcggggttcgccctcatcggcggcgtcgtgggcgtgttcctgctgcccaagatctccaagcgccagttccgcgccgtcagcgcgggcggccactgatcgcggccgccgcgccggagcacggcacggcggcacagcccagccgtgctagagctgtatgttttgaaagttgaaacagaataagaagcgggcgaaacgag

SEQ ID NO: 15585 - protein, 521 aa, Zea mays subsp. mays
  peptide (1)..(521): Ceres Seq. ID no. 13580194
MARGDGELELSVGVRGTGGAAAAAAADHVAPISLGRLILAGMVAGGVQYGWALQLSLLTPYVQTLGLSHALTSFMWLCGPIAGLVVQPLVGLYSDRCTARWGRRRPFILIGCMLICLAVIVVGFSSDIGAALGDTKEHCSLYHGPRWHAAIVYVLGFWLLDFSNNTVQGPARAMMADLCGHHGPSAANSIFCSWMALGNILGYSSGSTNNWHKWFPFLLTNACCEACANLKGAFLVAVVFLVMCLTVTLFFANEVPYRGNQNLPTKANGEVETEPSGPLAVLKGFKNLPTGMPSVLLVTGLTWLSWFPFILYDTDWMGREIYHGDPKGSNAQISAFDEGVRVGSFGLLLNSIVLGFSSFLIEPMCRKVGPRVVWVTSNFMVCVAMAATALISFWSLKDYHGYVQDAITASTSIKAVCLVLFAFLGVPLAILYSVPFAVTAQLAATKGGGQGLCTGVLNISIVIPQVIIALGAGPWDALFGKGNIPAFGVASGFALIGGVVGVFLLPKISKRQFRAVSAGGH

SEQ ID NO: 15586 - protein, 480 aa, Zea mays subsp. mays
  peptide (1)..(480): Ceres Seq. ID no. 13580195
MVAGGVQYGWALQLSLLTPYVQTLGLSHALTSFMWLCGPIAGLVVQPLVGLYSDRCTARWGRRRPFILIGCMLICLAVIVVGFSSDIGAALGDTKEHCSLYHGPRWHAAIVYVLGFWLLDFSNNTVQGPARAMMADLCGHHGPSAANSIFCSWMALGNILGYSSGSTNNWHKWFPFLLTNACCEACANLKGAFLVAVVFLVMCLTVTLFFANEVPYRGNQNLPTKANGEVETEPSGPLAVLKGFKNLPTGMPSVLLVTGLTWLSWFPFILYDTDWMGREIYHGDPKGSNAQISAFDEGVRVGSFGLLLNSIVLGFSSFLIEPMCRKVGPRVVWVTSNFMVCVAMAATALISFWSLKDYHGYVQDAITASTSIKAVCLVLFAFLGVPLAILYSVPFAVTAQLAATKGGGQGLCTGVLNISIVIPQVIIALGAGPWDALFGKGNIPAFGVASGFALIGGVVGVFLLPKISKRQFRAVSAGGH

SEQ ID NO: 15587 - protein, 447 aa, Zea mays subsp. mays
  peptide (1)..(447): Ceres Seq. ID no. 13580196
MWLCGPIAGLVVQPLVGLYSDRCTARWGRRRPFILIGCMLICLAVIVVGFSSDIGAALGDTKEHCSLYHGPRWHAAIVYVLGFWLLDFSNNTVQGPARAMMADLCGHHGPSAANSIFCSWMALGNILGYSSGSTNNWHKWFPFLLTNACCEACANLKGAFLVAVVFLVMCLTVTLFFANEVPYRGNQNLPTKANGEVETEPSGPLAVLKGFKNLPTGMPSVLLVTGLTWLSWFPFILYDTDWMGREIYHGDPKGSNAQISAFDEGVRVGSFGLLLNSIVLGFSSFLIEPMCRKVGPRVVWVTSNFMVCVAMAATALISFWSLKDYHGYVQDAITASTSIKAVCLVLFAFLGVPLAILYSVPFAVTAQLAATKGGGQGLCTGVLNISIVIPQVIIALGAGPWDALFGKGNIPAFGVASGFALIGGVVGVFLLPKISKRQFRAVSAGGH

SEQ ID NO: 15588 - DNA, 828 bp, Zea mays subsp. mays; identical to SEQ ID NO: 14873
  misc_feature (1)..(828): Ceres Seq. ID no. 12595473
  misc_feature (1)..(828): Ortholog of  Ceres SEQ ID NO 14309616 as cited in SEQ ID NO 52695

SEQ ID NO: 15589 - protein, 230 aa, Zea mays subsp. mays; identical to SEQ ID NO: 14874
  peptide (1)..(230): Ceres Seq. ID no. 12595474

SEQ ID NO: 15590 - protein, 222 aa, Zea mays subsp. mays; identical to SEQ ID NO: 14875
  peptide (1)..(222): Ceres Seq. ID no. 12595475

SEQ ID NO: 15591 - protein, 178 aa, Zea mays subsp. mays; identical to SEQ ID NO: 14876
  peptide (1)..(178): Ceres Seq. ID no. 12595476

SEQ ID NO: 15592 - DNA, 610 bp, Zea mays subsp. mays; identical to SEQ ID NO: 6241
  misc_feature (1)..(610): Ceres Seq. ID no. 12594280
  misc_feature (1)..(610): Ortholog of  Ceres SEQ ID NO 15173480 as cited in SEQ ID NO 63586

SEQ ID NO: 15593 - protein, 115 aa, Zea mays subsp. mays; identical to SEQ ID NO: 6242
  peptide (1)..(115): Ceres Seq. ID no. 12594281

SEQ ID NO: 15594 - protein, 108 aa, Zea mays subsp. mays; identical to SEQ ID NO: 6243
  peptide (1)..(108): Ceres Seq. ID no. 12594282

SEQ ID NO: 15595 - protein, 85 aa, Zea mays subsp. mays; identical to SEQ ID NO: 6244
  peptide (1)..(85): Ceres Seq. ID no. 12594283

SEQ ID NO: 15596 - DNA, 1232 bp, Zea mays subsp. mays; identical to SEQ ID NO: 2188
  misc_feature (1)..(1232): Ceres Seq. ID no. 13635672
  misc_feature (1)..(1232): Ortholog of  Ceres SEQ ID NO 15224319 as cited in SEQ ID NO 66044

SEQ ID NO: 15597 - protein, 247 aa, Zea mays subsp. mays; identical to SEQ ID NO: 2189
  peptide (1)..(247): Ceres Seq. ID no. 15220349
  misc_feature (86)..(86): Xaa is any aa, unknown or other

SEQ ID NO: 15598 - protein, 246 aa, Zea mays subsp. mays; identical to SEQ ID NO: 2190
  peptide (1)..(246): Ceres Seq. ID no. 15220350
  misc_feature (28)..(28): Xaa is any aa, unknown or other

SEQ ID NO: 15599 - protein, 193 aa, Zea mays subsp. mays; identical to SEQ ID NO: 2191
  peptide (1)..(193): Ceres Seq. ID no. 15220351
  misc_feature (32)..(32): Xaa is any aa, unknown or other

SEQ ID NO: 15600 - DNA, 882 bp, Zea mays subsp. mays; identical to SEQ ID NO: 10553
  misc_feature (1)..(882): Ceres Seq. ID no. 12595582
  misc_feature (1)..(882): Ortholog of  Ceres SEQ ID NO 14314807 as cited in SEQ ID NO 52563
  misc_feature (1)..(882): Ortholog of  Ceres SEQ ID NO 12625405 as cited in SEQ ID NO 63172

SEQ ID NO: 15601 - protein, 156 aa, Zea mays subsp. mays; identical to SEQ ID NO: 10554
  peptide (1)..(156): Ceres Seq. ID no. 12595583

SEQ ID NO: 15602 - protein, 133 aa, Zea mays subsp. mays; identical to SEQ ID NO: 10555
  peptide (1)..(133): Ceres Seq. ID no. 12595584

SEQ ID NO: 15603 - protein, 120 aa, Zea mays subsp. mays; identical to SEQ ID NO: 10556
  peptide (1)..(120): Ceres Seq. ID no. 12595585

SEQ ID NO: 15604 - DNA, 785 bp, Zea mays subsp. mays
  misc_feature (1)..(785): Ceres Seq. ID no. 12577837
  misc_feature (1)..(785): Ortholog of  Ceres SEQ ID NO 12557831 as cited in SEQ ID NO 58
  misc_feature (1)..(785): Ortholog of  Ceres SEQ ID NO 13638808 as cited in SEQ ID NO 51951
  misc_feature (1)..(785): Ortholog of  Ceres SEQ ID NO 12637454 as cited in SEQ ID NO 0
ataaggcgcccgcggtgcccatcaattcgtgtcaccgcgtcccgagagcgcaaatcattccgcgcgacgcaaaaaccctagcctagccaccgatccctctcatggcaaccaccaccacccaggcgagcctcctcctccagaagcagctaagagatctcgcgaagcaccccgtggatgggttctctgctgggctggtcgacgacagcaatgtcttcgagtggcaggtcaccatcatcggaccgcctgacaccctatatgatggagggtacttcaatgcaataatgagcttcccacaaaattacccaaacagcccgccatcagtcagatttacctctgaaatgtggcatccaaatgtctatcctgatgggcgggtttgtatctctattcttcatccacctggtgaagatccaaacggttatgagctcgcaagtgagcgatggacacctgtgcacacagtagaaagcatagttctgagcattatatcaatgctctctagtccaaatgatgagtctccagcaaacattgaggcagctaaggaatggagggaacagagggaggatttcaagaaaaaggttaggcgcatcgtgcggaaatcacaggaaatgttctgaaggaaatgggagtgctggtgaagttaaccatgccatgtcaggctgcaggattttgctgccaacctcaaaagtgctcatctgacaccagcgtcttgtgtattttccatttatcgtctgttcattggtgacaattgcctccagaaatgcattgggacgtggtcggcttgaaggttc

SEQ ID NO: 15605 - protein, 169 aa, Zea mays subsp. mays
  peptide (1)..(169): Ceres Seq. ID no. 12577838
MATTTTQASLLLQKQLRDLAKHPVDGFSAGLVDDSNVFEWQVTIIGPPDTLYDGGYFNAIMSFPQNYPNSPPSVRFTSEMWHPNVYPDGRVCISILHPPGEDPNGYELASERWTPVHTVESIVLSIISMLSSPNDESPANIEAAKEWREQREDFKKKVRRIVRKSQEMF

SEQ ID NO: 15606 - protein, 109 aa, Zea mays subsp. mays
  peptide (1)..(109): Ceres Seq. ID no. 12577839
MSFPQNYPNSPPSVRFTSEMWHPNVYPDGRVCISILHPPGEDPNGYELASERWTPVHTVESIVLSIISMLSSPNDESPANIEAAKEWREQREDFKKKVRRIVRKSQEMF

SEQ ID NO: 15607 - protein, 90 aa, Zea mays subsp. mays
  peptide (1)..(90): Ceres Seq. ID no. 12577840
MWHPNVYPDGRVCISILHPPGEDPNGYELASERWTPVHTVESIVLSIISMLSSPNDESPANIEAAKEWREQREDFKKKVRRIVRKSQEMF

SEQ ID NO: 15608 - DNA, 1041 bp, Zea mays subsp. mays
  misc_feature (1)..(1041): Ceres Seq. ID no. 13579624
  misc_feature (1)..(1041): Ortholog of  Ceres SEQ ID NO 12609335 as cited in SEQ ID NO 51835
  misc_feature (1)..(1041): Ortholog of  Ceres SEQ ID NO 12626248 as cited in SEQ ID NO 65768
ccgcaaggatccaccacaacagcgaaggagaaagcagaccaacctagccacccagggagaaagaggccaaaagggaggggagagtgtcgtcatggcttccattgtcgcttccaggagggccgttcctctagttcgcgctctggagaagctcatcgcagcgtcctccgctcccgggactggctccgccctcaggccggtggcagtcgccggcggcctccgcggctacaacaccggcgctccgctccgacgctacgagggggccgagtcggaagacgatagcgtccgcgagtacgatgggcggcacggcggccgggactacgctgtgcccagcctgttctcagatattttccgtgatccgcttagtgcgccgcacagcattggccgcctgctgaaccttgtggacgacttggcggtggcggcgccaggtcgtgcggtgcgccgtggctggaacgcgaaggaggacgaggaggcgctgcacctgagggtggacatgccaggcctggggaaggagcacgtcaaggtgtgggcggagcagaacagcctggtgatcaagggcgagggcgagaaggaggatagcgaggacgaggccgccccgcctccgagatacagcggtcgcatcgagctcgcgccagaggtttacaggatggacaagatcaaggcggagatgaagaacggcgtgctcaaggtggtcgtgccgaaggtgaaggagcagcagcgcaaggacgtgttccaagtcaacgtcgagtagatgtttccaaatagaagcaagtgccggtacgggatggaggattggaggggcactgccaaactaggattcctctctctcaatctgatctggattctggaatcagatttctcttctttcatttttctcgtctatcttctatcagtatgaaataagcaacgtcgcttcagttttcgtgtcaaggccggtggagtcgcctatgtttattttattttctttgtatttcctacctggacacacgttctctatgccgtgtttggtttccgcagatttttaaaatatgcatgttcaaaccc

SEQ ID NO: 15609 - protein, 248 aa, Zea mays subsp. mays
  peptide (1)..(248): Ceres Seq. ID no. 13579625
RKDPPQQRRRKQTNLATQGERGQKGGESVVMASIVASRRAVPLVRALEKLIAASSAPGTGSALRPVAVAGGLRGYNTGAPLRRYEGAESEDDSVREYDGRHGGRDYAVPSLFSDIFRDPLSAPHSIGRLLNLVDDLAVAAPGRAVRRGWNAKEDEEALHLRVDMPGLGKEHVKVWAEQNSLVIKGEGEKEDSEDEAAPPPRYSGRIELAPEVYRMDKIKAEMKNGVLKVVVPKVKEQQRKDVFQVNVE

SEQ ID NO: 15610 - protein, 218 aa, Zea mays subsp. mays
  peptide (1)..(218): Ceres Seq. ID no. 13579626
MASIVASRRAVPLVRALEKLIAASSAPGTGSALRPVAVAGGLRGYNTGAPLRRYEGAESEDDSVREYDGRHGGRDYAVPSLFSDIFRDPLSAPHSIGRLLNLVDDLAVAAPGRAVRRGWNAKEDEEALHLRVDMPGLGKEHVKVWAEQNSLVIKGEGEKEDSEDEAAPPPRYSGRIELAPEVYRMDKIKAEMKNGVLKVVVPKVKEQQRKDVFQVNVE

SEQ ID NO: 15611 - DNA, 453 bp, Zea mays subsp. mays
  misc_feature (1)..(453): Ceres Seq. ID no. 7117146
  misc_feature (1)..(453): Ortholog of  Ceres SEQ ID NO 15178736 as cited in SEQ ID NO 56439
catagaaatctgccantttttgccncgggttggtggtgttgaattggaactgattgccattgctacaggagggcggattgttccgagattccaagagttgagtcctgaaaagcttggaaaggctggattagtcagagagaaatcattcggaacaacaaaggaccggatgctttacattgagaagtgtgccaattctagagctgtaaccattttcatccgtgggggaaacaaaatgatgattgaggagaccaagcgcagtcttcntgntgttctttgcncaccanggaatctgatccggaataactcgattgtgtacggtggcggctcagccgagatatcttgctcaattgctgttgaaactgctgcagatcggcacccgggagttgagcagtatgctatcaggtcattcgctgatgcattagatgctgttccactagcgttggccgaaaacag

SEQ ID NO: 15612 - protein, 150 aa, Zea mays subsp. mays
  peptide (1)..(150): Ceres Seq. ID no. 7117147
  misc_feature (5)..(5): Xaa is any aa, unknown or other
  misc_feature (8)..(8): Xaa is any aa, unknown or other
  misc_feature (88)..(88): Xaa is any aa, unknown or other
  misc_feature (89)..(89): Xaa is any aa, unknown or other
  misc_feature (93)..(93): Xaa is any aa, unknown or other
  misc_feature (95)..(95): Xaa is any aa, unknown or other
IEICXFLXRVGGVELELIAIATGGRIVPRFQELSPEKLGKAGLVREKSFGTTKDRMLYIEKCANSRAVTIFIRGGNKMMIEETKRSLXXVLCXPXNLIRNNSIVYGGGSAEISCSIAVETAADRHPGVEQYAIRSFADALDAVPLALAEN

SEQ ID NO: 15613 - protein, 95 aa, Zea mays subsp. mays
  peptide (1)..(95): Ceres Seq. ID no. 7117148
  misc_feature (33)..(33): Xaa is any aa, unknown or other
  misc_feature (34)..(34): Xaa is any aa, unknown or other
  misc_feature (38)..(38): Xaa is any aa, unknown or other
  misc_feature (40)..(40): Xaa is any aa, unknown or other
MLYIEKCANSRAVTIFIRGGNKMMIEETKRSLXXVLCXPXNLIRNNSIVYGGGSAEISCSIAVETAADRHPGVEQYAIRSFADALDAVPLALAEN

SEQ ID NO: 15614 - DNA, 1132 bp, Zea mays subsp. mays
  misc_feature (1)..(1132): Ceres Seq. ID no. 13579672
  misc_feature (1)..(1132): Ortholog of  Ceres SEQ ID NO 15174082 as cited in SEQ ID NO 61896
  misc_feature (1)..(1132): Ortholog of  Ceres SEQ ID NO 13655598 as cited in SEQ ID NO 64077
  misc_feature (1)..(1132): Ortholog of  Ceres SEQ ID NO 13624271 as cited in SEQ ID NO 0
  misc_feature (1)..(1132): Ortholog of  Ceres SEQ ID NO 15179351 as cited in SEQ ID NO 0
accaccgcatcccacaccgggcacaccccccgagctcagcttagctccactccagctccaatcacagtcgtgaccagagcgcgagagctagctagagggccgtgaaaatgccgatcaataggatcgccctggggagccaccaggaggtgtaccacccgggcgccctcaaggcggcgttcgctgagttcatctccaccctcatcttcgtcttcgccggccagggctccggcatggccttcagcaagctgaccggcggcggcccgacgaccccggcgggcctgatcgcggcggcggtggcgcacgcgttcgcgctgttcgtggcggtgtcggtgggcgcgaacatctcgggcgggcacgtgaacccggccgtgaccttcggcgccttcgtgggcggcaacatcaccctgttccgggggctcctgtactgggtggcgcagctgctggggtccaccgtggcgtgcttcctgctccgcttctcgacgggcgggcaggccacgggcaccttcgggctgacgggcgtgtcggtgtgggaggcgctggtgctggagatcgtgatgaccttcgggctggtgtacacggtgtacgccacggcggtggacccgaagaagggcagcctgggcaccatcgcccccatcgccatcggcttcatcgtgggggccaacatcctggtgggcggcgccttcgacggcgcgtccatgaaccccgccgtgtccttcggccccgccctcgtcagctgggagtggggctaccagtgggtgtactgggtcggccccctcatcggcggcggcctcgccggcgtcatctacgagctgctcttcatctcccacacccacgagcagctcccctccaccgactactaaaagccgaagccgaccgacccaggggtgcgcagcgcagcgcagctagcatccagctctctctccccggcccgctcgccgccgtttagtttctctcgtgcacgtgcatgcatcgtagactgtctcaggccgccgctgcgccggcgccgctcgcatcgtttgcttttccttggaccagcagtcgtcgccgtcaggttgagctgcttgtaaccgttaattccggacccgtttgcttctgtaagatttgtgcatttgcctgtgagtattcaccggcc

SEQ ID NO: 15615 - protein, 250 aa, Zea mays subsp. mays; identical to SEQ ID NO: 15013
  peptide (1)..(250): Ceres Seq. ID no. 13579673

SEQ ID NO: 15616 - protein, 209 aa, Zea mays subsp. mays; identical to SEQ ID NO: 15014
  peptide (1)..(209): Ceres Seq. ID no. 13579674

SEQ ID NO: 15617 - DNA, 420 bp, Zea mays subsp. mays
  misc_feature (1)..(420): Ceres Seq. ID no. 11412440
  misc_feature (1)..(420): Ortholog of  Ceres SEQ ID NO 15179007 as cited in SEQ ID NO 1038
gggcctctcgcctgccagaccgcgataacggtgttcgacaagatcacgagacccggtttcctggccgaggtgtccaggaaaggggagagcttcaagcagctgctccgcgccaagctgagcgggaacccgcacgtgagggaggtccgcggggtcggccttctcgtcggcgtcgagctggacgtgccggctggtcctctggtcgacgcgtgcttggacgccggcgtcatcgtgctgactgccggtaagggcaatgtggtgaggctggtgccgccgctcatcgtctcggagaaggagctggagcatgccgctgatgtcataagggactgtctaccggcgctcgatgtccggatatgaaacctgattccaaattttggaatcgaataatttcatgtcgggccaataatgttgttgtgttcattg

SEQ ID NO: 15618 - protein, 117 aa, Zea mays subsp. mays
  peptide (1)..(117): Ceres Seq. ID no. 11412441
GPLACQTAITVFDKITRPGFLAEVSRKGESFKQLLRAKLSGNPHVREVRGVGLLVGVELDVPAGPLVDACLDAGVIVLTAGKGNVVRLVPPLIVSEKELEHAADVIRDCLPALDVRI

SEQ ID NO: 15619 - protein, 80 aa, Zea mays subsp. mays
  peptide (1)..(80): Ceres Seq. ID no. 11412442
ASRLPDRDNGVRQDHETRFPGRGVQERGELQAAAPRQAEREPAREGGPRGRPSRRRRAGRAGWSSGRRVLGRRRHRADCR

SEQ ID NO: 15620 - DNA, 482 bp, Zea mays subsp. mays
  misc_feature (1)..(482): Ceres Seq. ID no. 11412782
  misc_feature (1)..(482): Ortholog of  Ceres SEQ ID NO 12593464 as cited in SEQ ID NO 69039
ggcgagatggtcggctcgaggaacgtgagggacaggcagccgctgatgggcgccgaggacttcgcgttctacgccgaggcggtcccttccacctactactacttcgtgggcatgtacaacgagacgcgcgggccgcaggcgccccaccactccccctacttcaccgtcaacgaagacgccctcccctacggcgcggccgggcaggcggcgctggcagctcgctacctactcgagcgtcagcagcctgctgccgccaccgctgataaggcagaaacccatgatgagctgtagattagtacatgatgtttgcgtccctgtccctgtgttgatggaattagattgagcaataatttcctcgccaagttattcagcggctgtacatatcctggtatctccatggcccatgctttggtaatgatcggttgggatcaggcattatttggtccagacgttcagtcagagctatttgcaattcgtttgat

SEQ ID NO: 15621 - protein, 96 aa, Zea mays subsp. mays
  peptide (1)..(96): Ceres Seq. ID no. 11412783
GEMVGSRNVRDRQPLMGAEDFAFYAEAVPSTYYYFVGMYNETRGPQAPHHSPYFTVNEDALPYGAAGQAALAARYLLERQQPAAATADKAETHDEL

SEQ ID NO: 15622 - protein, 94 aa, Zea mays subsp. mays
  peptide (1)..(94): Ceres Seq. ID no. 11412784
MVGSRNVRDRQPLMGAEDFAFYAEAVPSTYYYFVGMYNETRGPQAPHHSPYFTVNEDALPYGAAGQAALAARYLLERQQPAAATADKAETHDEL

SEQ ID NO: 15623 - protein, 86 aa, Zea mays subsp. mays
  peptide (1)..(86): Ceres Seq. ID no. 11412785
RDGRLEEREGQAAADGRRGLRVLRRGGPFHLLLLRGHVQRDARAAGAPPLPLLHRQRRRPPLRRGRAGGAGSSLPTRASAACCRHR

SEQ ID NO: 15624 - DNA, 695 bp, Zea mays subsp. mays
  misc_feature (1)..(695): Ceres Seq. ID no. 11412660
  misc_feature (1)..(695): Ortholog of  Ceres SEQ ID NO 15177304 as cited in SEQ ID NO 52668
atcctctacaagcccggcgaacatccggatcacgtaatcgtgatcaagtacatcccctacgtgggtgacagcaagagggctatggacgagtatacctctgagatcttcatgggtggcaagaacaccatcgcgctgcacaacacctgcgaggactcgcttctcgccgcgcccatcatccttgacttggtgctcctagctgagctcagcactcggattcagctcaaggccgaagggcaggataagttccactccttccaccctgtcgccactattctgagctacctcagcaaggctcctcttgtacctcctggcacaccagtggtgaatgctctagccaagcagagggccatgctggaaaacatcttgcgggcctgcattggccttgcccctgagaacaacatgatgcttgagcacaagtgaagagtttcacgtcccttaattaactaccacaagataggatgaatggaaaaaggagggatcaagcgaaggtgtgggaataatcagtgactcctctgagcccaacgaagaaatgtcaggaggctacaggaaggagaagtgtaaggagagaagaccaagcatggatatatcctcttttcgaaggcaatctatctannnnttttttgtagatttgactcgttttttgtactcgtgggacgagattgtgtactggctatatatccactgtatgcagcatg

SEQ ID NO: 15625 - protein, 139 aa, Zea mays subsp. mays
  peptide (1)..(139): Ceres Seq. ID no. 11412661
ILYKPGEHPDHVIVIKYIPYVGDSKRAMDEYTSEIFMGGKNTIALHNTCEDSLLAAPIILDLVLLAELSTRIQLKAEGQDKFHSFHPVATILSYLSKAPLVPPGTPVVNALAKQRAMLENILRACIGLAPENNMMLEHK

SEQ ID NO: 15626 - protein, 112 aa, Zea mays subsp. mays
  peptide (1)..(112): Ceres Seq. ID no. 11412662
MDEYTSEIFMGGKNTIALHNTCEDSLLAAPIILDLVLLAELSTRIQLKAEGQDKFHSFHPVATILSYLSKAPLVPPGTPVVNALAKQRAMLENILRACIGLAPENNMMLEHK

SEQ ID NO: 15627 - protein, 103 aa, Zea mays subsp. mays
  peptide (1)..(103): Ceres Seq. ID no. 11412663
MGGKNTIALHNTCEDSLLAAPIILDLVLLAELSTRIQLKAEGQDKFHSFHPVATILSYLSKAPLVPPGTPVVNALAKQRAMLENILRACIGLAPENNMMLEHK

SEQ ID NO: 15628 - DNA, 450 bp, Zea mays subsp. mays; identical to SEQ ID NO: 14059
  misc_feature (1)..(450): Ceres Seq. ID no. 13635772
  misc_feature (1)..(450): Ortholog of  Ceres SEQ ID NO 13598714 as cited in SEQ ID NO 62656

SEQ ID NO: 15629 - protein, 150 aa, Zea mays subsp. mays; identical to SEQ ID NO: 14060
  peptide (1)..(150): Ceres Seq. ID no. 13635773

SEQ ID NO: 15630 - protein, 134 aa, Zea mays subsp. mays; identical to SEQ ID NO: 14061
  peptide (1)..(134): Ceres Seq. ID no. 13635774

SEQ ID NO: 15631 - protein, 128 aa, Zea mays subsp. mays; identical to SEQ ID NO: 14062
  peptide (1)..(128): Ceres Seq. ID no. 13635775

SEQ ID NO: 15632 - DNA, 1064 bp, Zea mays subsp. mays
  misc_feature (1)..(1064): Ceres Seq. ID no. 12405342
  misc_feature (1)..(1064): Ortholog of  Ceres SEQ ID NO 14307431 as cited in SEQ ID NO 54422
  misc_feature (1)..(1064): Ortholog of  Ceres SEQ ID NO 14301614 as cited in SEQ ID NO 61994
  misc_feature (1)..(1064): Ortholog of  Ceres SEQ ID NO 13663965 as cited in SEQ ID NO 69145
gaaaactacccacaccacaaagaaatcgaagaggggaacagagaggagagagaagggagatggcggaggcgacggcgtacgaggagcagcgccggaggcaggtggaggcgaacaagcgaaagctggaggagcttcagctccactacctctccgccgccgtcagagaggccgcagccgccgccaagccctcgccggtcaagaagcggaaggcgcgggtgccgcttgacgccgccgactccgtgatggagccactacggcggtccggccggctcgccaacctccccgataagtccgtgcaccgcgaggaggttccaactttttggagaaagattaggaggacgtatggatcagtgagaaaagatctggaaaaccgggtgtacgcgaccgacgaggcgaggggctacgccatctgtaaggcggaagaagtggagcaagagctggactccagcttccccgtcttcatcaaacccatgacccagtcccatgtcaccggaggcttctggctgggcctcccaaatcatttctgccggaagtacctgcccaagcgtgacgagacgatcaccctgctggatgaggatgacaacgagtcctacacgctatacctcgcattgaagcgaggcctcagcgctggatggagagggttcgctatccagcacaagctggttgatggagattgcttggtcttccagctgactgagagaacaaagttcaaggtaatcataattagagcaagttcttactatgaaagtgaggactgatgaaactaatagcttgtaatgcggtgattggagcacagtttatggaggtgggctgcattggacaagctcgcatctggaaattgctgggtgtcttgaaccttttgggtgacagaaagttatctcatgtacaaaatgtttacacagcccagttgctaccaattgctgatttgtgtacttcttgggctttaccacttgcacggttcagaaacctgcactatgtaaggggatgttgatggcaattgacctcattttgtaaatgatcctcgtttatcttggattcatttttagtgttcagtttggcagttg

SEQ ID NO: 15633 - protein, 251 aa, Zea mays subsp. mays
  peptide (1)..(251): Ceres Seq. ID no. 12405343
KLPTPQRNRRGEQRGERREMAEATAYEEQRRRQVEANKRKLEELQLHYLSAAVREAAAAAKPSPVKKRKARVPLDAADSVMEPLRRSGRLANLPDKSVHREEVPTFWRKIRRTYGSVRKDLENRVYATDEARGYAICKAEEVEQELDSSFPVFIKPMTQSHVTGGFWLGLPNHFCRKYLPKRDETITLLDEDDNESYTLYLALKRGLSAGWRGFAIQHKLVDGDCLVFQLTERTKFKVIIIRASSYYESED

SEQ ID NO: 15634 - protein, 232 aa, Zea mays subsp. mays
  peptide (1)..(232): Ceres Seq. ID no. 12405344
MAEATAYEEQRRRQVEANKRKLEELQLHYLSAAVREAAAAAKPSPVKKRKARVPLDAADSVMEPLRRSGRLANLPDKSVHREEVPTFWRKIRRTYGSVRKDLENRVYATDEARGYAICKAEEVEQELDSSFPVFIKPMTQSHVTGGFWLGLPNHFCRKYLPKRDETITLLDEDDNESYTLYLALKRGLSAGWRGFAIQHKLVDGDCLVFQLTERTKFKVIIIRASSYYESED

SEQ ID NO: 15635 - protein, 171 aa, Zea mays subsp. mays
  peptide (1)..(171): Ceres Seq. ID no. 12405345
MEPLRRSGRLANLPDKSVHREEVPTFWRKIRRTYGSVRKDLENRVYATDEARGYAICKAEEVEQELDSSFPVFIKPMTQSHVTGGFWLGLPNHFCRKYLPKRDETITLLDEDDNESYTLYLALKRGLSAGWRGFAIQHKLVDGDCLVFQLTERTKFKVIIIRASSYYESED

SEQ ID NO: 15636 - DNA, 1295 bp, Zea mays subsp. mays
  misc_feature (1)..(1295): Ceres Seq. ID no. 15179550
  misc_feature (1)..(1295): Ortholog of  Ceres SEQ ID NO 13594758 as cited in SEQ ID NO 51898
  misc_feature (1)..(1295): Ortholog of  Ceres SEQ ID NO 13661175 as cited in SEQ ID NO 61110
  misc_feature (1)..(1295): Ortholog of  Ceres SEQ ID NO 13598708 as cited in SEQ ID NO 68118
  misc_feature (1)..(1295): Ortholog of  Ceres SEQ ID NO 13596265 as cited in SEQ ID NO 68369
  misc_feature (1)..(1295): Ortholog of  Ceres SEQ ID NO 15179585 as cited in SEQ ID NO 0
acaatattattggactattcctaacacaacggaggccataggatgggatggtcatctataaatacgtagcccggcgcagccttctttggagcagggagaagaacacagggcacacgcacggcacgcagatacatatagagagaggttagctatagcttgcacatctatttaactaactaactaactggctagctagctcgatcggcagagcaaagcgaaagcagcaagaagcaaagcaatggagaaccctgcgagtgtgctagttctaccagcgcagttcaccaaactcaccttccgaaacctgtacatccgccgggccgggccgggcagcagggagataaccgaggagggcaggtgcgacctggacaagagatacgtgagtgacttccccgtctacgacggccgcggccccgacgccagccttgtggcccgcgtgcaggggatcaccagcgaaatcgggaacgcgcaccaactgttcgtcgttgttttcgacaccgacaggctcaagggctccacgctcgtcaccaatggcgtgataacggccgggtctgacgagtgggcgatctacggcggaaccggggtgtttgccatggcgaggggcgtcataaggagaaggtatctcgccgacagggccggcgggaacactgatgagctcaacatggatgtcttctgccggccgtttggctcacagtcagagctgcaagataaggtgcaggggcagggctctagcgtcaccaagattggactatggggtggaccgggagggtcggcacaggacatcacggcggagcggccgccgcagcgtctgcacagcgtcaccgttcgtgctggcgtcgccgtcgactccatcgagttcacctatactgacagcgcttggcagaggcgcgccgctgggcgatggggtggactcgggggcaatgttcgaacgatcgaccttggcgacgccgaggatgtcagggaagtctcgggaacatacggcgcatttgaaggtgccactacgctgacctcgctcaggctcgtcaccagcagcagaacctggggcccctggggtgtcgagaacgggacgcgtttctccgtcacggcgcccatcggcagcagcatcgtgggattctatgcgcgggcgggaaccaggctcgtcgatgctatcggtgtttacttgcgtcagatttaattcgaataatagcaggggagctactgctagctacgtacctgctccatcctccattatcctttatttcaattcgctcatcatcgtcgtgtgtaaattaaataaataaagctcttgtgcccatatt

SEQ ID NO: 15637 - protein, 310 aa, Zea mays subsp. mays
  peptide (1)..(310): Ceres Seq. ID no. 15179551
MENPASVLVLPAQFTKLTFRNLYIRRAGPGSREITEEGRCDLDKRYVSDFPVYDGRGPDASLVARVQGITSEIGNAHQLFVVVFDTDRLKGSTLVTNGVITAGSDEWAIYGGTGVFAMARGVIRRRYLADRAGGNTDELNMDVFCRPFGSQSELQDKVQGQGSSVTKIGLWGGPGGSAQDITAERPPQRLHSVTVRAGVAVDSIEFTYTDSAWQRRAAGRWGGLGGNVRTIDLGDAEDVREVSGTYGAFEGATTLTSLRLVTSSRTWGPWGVENGTRFSVTAPIGSSIVGFYARAGTRLVDAIGVYLRQI

SEQ ID NO: 15638 - protein, 193 aa, Zea mays subsp. mays
  peptide (1)..(193): Ceres Seq. ID no. 15179552
MARGVIRRRYLADRAGGNTDELNMDVFCRPFGSQSELQDKVQGQGSSVTKIGLWGGPGGSAQDITAERPPQRLHSVTVRAGVAVDSIEFTYTDSAWQRRAAGRWGGLGGNVRTIDLGDAEDVREVSGTYGAFEGATTLTSLRLVTSSRTWGPWGVENGTRFSVTAPIGSSIVGFYARAGTRLVDAIGVYLRQI

SEQ ID NO: 15639 - protein, 170 aa, Zea mays subsp. mays
  peptide (1)..(170): Ceres Seq. ID no. 15179553
MDVFCRPFGSQSELQDKVQGQGSSVTKIGLWGGPGGSAQDITAERPPQRLHSVTVRAGVAVDSIEFTYTDSAWQRRAAGRWGGLGGNVRTIDLGDAEDVREVSGTYGAFEGATTLTSLRLVTSSRTWGPWGVENGTRFSVTAPIGSSIVGFYARAGTRLVDAIGVYLRQI

SEQ ID NO: 15640 - DNA, 1442 bp, Zea mays subsp. mays
  misc_feature (1)..(1442): Ceres Seq. ID no. 12377630
  misc_feature (1)..(1442): Ortholog of  Ceres SEQ ID NO 15174879 as cited in SEQ ID NO 53786
  misc_feature (1)..(1442): Ortholog of  Ceres SEQ ID NO 14313336 as cited in SEQ ID NO 55501
  misc_feature (1)..(1442): Ortholog of  Ceres SEQ ID NO 12583314 as cited in SEQ ID NO 56435
  misc_feature (1)..(1442): Ortholog of  Ceres SEQ ID NO 13584744 as cited in SEQ ID NO 69137
gcacgagaccattacctagaacatcctaatcgaaaaagggaacccatcttcttcttccccgcgctgcctgctgcctgctcgagcttggagatggcgttggtgcggcgatgcctctgtggatccgaggaagactgcagagcgcttttgggcatggaaaatctccggctgttctcctacagagagatcagagcaggcacaaacaacttcgatcagagtaacaagcttggacgaggtggttttggaactgtctacaagggagttctaagagacggcactgaatttgccgcgaaggttctgtcctcggaatccgagcaggggatcaaggagttcctagctgagatcgagagcatatcccaggtgaagcacgcgaacctcgtcaggcttctgggctgctgcgtacagaggaaaaaaaggatactggtgtacgagtaccttgcgaacaacagcctcgatcatgcgctcaaaggagcagcagcagatctaccctggagcacgaggtcgggcatctgcttgggcaccgccaaggggctgagctacctgcacgaggagcacgagccgaacatcgtgcacagggacatcaaagccagcaatgttcttctcgaccgagactacctgccaaagatcggagatttcgggctcgcgaagctgttcccggacaacatcacccacatcagcaccgcagtggtcggaacgagtggatacttggcgcctgaatacttcgtgcatgggcagctgaccaagaaagccgacgtctacagcttcggggtgcttgtcctggagatcatcagcgggaggagggtctcgcaaacgatccaggtcggacatgttcccggtgcgagaggcatggatgatgtaccagcaaggcaggctgctagagatcgtggacgcgagcatggggagctacccggagaaggaggtgctccggtacatcaaggtggggctggcctgcacgcaggccacgcccagcagccgccccacgatgcgccaggtgcttgccttgctgtcggaacggagatgctcccgccgagtttcgccgagcaccgcggccaccacacggcccctgccctggggggtttgcccgccggtccgctaatccatgcgtcgccgagggcgaggtggccggcggcggcgccgtcagcagcaacgtcgccgaagcaggtcctgagcctgaacgcgcaaccggcaatccggcatgtaactgaaactgatatagtcacgtgtgaggcggcgttcgttctgtcacgtaatcacttgcgttagaatttgattttctagtcttgttcgtgctcgcagtttggaccgggaaaaaagggtaggaggggctaggcaggtccataaacgagcatattgtttttaatctcaatccatatgagttagagaggattgagaatctgttcattttaatctcaattcatgtggattgaaagaaattgagtagattt

SEQ ID NO: 15641 - protein, 419 aa, Zea mays subsp. mays
  peptide (1)..(419): Ceres Seq. ID no. 12377631
ARDHYLEHPNRKREPIFFFPALPAACSSLEMALVRRCLCGSEEDCRALLGMENLRLFSYREIRAGTNNFDQSNKLGRGGFGTVYKGVLRDGTEFAAKVLSSESEQGIKEFLAEIESISQVKHANLVRLLGCCVQRKKRILVYEYLANNSLDHALKGAAADLPWSTRSGICLGTAKGLSYLHEEHEPNIVHRDIKASNVLLDRDYLPKIGDFGLAKLFPDNITHISTAVVGTSGYLAPEYFVHGQLTKKADVYSFGVLVLEIISGRRVSQTIQVGHVPGARGMDDVPARQAARDRGREHGELPGEGGAPVHQGGAGLHAGHAQQPPHDAPGACLAVGTEMLPPSFAEHRGHHTAPALGGLPAGPLIHASPRARWPAAAPSAATSPKQVLSLNAQPAIRHVTETDIVTCEAAFVLSRNHLR

SEQ ID NO: 15642 - protein, 389 aa, Zea mays subsp. mays
  peptide (1)..(389): Ceres Seq. ID no. 12377632
MALVRRCLCGSEEDCRALLGMENLRLFSYREIRAGTNNFDQSNKLGRGGFGTVYKGVLRDGTEFAAKVLSSESEQGIKEFLAEIESISQVKHANLVRLLGCCVQRKKRILVYEYLANNSLDHALKGAAADLPWSTRSGICLGTAKGLSYLHEEHEPNIVHRDIKASNVLLDRDYLPKIGDFGLAKLFPDNITHISTAVVGTSGYLAPEYFVHGQLTKKADVYSFGVLVLEIISGRRVSQTIQVGHVPGARGMDDVPARQAARDRGREHGELPGEGGAPVHQGGAGLHAGHAQQPPHDAPGACLAVGTEMLPPSFAEHRGHHTAPALGGLPAGPLIHASPRARWPAAAPSAATSPKQVLSLNAQPAIRHVTETDIVTCEAAFVLSRNHLR

SEQ ID NO: 15643 - protein, 369 aa, Zea mays subsp. mays
  peptide (1)..(369): Ceres Seq. ID no. 12377633
MENLRLFSYREIRAGTNNFDQSNKLGRGGFGTVYKGVLRDGTEFAAKVLSSESEQGIKEFLAEIESISQVKHANLVRLLGCCVQRKKRILVYEYLANNSLDHALKGAAADLPWSTRSGICLGTAKGLSYLHEEHEPNIVHRDIKASNVLLDRDYLPKIGDFGLAKLFPDNITHISTAVVGTSGYLAPEYFVHGQLTKKADVYSFGVLVLEIISGRRVSQTIQVGHVPGARGMDDVPARQAARDRGREHGELPGEGGAPVHQGGAGLHAGHAQQPPHDAPGACLAVGTEMLPPSFAEHRGHHTAPALGGLPAGPLIHASPRARWPAAAPSAATSPKQVLSLNAQPAIRHVTETDIVTCEAAFVLSRNHLR

SEQ ID NO: 15644 - DNA, 582 bp, Zea mays subsp. mays
  misc_feature (1)..(582): Ceres Seq. ID no. 13598824
  misc_feature (1)..(582): Ortholog of  Ceres SEQ ID NO 14302343 as cited in SEQ ID NO 67343
gcaattggaaaggatgttcaggccatgaaggcagtcgttggagaggaggcactctcgtctgaggatctgctttacttagagttccttgacaagtttgagaggaagtttgtgacacaaggagcatacgacacacggaacatcttccagtcactagatcttgcatggacattgcttcggatcttccctcgcgaacttctccaccgtatcccggcgaagaccttggaccagtactatagcagagatgcctcccactgaatcactgatcgttgatcagtgttccaatagtttggcaagtgttgaataaattgaacagattggcttcatggccttttccctgtatttatgtgtagtcaggtccaattcttttctgttgatgagcgcaagtttttcgtagatgactcgcggtcacggcaatatttgtgatattgtgtcatctgtggactatggttaaatttcagttatttgttttctttcaccttccagaactgttagcaagagcattctggaccaggatgctcgaacacaactggctgtatgtacatttgtgaatggtgaataaagaaggggcaataaactgctgcc

SEQ ID NO: 15645 - protein, 84 aa, Zea mays subsp. mays
  peptide (1)..(84): Ceres Seq. ID no. 13598825
AIGKDVQAMKAVVGEEALSSEDLLYLEFLDKFERKFVTQGAYDTRNIFQSLDLAWTLLRIFPRELLHRIPAKTLDQYYSRDASH

SEQ ID NO: 15646 - protein, 76 aa, Zea mays subsp. mays
  peptide (1)..(76): Ceres Seq. ID no. 13598826
MKAVVGEEALSSEDLLYLEFLDKFERKFVTQGAYDTRNIFQSLDLAWTLLRIFPRELLHRIPAKTLDQYYSRDASH
